United States Patent Application Publication US 2018/0126003 A1 - sequence listing, part 158

SEQ ID NO: 277374 - DNA, 1770 bp, Artificial Sequence
  derived and/or modified sequence
atgcccagaagaagcagaagaggcatctggagaatccccgtggacgagatcgacagacccggcagcttcgcctggcacatgaacagaagcatcgtgctgctgctgaaggtgctggcccagctgagagaccacagcaccctgctgaaggtgagcagcatgctgcagagaacccccgaccagggcaagaagtacctgagagacgccgacagacaggtgctggcccagagagccttcatcctgaccgtgaaggtgctggaggacaccctgagcgagctggccgagggcagcgagagacccggccccaaggtgtgcggcctgcccggcgccagaatgaccaccgacgtgagccacaaggccagccccgaggacggccaggagggcctgccccagcccaagaagccccccctggccgacggcagcggccccggccccgagcccggcggcaaggtgggcctgctgaaccacagacccgtggccatggacgccggcgacagcgccgaccagagcggcgagagaaaggacaaggagagccccagagccggccccaccgagcccatggacaccagcgaggccaccgtgtgccacagcgacctggagagaaccccccccctgctgcccggcagacccgccagagacagaggccccgagagcagacccaccgagctgagcctggaggagctgagcatcagcgccagacagcagcccacccccctgacccccgcccagcccgcccccgcccccgcccccgccaccaccaccggcaccagagccggcggccaccccgaggagcccctgagcagactgagcagaaagagaaagctgctggaggacaccgagagcggcaagaccctgctgctggacgcctacagagtgtggcagcagggccagaagggcgtggcctacgacctgggcagagtggagagaatcatgagcgagacctacatgctgatcaagcaggtggacgaggaggccgccctggagcaggccgtgaagttctgccaggtgcacctgggcctgccccccagagacagacccagagacacccccaccacccccaagcaccccaaggacagcagagagaacttcttccccgtgaccgtggtgcccaccgcccccgaccccgtgcccgccgacagcgtgcagagacccagcgacgcccacaccaagcccagacccgccctggccgccgccaccaccatcatcacctgcccccccagcgccagcgccagcaccctggaccagagcaaggaccccggcccccccagaccccacagacccgaggccacccccagcatggccagcctgggccccgagggcaagctgagacccgagcccagaagagacggcgaggcccaggaggccgccagcgagacccagcccctgagcagcccccccaccgccgccagcagcaaggcccccagcagcggcagcgcccagccccccgagggccaccccggcaagcccgagcccagcagagccaagagcagacccctgcccaacatgcccaagctggtgatccccagcgccgccaccaagttcccccccgagatcaccgtgaccccccccacccccaccctgctgagccccaagggcagcatcagcgaggagaccaagcagaagctgaagagcgccatcctgagcgcccagagcgccgccaacgtgagaaaggagagcctgtgccagcccgccctggaggtgctggagaccagcagccaggagagcagcctggagagcgagaccgacgaggacgacgactacatggacatctag

SEQ ID NO: 277375 - protein, 400 aa, Artificial Sequence
  derived and/or modified sequence
MKNEPLTPGYHGFPARDSQGNQEPTTTPDAMVQPFTTIPFPPPPQNGIPTEYGVPHTQDYAGQTGEHNLTLYGSTQAHGEQSSNSPSTQNGSLTTEGGAQTDGQQSQTQSSENSESKSTPKRLHVSNIPFRFRDPDLRQMFGQFGKILDVEIIFNERGSKGFGFVTFENSADADRAREKLHGTVVEGRKIEVNNATARVMTNKKMVTPYANGWKLSPVVGAVYGPELYAASSFQADVSLGNDAAVPLSGRGGINTYIPLIIPGFPYPTAATTAAAFRGAHLRGRGRTVYGAVRAVPPTAIPAYPGVVYQDGFYGADLYIESANCFRSNRVDMQPTDMHSLLLQPQPPLLQPLQPLTVTVMAGCTQPTPTMPLPLPLAMELALWRVYTEVATADLPPTEVT

SEQ ID NO: 277376 - protein, 370 aa, Artificial Sequence
  derived and/or modified sequence
MVQPFTTIPFPPPPQNGIPTEYGVPHTQDYAGQTGEHNLTLYGSTQAHGEQSSNSPSTQNGSLTTEGGAQTDGQQSQTQSSENSESKSTPKRLHVSNIPFRFRDPDLRQMFGQFGKILDVEIIFNERGSKGFGFVTFENSADADRAREKLHGTVVEGRKIEVNNATARVMTNKKMVTPYANGWKLSPVVGAVYGPELYAASSFQADVSLGNDAAVPLSGRGGINTYIPLIIPGFPYPTAATTAAAFRGAHLRGRGRTVYGAVRAVPPTAIPAYPGVVYQDGFYGADLYIESANCFRSNRVDMQPTDMHSLLLQPQPPLLQPLQPLTVTVMAGCTQPTPTMPLPLPLAMELALWRVYTEVATADLPPTEVT

SEQ ID NO: 277377 - DNA, 6661 bp, Artificial Sequence
  derived and/or modified sequence
atgaagaacgagcctctgactccaggttatcatggattcccagcgcgggacagccagggtaaccaggagccgacaacaactcctgacgcaatggttcagccttttactaccatcccatttccaccacctccgcagaatggaattcccacagagtatggggtgccacacactcaagactatgccggccagaccggtgagcataacctgacactctacggaagtacgcaagcccacggggagcagagcagcaactcacccagcacacaaaatggatctcttacgacagaaggtggagcacagacagacggccagcagtcacagacacaaagtagtgaaaattcagagagtaaatctaccccgaaacggctgcatgtctctaatattcctttccgcttccgggaccctgacctccggcagatgtttgggcagtttggcaaaatcctagatgtagaaataatctttaatgaacgtggctctaagggattcgggttcgtaactttcgagaatagtgctgatgcagacagggccagggagaaattacacggcaccgtggtagagggccgtaaaatcgaggtgaataatgctacagcacgtgtaatgaccaataagaagatggtcacaccatatgcaaatggttggaaattaagcccagtagttggagctgtatatggtccggagttatatgcagcatccagctttcaagcagatgtgtccctaggcaatgatgcagcagtgcccctatcaggaagagggggtatcaacacttacattcctttaatcattcctggcttcccttaccctactgcagccaccacggcagccgctttcagaggagcccatttgaggggcagagggcggacagtatatggtgcagtccgagcggtacctccaacagccatccccgcctatccaggtgtggtttaccaggacggattttacggtgctgacctctatatagaatctgcaaactgcttcagatcaaacagggtggatatgcagcctacagatatgcacagcctgctactgcaaccgcagccaccgctgctgcagccgctgcagccgcttacagtgacggttatggcagggtgtacacagccgacccctaccatgcccttgcccctgccgctagctatggagttggcgctgtggcgagtttataccgaggtggctacagccgatttgccccctactgaagtgacgtgagacccctgcaaatgggacagccccccagttcatgaggcctggctattgcaatatttactagtagaggaactctatagcaagatgaagaggaaaaacaaacaaacaaacaaaaaaaaacacaaaaaaagaaagaatacttttttatacctcactatgttctttgaatatgtatttttcctttaaatttctgcctttaattcttttgttccaaagattgtgcatttttttctttttttttttaaactgtggtaaaaaaaaaaaaaataatgcatttccatgtctgtatgtccgtgcttagcttattctatcaatcacggaagaggcagtcaaggaggaaggagagacattaggagccgataaatgcatctgatcagaaatcagcagacagaattaccaaagtgtatctggtgctgaatgactgggggacaagcagaagtggaagagatctttctgcaacaggatattcttctagtcttctgagtttctggtctttgacaggcaattctggttggctgtggctggaatccacatgctgatagataggaatttgtgcttacaaagcaggagaattaaaaagacgctttcctctcctcttccctcctgtcttctccgttctttttacaatcatcttacacgcacagcctgagacagctggcatagtttttggaattatagtattgatatttccaaacgtgctctcagacagtggataataaacacctcattaggaaaccgatctcagaatgaactctggagtatgaaaaagatcatttctttttgttcctgtaacctagcattccttctaggcttcttctcctttaattgaaccacagcttagctcatgtattcttttattaacaccctgctctcatgtccataagattcaggaatttaggacccagggacagaaaagtgaataagccagtgaccagatttcccccagatgtcttgaggattagaagtacaaattgttgacagccattaaagagggtgaggaagggaaaaggaatattagaagatctggtatttcttacttttttcttgcctcagaaagtacaaagtttaaaaaatagaataaagaatctgctggggaaagatagagtaccaggtcctaggtcagtagtccctggaagttttggtgatgaggacatggaagggcaggcagaggcactttgtacttgctccaaagccataggaattttcatcttccagagcctttatgagtcacttctctatccacagtcttgagcctgtggctatcccgctgagcttctcactgtcctccaaaaacaccccgctgagcacccggaccactttgtacacattaacactacaggacataaaatgcagaggccctgagattgctgccctcccatattggaaggagggtctgcgatggcaagggtcttctatatcaccagaaagagtcgcgcagtgagtcactgccgttgccatctggctgtaattttctatgttatcaaggtaggagggagtgtttctcttctagctgttagatagaactgataaaagcaagtgtcctacagcatttcccaaatgaaggcattaggaaatagaaaagcacggtctttttggctccctggtctagtcacattggtactagggtgacctttcacccaagggacagctgctaaagggagtaattcagagacatggagcttctggttatgggtttgttttgggtttgtttttaactcctgcctccacacatgttcttgactgataactgactcatgtccctgaattaaaatgactgacctatgacagcatcaagcattctttgtaagcagagtgatatatctgagagggcgttgacctgttgtgtagaatacatatcctttcccccttcagaatcctgtctcgcctcgtaactgggagagaggctgtgcctgaaactaggggcgatgtcaaggaagctagaggcctcgatgcaattattactgactctggggaggaagacagagaataaggggacaccaactgcccagtccactggccatttttaagggtccccccaccccaagccaaagtttggtttgttgctgttaagacaatttttgttgtatgtatataaatattttagttagaggagcggggaatgggatgcgggctttcacagttctagggaatgggggcagggaggattttgcttttgcttttgctttgagggagaactttagctgactaaaaaaacagaagtttggggtcatgatcacaaaggggccattcccaaaagatggcaagccacgtattcagtggagactaggccaaattctaaatggttttatccatagcaggggagaataggagaatgagtttaagagtttttctcttcttttttcctagaaagaggtaaggataatgggaaaggtagagaaggcggctcccacagaccttttaagagaggcagaatcttgagcttgaggcaccttgagtgcatctcagttcagctggttctggctgaggcctccaaaggcaagctctgtgctttccagtggtttctgctgcatttccagggatggtgtttaacaccgcttcctccagctcccttttctaagaaagaataaatggagttctgctttttatgaaagggtctttggttttcagtgtcaacactgagaattggggctcttgcaagcatctggatttcacagtatcaacctccccgtcaccttttgaactttgagactccgtacggtcaacttcaccagaggcaggttgctcgaagcagcactgcttgtctgttcctgactctggttctcactgtattaaaaaagagagtcagaggagtctggcatttcgtgagtttgttagaggatgctggctgataattccagaaaacttactgatgctaaatcacagtacatgcatgattctttttcagctttactatagttcatgacctggactttctgtactcttggaagctgggctccttaaaggaggcctctagtgaacacctttatctccatgtccctcttagagcccagagagctgcccataggcattttccagaattcctcatgtcacctagttcaatttccattaactcagatcagccattgtgattcaccatttgtcaggctctcaggtttaacaaaacctactatcaccatcatccttcaacagccacagtctgaattgagccaacatttttttttctttgagaaagaagtggactggggcacaacttttagtctgaggggagctagtggaaatctagacaatagaagtcatcgatagcagcttttcctcaaatgtgtgactcctcaggggctaaactgctcttagcttagaattatgctttactagagatctagcagataagtgggttaatcactaccatcctgtaactagttatatagcttccagacatgagggagacatcaaacagggatggaagcaaccccaaggatatgcaagaagggcatgatgaacccccttccctctggcaggagaacaaggccaaccaagggacagactggaaagcacttagatgtttaaggaggagaaaggggaagctttgaccagtccttgccttttgccaagttcagccagttctccgctgcttgcaacctctagcgcagtaacatttgcagaattgcagattttcccccagatactaggaggaaagggactttggggggtggggaaggggtcgtggtgttttaaaagcataagttacctgtttgcactgttttaagataggaaaaaaaaatagtgggcaaggtgaacatcagacgtaaatttgtgtgtttttattttgtcatgctcttgaaaatgtttgaccatttgtagtatacacagtgaaacttgattctctgttgcataaaacactatatttttttggaaatgttactgtccaaaagcctcttccctccctttccttttcctatgtacttccttcatacttgctttactgatcagccaggcaatagccatccaagagctagagcatgaaacagggccctttccaagtaggctctgggtgtcctaagccagcgtgtgccctctggtttagtgagtgtaatagagtccctggcacctttctttgcaaatgaggctaacagaccagactgcagcaagttatcagattcctcaatcagatgcactaggagtgaggagcccagggatggagggggttcctgaagtattgcagttggctgtagtagctgagttcttttccatgttaccgaaactgtagccagttacagtttactcaggaaaacggtagatcaattcagccatggtagtgctggttggcagggattggtaacggagagaactgctcatcagccaaaactcaagccttgccttttaggaggccaccagcagagggacttggtcctccttgtctggtacttgtgtacatgccggtgacctgaggactccactcacactggcgagcaaaaagggagcagtgattctcttttctctccccaccccctgccctttgttaccaacaccagtttcccagggggtacatgagtttctgaatttttaaaaaatgtttttggtttggtttttctggggactgataagtgctttaagcaatgtccataccccgtcaagactcccagcttagtcattttcttgtatttttctgttcacagtatttgtgtgtgtgcttgttttggcagctcattttggctgtattatatattgagtgatgaattgatcctcttttttccctaagggatatgaattgtttttcttgtgttatattctgcttgtgaatagctggagcaaacctggggctgacacgcgtaagctagggctgcaaagcgagaagagagccggtggagtgtacttgtccctgacaggctgacctacctgagtctctgagcttttcagtccaaatctttgcaaggctcaaaatgccacagaacctctcctcttctccccactccccatggcagggaccggaccatccctacatgcaacatgctgttcctccagcccctcccattgccatggcaaaacaggtacctttggggcatgggggcattacatgggatgcttgtgtaatcgaccacctagccttctctctcccctcccgtcctcccccagaatcacttcctaggacacccgagctgcttgcccagggtcctgtttccctgctaactccagagaagcatcccagggctttgtgacagtctctaattcccttcccttctcgttaagaatcatattgtatagtagctttcagaccatacagtattcattgggttactcctattattatcaagtagctggaattgtgaaggtcggagtagttagatctttagcttttattccttatttttttgtattactctccatgtgtataaattattgatcatgttgctggcttttataaactctaagcgaaggaggagcactgcctcagcctttgcacatggtaatgaagcactgtttttaaataaaagagagaaacacc

SEQ ID NO: 277378 - DNA, 1409 bp, Artificial Sequence
  derived and/or modified sequence
aacgagcctctgactccaggttatcatggattcccagcgcgggacagccagggtaaccaggagccgacaacaactcctgacgcaatggttcagccttttactaccatcccatttccaccacctccgcagaatggaattcccacagagtatggggtgccacacactcaagactatgccggccagaccggtgagcataacctgacactctacggaagtacgcaagcccacggggagcagagcagcaactcacccagcacacaaaatggatctcttacgacagaaggtggagcacagacagacggccagcagtcacagacacaaagtagtgaaaattcagagagtaaatctaccccgaaacggctgcatgtctctaatattcctttccgcttccgggaccctgacctccggcagatgtttgggcagtttggcaaaatcctagatgtagaaataatctttaatgaacgtggctctaagggattcgggttcgtaactttcgagaatagtgctgatgcagacagggccagggagaaattacacggcaccgtggtagagggccgtaaaatcgaggtgaataatgctacagcacgtgtaatgaccaataagaagatggtcacaccatatgcaaatggttggaaattaagcccagtagttggagctgtatatggtccggagttatatgcagcatccagctttcaagcagatgtgtccctaggcaatgatgcagcagtgcccctatcaggaagagggggtatcaacacttacattcctttaatcattcctggcttcccttaccctactgcagccaccacggcagccgctttcagaggagcccatttgaggggcagagggcggacagtatatggtgcagtccgagcggtacctccaacagccatccccgcctatccaggtgtggtttaccaggacggattttacggtgctgacctctatatagaatctgcaaactgcttcagatcaaacagggtggatatgcagcctacagatatgcacagcctgctactgcaaccgcagccaccgctgctgcagccgctgcagccgcttacagtgacggttatggcagggtgtacacagccgacccctaccatgcccttgcccctgccgctagctatggagttggcgctgtggcgagtttataccgaggtggctacagccgatttgccccctactgaagtgacgtgagacccctgcaaatgggacagccccccagttcatgaggcctggctattgcaatatttactagtagaggaactctatagcaagatgaagaggaaaaacaaacaaacaaacaaaaaaaaacacaaaaaaagaaagaatacttttttatacctcactatgttctttgaatatgtatttttcctttaaatttctgcctttaattcttttgttccaaa

SEQ ID NO: 277379 - DNA, 1203 bp, Artificial Sequence
  derived and/or modified sequence
atgaagaacgagcccctgacccccggctaccacggcttccccgccagagacagccagggcaaccaggagcccaccaccacccccgacgccatggtgcagcccttcaccaccatccccttccccccccccccccagaacggcatccccaccgagtacggcgtgccccacacccaggactacgccggccagaccggcgagcacaacctgaccctgtacggcagcacccaggcccacggcgagcagagcagcaacagccccagcacccagaacggcagcctgaccaccgagggcggcgcccagaccgacggccagcagagccagacccagagcagcgagaacagcgagagcaagagcacccccaagagactgcacgtgagcaacatccccttcagattcagagaccccgacctgagacagatgttcggccagttcggcaagatcctggacgtggagatcatcttcaacgagagaggcagcaagggcttcggcttcgtgaccttcgagaacagcgccgacgccgacagagccagagagaagctgcacggcaccgtggtggagggcagaaagatcgaggtgaacaacgccaccgccagagtgatgaccaacaagaagatggtgaccccctacgccaacggctggaagctgagccccgtggtgggcgccgtgtacggccccgagctgtacgccgccagcagcttccaggccgacgtgagcctgggcaacgacgccgccgtgcccctgagcggcagaggcggcatcaacacctacatccccctgatcatccccggcttcccctaccccaccgccgccaccaccgccgccgccttcagaggcgcccacctgagaggcagaggcagaaccgtgtacggcgccgtgagagccgtgccccccaccgccatccccgcctaccccggcgtggtgtaccaggacggcttctacggcgccgacctgtacatcgagagcgccaactgcttcagaagcaacagagtggacatgcagcccaccgacatgcacagcctgctgctgcagccccagccccccctgctgcagcccctgcagcccctgaccgtgaccgtgatggccggctgcacccagcccacccccaccatgcccctgcccctgcccctggccatggagctggccctgtggagagtgtacaccgaggtggccaccgccgacctgccccccaccgaggtgacctag

SEQ ID NO: 277380 - DNA, 1113 bp, Artificial Sequence
  derived and/or modified sequence
atggtgcagcccttcaccaccatccccttccccccccccccccagaacggcatccccaccgagtacggcgtgccccacacccaggactacgccggccagaccggcgagcacaacctgaccctgtacggcagcacccaggcccacggcgagcagagcagcaacagccccagcacccagaacggcagcctgaccaccgagggcggcgcccagaccgacggccagcagagccagacccagagcagcgagaacagcgagagcaagagcacccccaagagactgcacgtgagcaacatccccttcagattcagagaccccgacctgagacagatgttcggccagttcggcaagatcctggacgtggagatcatcttcaacgagagaggcagcaagggcttcggcttcgtgaccttcgagaacagcgccgacgccgacagagccagagagaagctgcacggcaccgtggtggagggcagaaagatcgaggtgaacaacgccaccgccagagtgatgaccaacaagaagatggtgaccccctacgccaacggctggaagctgagccccgtggtgggcgccgtgtacggccccgagctgtacgccgccagcagcttccaggccgacgtgagcctgggcaacgacgccgccgtgcccctgagcggcagaggcggcatcaacacctacatccccctgatcatccccggcttcccctaccccaccgccgccaccaccgccgccgccttcagaggcgcccacctgagaggcagaggcagaaccgtgtacggcgccgtgagagccgtgccccccaccgccatccccgcctaccccggcgtggtgtaccaggacggcttctacggcgccgacctgtacatcgagagcgccaactgcttcagaagcaacagagtggacatgcagcccaccgacatgcacagcctgctgctgcagccccagccccccctgctgcagcccctgcagcccctgaccgtgaccgtgatggccggctgcacccagcccacccccaccatgcccctgcccctgcccctggccatggagctggccctgtggagagtgtacaccgaggtggccaccgccgacctgccccccaccgaggtgacctag

SEQ ID NO: 277381 - DNA, 1203 bp, Artificial Sequence
  derived and/or modified sequence
atgaaaaacgagccactaacacccggctaccatgggtttcctgcacgggattctcagggcaaccaggaacctaccaccacccctgatgccatggttcaaccttttactaccatcccttttccccctcccccacagaatggtatccctaccgaatatggtgtcccacacacacaggactatgcgggacagactggcgaacacaacctgacgttatacggctcaacccaggctcacggcgagcaaagttctaactccccaagtacacagaatggatcgttaacgacagagggcggcgcacaaacagatgggcagcaaagtcaaacacagtccagcgagaactcggaatctaagtccactcctaagaggctgcacgtcagcaacatcccctttcgctttcgagacccagacctccgccaaatgttcgggcagtttgggaagattctggacgttgaaatcatcttcaatgaaaggggtagtaagggctttggattcgtcacttttgagaacagtgccgacgctgatcgcgcgcgggaaaagctgcacggcacggtcgtcgaaggccgcaagattgaagtgaataacgctactgcacgcgtcatgacaaataaaaagatggttaccccctatgcaaacggatggaagctgtcaccggtggttggtgccgtgtatggacctgagctgtacgcagcttccagctttcaggctgacgtgagcctggggaacgatgccgccgttcctctgtccgggcgtggtggcattaatacctacatcccccttatcattccaggctttccctatccaacggctgccaccaccgccgccgcgtttcgaggagcacatttgcgcggccgcgggcggaccgtctacggcgcagtgagggcagtacctcctacagccatacctgcttatccaggcgtggtgtatcaggatggattctacggcgccgacctctatatagaaagcgctaattgtttccgttcaaacagggtggacatgcaacctacagatatgcactctctgctgctccagccccagcccccacttttacaacccctgcaacctctgaccgtgacagtaatggctggatgcacacagcctaccccaacaatgccgctccctctgcccctggctatggagctggcactgtggcgggtttacactgaagttgccactgctgatctgccaccgaccgaggtgacctag

SEQ ID NO: 277382 - DNA, 1113 bp, Artificial Sequence
  derived and/or modified sequence
atggttcaaccatttacaaccatccctttccctccacctccgcagaatggcattcctaccgagtacggagtcccccatacgcaggattatgctggccagactggcgagcataatctgactctctatgggagcacccaggcacacggcgaacaaagctccaattctccatcaacgcagaatggctccttaactactgagggcggcgcccagaccgacgggcagcagtcacagactcagtcatcggaaaactccgagtctaaaagtacgcccaaacgtctgcatgtttctaacatcccttttaggtttagagacccagatctccgtcagatgtttgggcagttcggtaaaatcctggatgtggagattatatttaacgagagagggagtaaagggtttggttttgttaccttcgagaattctgccgatgccgaccgggccagggagaagctgcacggtacggtggtggaggggcggaagatcgaggtgaacaatgccaccgcccgggtgatgactaacaagaagatggtgacaccttacgccaacggctggaaactgagccccgtcgtgggagccgtctacggaccagagctgtacgccgcatctagcttccaggcagatgtaagcctcggaaatgatgccgcagtgccactgtccgggcggggcggaattaacacttacattcccctcatcattcctggttttccatatcctaccgcagcgactacagccgcagcctttcggggcgcccacctgcgaggacgcgggcgcactgtgtacggggccgtgcgggccgtgcccccaaccgctattccggcctaccccggcgttgtctatcaggatggattttatggcgccgacctgtacatcgaaagtgctaattgtttcaggagcaaccgggtggatatgcagccaactgacatgcactctttgctgctgcagcctcagccgccattactgcagcctctgcagccgctcactgtgacagtcatggctggctgtacccagcccacccctacgatgcctttgccacttcccctcgccatggagttagccctttggagggtgtacacggaagtagcaaccgccgatctaccacctaccgaagtgacatag

SEQ ID NO: 277383 - DNA, 1203 bp, Artificial Sequence
  derived and/or modified sequence
atgaagaatgagcccctgaccccaggctaccacggcttccctgcccgggacagccagggcaaccaggagcccaccaccaccccagatgccatggtgcagcccttcaccaccatccccttccccccaccaccccagaatggcatccccacagaatatggagtgccccacacccaggactatgccggccagacaggagagcacaacctgaccctgtatggcagcacccaggcccacggggagcagagcagcaacagccccagcacccagaatggcagcctgaccacagaaggaggagcccagacagatggccagcagagccagacccagagcagcgagaacagcgagagcaagagcacccccaagaggctgcacgtgagcaacatccccttccgcttccgggaccctgacctgcggcagatgtttggccagtttgggaagatcctggatgtggagatcatcttcaatgaaagaggcagcaagggcttcggctttgtgacctttgagaacagcgcagatgctgaccgggcccgggagaagctgcatggaacagtggtggagggcaggaagattgaggtgaacaatgccacagcccgggtgatgaccaacaagaagatggtgaccccctatgccaacggctggaagctgagccctgtggtgggcgctgtgtatggccctgagctgtatgctgccagcagcttccaggctgatgtgtccctgggcaatgatgctgctgtgcccctgagcggccggggcggcatcaacacctacatccccctcatcatccctggcttcccctaccccacagctgccaccacagctgctgccttccggggggcccacctgcggggccggggccgcacagtgtatggagctgtgcgggctgtgcccccaacagccatcccagcctacccaggagtggtgtaccaggacggcttctatggagctgacctgtacattgaaagtgccaactgcttccgcagcaacagagtggacatgcagcccacagacatgcacagcctgctgctgcagccccagccccccctgctgcagcccctgcagcccctgactgtgacagtgatggccggctgcacccagcccacccccaccatgcccctgcccctgcccctggccatggagctggccctgtggagggtgtacacagaggtggccacagctgacctgcccccaacagaggtgacctag

SEQ ID NO: 277384 - DNA, 1113 bp, Artificial Sequence
  derived and/or modified sequence
atggtgcagcccttcaccaccatccccttccccccaccaccccagaatggcatccccacagaatatggagtgccccacacccaggactatgccggccagacaggagagcacaacctgaccctgtatggcagcacccaggcccacggggagcagagcagcaacagccccagcacccagaatggcagcctgaccacagaaggaggagcccagacagatggccagcagagccagacccagagcagcgagaacagcgagagcaagagcacccccaagaggctgcacgtgagcaacatccccttccgcttccgggaccctgacctgcggcagatgtttggccagtttgggaagatcctggatgtggagatcatcttcaatgaaagaggcagcaagggcttcggctttgtgacctttgagaacagcgcagatgctgaccgggcccgggagaagctgcatggaacagtggtggagggcaggaagattgaggtgaacaatgccacagcccgggtgatgaccaacaagaagatggtgaccccctatgccaacggctggaagctgagccctgtggtgggcgctgtgtatggccctgagctgtatgctgccagcagcttccaggctgatgtgtccctgggcaatgatgctgctgtgcccctgagcggccggggcggcatcaacacctacatccccctcatcatccctggcttcccctaccccacagctgccaccacagctgctgccttccggggggcccacctgcggggccggggccgcacagtgtatggagctgtgcgggctgtgcccccaacagccatcccagcctacccaggagtggtgtaccaggacggcttctatggagctgacctgtacattgaaagtgccaactgcttccgcagcaacagagtggacatgcagcccacagacatgcacagcctgctgctgcagccccagccccccctgctgcagcccctgcagcccctgactgtgacagtgatggccggctgcacccagcccacccccaccatgcccctgcccctgcccctggccatggagctggccctgtggagggtgtacacagaggtggccacagctgacctgcccccaacagaggtgacctag

SEQ ID NO: 277385 - DNA, 1203 bp, Artificial Sequence
  derived and/or modified sequence
atgaagaacgagcccctgacccccggctaccacggcttccccgccagagatagccagggtaatcaggaacccacgacaactccggatgctatggttcagccttttaccactatccctttcccgcctcccccacagaatgggatacccacagagtacggtgtgccccatacgcaagactatgccggacaaacgggggagcacaatctcacactctacggatccacacaggctcacggagaacagtctagcaatagcccaagcactcagaacggcagtctgacaaccgaaggtggcgcccagaccgacggccagcaatcacagacacaaagttcagagaattccgagagcaagagtactcctaagaggcttcacgtgtccaacattccattcagattcagagatcccgacctgcgacagatgtttgggcagttcggaaagatcttggatgttgagatcatctttaatgagagaggctctaaaggcttcggattcgttaccttcgagaattccgcagatgccgaccgggctagggaaaaactccacgggaccgttgtcgaaggacgaaagattgaggtgaataacgcaacagcaagggtgatgacgaacaaaaaaatggtgactccctatgccaacggatggaaactgtctccggtagtgggtgctgtctatggacctgaactgtatgccgcatcttcattccaggccgacgtgtcactgggtaacgacgcggcggtgcccctctctggaaggggaggtattaacacttatattcccctcattatcccaggcttcccatatcccacggccgctactaccgcagctgcctttcgaggggcccacttgcgtggtcgcgggaggacggtttacggggctgtgcgcgctgtcccacctaccgctatcccagcctaccctggcgtcgtataccaagacgggttctatggcgccgacctgtacatcgagtccgccaattgtttcagatcaaaccgcgtagacatgcagcccacggacatgcacagtctgctgcttcagccacagccccccctcctgcaaccgctgcagccactgacagtcactgtgatggcggggtgcactcaaccaacacctactatgcctctgccattgccactggctatggagttagccctctggcgtgtttataccgaagtggctactgccgatctgcccccaacagaggtaacatag

SEQ ID NO: 277386 - DNA, 1113 bp, Artificial Sequence
  derived and/or modified sequence
atggtgcagcccttcaccaccatccccttccccccccccccccagaacggaatccccactgaatacggggtccctcacacccaagactatgccggtcaaactggcgagcacaaccttaccctttacggatctacgcaggcgcatggggaacagtcttctaactcaccttcaacacaaaacgggagcctaacaacagagggcggcgcacagaccgacggtcagcagtcccagacccaatcgagcgagaatagcgagtctaagagcacacctaaaaggttgcatgtgtctaatattccattccggtttcgggatccagatctgcgtcagatgttcggacagttcggtaagattttggacgtcgaaatcatatttaatgaaaggggaagcaaaggatttggcttcgtcacattcgaaaactctgcagacgctgatcgagctcgcgagaaattgcacggaacagtcgtggaaggtcgtaagatagaagtcaacaacgccactgcccgtgtaatgactaataagaagatggtgaccccatacgccaatgggtggaagctgagcccagttgtgggtgcagtgtatggacctgaactgtatgctgccagctctttccaagccgacgtctcccttggaaacgatgccgccgtccctctctctgggcgtggtggcatcaacacatacatcccgttgataatccctggcttcccttacccgaccgctgccaccactgcagcagcctttcgcggggctcacctcaggggaaggggcagaactgtgtatggagctgtgagagcagtcccaccaaccgctatacccgcctaccctggcgtggtctatcaagacggtttctatggggcggacctgtatatcgaaagtgcgaactgtttccgctcaaatagagtcgacatgcagccaacagatatgcactctctcctgttgcagccccaacccccactgctgcagcctctccagccattgaccgtgacggtcatggctggctgtacgcagcctactcctacaatgccccttcccctgccactggcgatggagttggccctgtggcgcgtttatacagaagtcgccactgccgaccttcctccaaccgaagttacatag

SEQ ID NO: 277387 - DNA, 1203 bp, Artificial Sequence
  derived and/or modified sequence
atgaagaacgagccgctcactcctggttatcatggatttccggctagagattcacagggaaaccaggagccaactacaactcctgatgccatggtacagcctttcaccactatcccctttccaccccctccccagaatggcattcccacagagtacggggttccacacacccaagactacgccggacaaaccggtgaacacaacctcaccctttacggaagtacccaggcccacggtgagcaaagctcaaatagccctagtacgcaaaatggttctcttactactgaagggggtgcccaaaccgatggccaacaatctcaaacacagtcctctgaaaatagcgagagtaagtccacacccaaacgtttgcatgtgtccaacattccgtttcggttcagagaccctgatctgagacaaatgttcggccaattcggtaagattctagacgttgaaatcatattcaacgagagaggtagtaaggggtttggctttgtcactttcgagaattccgccgatgctgaccgggctagagagaaactgcatggcaccgtcgtggaaggtagaaagatcgaggtcaacaacgctactgctagagtcatgaccaacaaaaagatggttactccatacgctaacggatggaaactgtcccccgtggtgggcgctgtatatggccctgagttgtatgcagcaagttctttccaggcggacgtctcactgggcaacgacgctgcggtgcctctctctggcagggggggaattaatacctatattcccctcatcattcctgggtttccataccccacagccgcaaccactgcagccgcttttcggggtgcccacctgagaggcagaggccgtacggtctacggggctgtgagggctgtaccacctaccgccattccagcctacccaggcgttgtgtaccaggacggcttttatggggctgacttgtatatcgagagtgctaattgctttcggagcaacagagttgatatgcagccaactgacatgcattctctactgttgcaaccgcagcctcctctcctccagcccctgcagcccctgacagtgaccgtgatggcagggtgcacccaacctacacctaccatgcccctgccactgccgcttgcaatggagctagcactgtggcgggtttacaccgaggttgcaacagctgatctccctcccactgaggtgacgtag

SEQ ID NO: 277388 - DNA, 1113 bp, Artificial Sequence
  derived and/or modified sequence
atggtgcagcccttcacaacaattccctttccaccacctccacagaacggaatcccgaccgaatatggggtgccgcatactcaggattacgccggtcagactggagagcataatcttactctctacgggagcacgcaagctcacggcgaacagtcgtccaactcaccatctactcagaatggtagtctcacgaccgaagggggagcccagaccgatggccagcagtcacagacacaatcttctgagaattctgagagcaagagcaccccaaagaggctccacgtctctaacattccttttcgattccgcgacccagacctgaggcaaatgttcggccaatttggcaagatccttgacgtcgagatcatcttcaatgaacgtgggtccaaaggcttcggctttgtcactttcgagaattcagcagacgccgacagggctagggagaagctgcatgggacagtcgtggaggggagaaaaatagaggtcaacaatgccacagcccgagtgatgaccaacaaaaaaatggtgaccccttacgcgaatgggtggaaattgtcccctgtcgtgggagcggtctatggccctgagctttacgccgcatcttcttttcaggccgatgtaagcttgggtaacgatgccgctgttcctcttagcgggagagggggaattaacacatatataccactgattatccctggctttccctatccaactgctgcgacaacggcagctgcattcagaggcgcacacctgcgaggacgaggcagaactgtgtatggagccgtccgggcagttccgccaacggccatccccgcatatccaggcgtggtttatcaagacggcttttacggcgcagatctctacatagaaagcgctaattgcttcagatctaatagggttgatatgcagccaacagatatgcattccctgcttctgcagccacagccaccacttctgcagccactgcagccactcaccgtgacagttatggcgggatgcacacaaccgacaccaacaatgcccttgcccttgcccctggccatggagctggctttgtggagagtctatacagaggtagctaccgccgacttgccacccaccgaggtgacttag

SEQ ID NO: 277389 - protein, 357 aa, Artificial Sequence
  derived and/or modified sequence
MVQPFTTIPFPPPPQNGIPTEYGVPHTQDYAGQTGEHNLTLYGSTQAHGEQSSNSPSTQNGSLTQTEGGAQTDGQQSQTQSSENSESKSTPKRLHVSNIPFRFRDPDLRQMFGQFGKILDVEIIFNERGSKGFGFVTFENSADADRAREKLHGTVVEGRKIEVNNATARVMTNKKMVTPYANGWKLSPVVGAVYGPELYAASSFQADVSLGNDAAVPLSGRGGINTYIPLIIPGFPYPTAATTAAAFRGAHLRGRGRTVYGAVRAVPPTAIPAYPGVVYQDGFYGADLYGGYAAYRYAQPATATAATAAAAAAAAYSDGYGRVYTADPYHALAPAASYGVGAVASLYRGGYSRFAPY

SEQ ID NO: 277390 - DNA, 1354 bp, Artificial Sequence
  derived and/or modified sequence
ggtaaccaggagccgacaacaactcctgacgcaatggttcagccttttactaccatcccatttccaccacctccgcagaatggaattcccacagagtatggggtgccacacactcaagactatgccggccagaccggtgagcataacctgacactctacggaagtacgcaagcccacggggagcagagcagcaactcacccagcacacaaaatggatctcttacgcagacagaaggtggagcacagacagacggccagcagtcacagacacaaagtagtgaaaattcagagagtaaatctaccccgaaacggctgcatgtctctaatattcctttccgcttccgggaccctgacctccggcagatgtttgggcagtttggcaaaatcctagatgtagaaataatctttaatgaacgtggctctaagggattcgggttcgtaactttcgagaatagtgctgatgcagacagggccagggagaaattacacggcaccgtggtagagggccgtaaaatcgaggtgaataatgctacagcacgtgtaatgaccaataagaagatggtcacaccatatgcaaatggttggaaattaagcccagtagttggagctgtatatggtccggagttatatgcagcatccagctttcaagcagatgtgtccctaggcaatgatgcagcagtgcccctatcaggaagagggggtatcaacacttacattcctttaatcattcctggcttcccttaccctactgcagccaccacggcagccgctttcagaggagcccatttgaggggcagagggcggacagtatatggtgcagtccgagcggtacctccaacagccatccccgcctatccaggtgtggtttaccaggacggattttacggtgctgacctctatggtggatatgcagcctacagatatgcacagcctgctactgcaaccgcagccaccgctgctgcagccgctgcagccgcttacagtgacggttatggcagggtgtacacagccgacccctaccatgcccttgcccctgccgctagctatggagttggcgctgtggcgagtttataccgaggtggctacagccgatttgccccctactgaagtgacgtgagacccctgcaaatgggacagccccccagttcatgaggcctggctattgcaatatttactagtagaggaactctatagcaagatgaagaggaaaaacaaacaaacaaacaaaaaaaaacacaaaaaaagaaagaatacttttttatacctcactatgttctttgaatatgtatttttcctttaaatttctgcctttaattcttttgttccaaagattgtgcatttttttctttttttt

SEQ ID NO: 277391 - DNA, 1074 bp, Artificial Sequence
  derived and/or modified sequence
atggtgcagcccttcaccaccatccccttccccccccccccccagaacggcatccccaccgagtacggcgtgccccacacccaggactacgccggccagaccggcgagcacaacctgaccctgtacggcagcacccaggcccacggcgagcagagcagcaacagccccagcacccagaacggcagcctgacccagaccgagggcggcgcccagaccgacggccagcagagccagacccagagcagcgagaacagcgagagcaagagcacccccaagagactgcacgtgagcaacatccccttcagattcagagaccccgacctgagacagatgttcggccagttcggcaagatcctggacgtggagatcatcttcaacgagagaggcagcaagggcttcggcttcgtgaccttcgagaacagcgccgacgccgacagagccagagagaagctgcacggcaccgtggtggagggcagaaagatcgaggtgaacaacgccaccgccagagtgatgaccaacaagaagatggtgaccccctacgccaacggctggaagctgagccccgtggtgggcgccgtgtacggccccgagctgtacgccgccagcagcttccaggccgacgtgagcctgggcaacgacgccgccgtgcccctgagcggcagaggcggcatcaacacctacatccccctgatcatccccggcttcccctaccccaccgccgccaccaccgccgccgccttcagaggcgcccacctgagaggcagaggcagaaccgtgtacggcgccgtgagagccgtgccccccaccgccatccccgcctaccccggcgtggtgtaccaggacggcttctacggcgccgacctgtacggcggctacgccgcctacagatacgcccagcccgccaccgccaccgccgccaccgccgccgccgccgccgccgccgcctacagcgacggctacggcagagtgtacaccgccgacccctaccacgccctggcccccgccgccagctacggcgtgggcgccgtggccagcctgtacagaggcggctacagcagattcgccccctactag

SEQ ID NO: 277392 - DNA, 1074 bp, Artificial Sequence
  derived and/or modified sequence
atggtccagcctttcacaaccattccttttcctccccctcctcagaacggtattcctacggagtacggggttccccacactcaggactacgccgggcagacaggtgagcataatctcactctctacgggagtacccaagcccatggcgagcagtctagtaactcgcccagcacacagaacggatcccttactcagaccgaaggaggggcgcagacggacggtcaacagtcccaaacccaatcatcggaaaacagcgagtctaagtctacacccaagagattacatgtgtcgaatattcctttcagatttagggatcccgatctaagacagatgtttgggcagttcggtaaaatcctggacgtggagatcattttcaatgagagaggctcgaaggggttcgggttcgttacctttgagaactctgcggacgcagatagagctagggagaagctccacggcaccgtggtggagggtaggaaaatcgaggttaataatgctactgctcgcgttatgacaaataaaaagatggtcactccttacgctaatgggtggaagctgtccccggtcgtgggtgccgtgtacggccctgaactgtacgcggcttcctccttccaggcggacgtttcactcgggaatgatgctgctgtccccctgtcagggcgcggggggattaacacttatataccacttatcattccagggttcccatatcccactgccgcaacaacagccgcagcctttcgaggagcccatctccgtgggcgcgggcggacagtgtatggcgccgtgagggccgtaccacctactgccattcctgcataccctggagtggtttaccaggatggattctatggggctgacctgtacgggggatatgccgcgtatcggtatgcacagcccgctacagcaactgctgccaccgctgccgcagctgcggctgcagcatattccgatgggtatgggagggtctacaccgccgatccctatcacgcccttgccccggctgcatcttacggagtgggcgccgtggctagtctgtaccggggaggctacagccgctttgccccttactag

SEQ ID NO: 277393 - DNA, 1074 bp, Artificial Sequence
  derived and/or modified sequence
atggtgcagcccttcaccaccatccccttccccccaccaccccagaatggcatccccacagaatatggagtgccccacacccaggactatgccggccagacaggagagcacaacctgaccctgtatggcagcacccaggcccacggggagcagagcagcaacagccccagcacccagaatggcagcctgacccagacagagggcggggcccagacagatggccagcagagccagacccagagcagtgaaaattctgagagcaagagcacccccaagaggctgcacgtgagcaacatccccttccgcttccgggaccctgacctgcggcagatgtttggccagtttgggaagatcctggatgtggagatcatcttcaatgaaagaggcagcaaaggatttggatttgtgacctttgaaaattctgcagatgctgaccgggcccgggagaagctgcacggcaccgtggtggagggcaggaagattgaggtgaacaatgccacagcccgggtgatgaccaacaagaagatggtgaccccctatgccaacggctggaagctgagccctgtggtgggcgctgtgtatggccctgagctgtatgctgccagcagcttccaggctgatgtgtccctgggcaatgatgctgctgtgcccctgagcggccggggcggcatcaacacctacatccccctcatcatccctggcttcccctaccccacagctgccaccacagctgctgccttccggggggcccacctgcggggccggggccgcacagtgtatggagctgtgcgggctgtgcccccaacagccatcccagcctacccaggagtggtgtaccaggacggcttctacggggctgacctgtatggaggctatgctgcctaccgctatgcccagcctgccacagccacagctgccacagctgctgctgctgctgctgctgcctacagtgatggctacggccgggtgtacacagctgacccctaccacgccctggccccagctgccagctatggagtgggcgctgtggccagcctgtacagaggaggctacagcagatttgccccctactag

SEQ ID NO: 277394 - DNA, 1074 bp, Artificial Sequence
  derived and/or modified sequence
atggtgcagcccttcaccaccatccccttccccccccccccccagaacggaatacccaccgagtacggagttccgcacactcaggattacgccggacagaccggggagcacaatttaacactgtacggaagtacccaagcacacggagagcagagttccaacagtccctccacacagaacggctctctgacgcagactgagggtggtgctcagaccgacggacaacagtcccagacacagtcctccgaaaacagcgaatcgaagagtactcctaagcgcttacacgtgtcgaacattccttttcgatttagagatccggacctgaggcagatgtttgggcaattcggcaagatcttggatgtcgagatcatcttcaacgagagagggagcaaggggtttggtttcgtcacgttcgaaaattccgccgacgccgatagagcgcgggagaaactgcatggaacagtggtggagggtaggaaaatcgaggtgaataatgccaccgcaagggtcatgacaaataagaaaatggtgacaccatacgccaacgggtggaagttgagccctgtggtgggcgccgtgtacgggccggaactgtacgcagctagttccttccaggccgacgtctccttgggcaacgatgctgctgtccccctctccggcaggggcgggatcaacacatacatccctctcattatcccggggttcccctacccaacagcggctactactgccgccgcgttcagaggggcgcatttgagaggccgcggacggacggtctacggtgcagtgagggccgtacccccaacagcaattcccgcttacccaggcgtcgtctaccaggacggcttttacggcgccgatctatacgggggatacgcagcttatagatatgcccaacctgccaccgcgacggccgctaccgccgctgccgcagcagccgccgcttactctgatggctacgggagggtgtatacggccgatccttatcatgccctggcccctgcggcctcttatggcgtgggggcagtcgcttccctgtaccgtgggggatatagcagatttgccccctactag

SEQ ID NO: 277395 - DNA, 1074 bp, Artificial Sequence
  derived and/or modified sequence
atggtacagccgtttacaactattccctttcccccaccaccacaaaatggcattcccaccgaatatggggttccacacacgcaggattacgccggtcagaccggtgaacataacctgactctgtacggttctacgcaggcccacggtgaacagagtagcaactcaccgagtactcaaaacggctccttgacccagactgaagggggagcacagacagatggccaacaaagtcaaactcagtccagcgaaaatagcgaaagcaagagcaccccaaagcgcttgcacgtttcaaacatcccttttagatttcgtgaccctgatctccgacagatgtttggtcagttcgggaaaatactcgatgtggagatcatttttaacgagagaggctccaagggcttcggatttgttacgtttgaaaattcagccgatgctgaccgcgctagagagaagctccacggaacagtggtggagggtcgtaaaatcgaggtgaacaatgctactgcgagggtaatgaccaacaaaaagatggtaaccccctacgccaacggctggaagctctcccctgtcgtgggtgccgtgtacggccctgagctttacgctgcaagcagctttcaggccgatgtgtccctcggcaatgatgcagccgtgccactctcaggcagagggggaatcaacacatacatcccactgatcattccgggatttccttatccaaccgcagctactaccgccgcagcgtttaggggggcacacctgcgagggcgagggagaaccgtgtacggagccgttcgagccgtcccaccaacagctatcccagcctaccccggagtagtatatcaagacggattctatggggcagatctatacgggggttacgccgcttaccggtatgcgcagcccgcaacagcgaccgccgcaaccgcggcagctgctgccgcagcggcatactccgacggctatggtcgcgtgtatactgccgacccatatcacgccctcgcgccagcagcgagctacggcgtgggggctgttgcatctttataccggggaggttattcaaggttcgctccatattag

SEQ ID NO: 277396 - protein, 128 aa, Artificial Sequence
  derived and/or modified sequence
MVQPFTTIPFPPPPQNGIPTEYGVPHTQDYAGQTGEHNLTLYGSTQAHGEQSSNSPSTQNGSLTTEGGAQTDGQQSQTQSSENSESKSTPKRLHVSNIPFRFRDPDLRQMFGFGKILDVEIIFNERGS

SEQ ID NO: 277397 - DNA, 420 bp, Artificial Sequence
  derived and/or modified sequence
atgtattgcaccgacccaggagaagtggaccacagcacacgactaatcagcgacccagtactacttgttggaaccactatacagtacacttgtaacccaggcttcgtgcttgagggctccagccttctgacttgttactctagagagactggtactcccatctggaccagccgcctgccacactgtgtgtcagaggaatccctggcctgtgataatcccggtctgccagaaaacggttaccagatcttgtacaagcggctgtatttgcccggagagtcgttaactttcatgtgttacgagggcttcgagctaatgggcgaggtgaccattagatgcatactgggacagcccagccactggaatggacctctcccagtgtgcaaggatgtggcaaccatcccaacttcagcttgtctgtag

SEQ ID NO: 277398 - DNA, 420 bp, Artificial Sequence
  derived and/or modified sequence
atgtactgcacagaccccggggaggtggaccacagcaccaggctcatcagtgaccctgtgctgctggtgggcaccaccatccagtacacctgcaaccctggctttgtgctggagggcagcagcctgctgacctgctacagccgggagaccggcacccccatctggaccagccggctgccccactgtgtgtctgaggagagcctggcctgtgacaaccctggcctgcctgaaaatggctaccagatcctgtacaagaggctgtacctgcccggggagagcctgaccttcatgtgctatgagggctttgagctgatgggagaggtgaccatccgctgcatcctgggccagcccagccactggaatggccccctgcctgtgtgcaaggatgtggccaccatccccaccagcgcctgcctgtag

SEQ ID NO: 277399 - DNA, 420 bp, Artificial Sequence
  derived and/or modified sequence
atgtactgcaccgaccccggcgaggtggaccacagcacccggctgatctcagacccagtgctcctggtagggacaacgatccaatatacctgtaatcccggatttgtgcttgaaggttccagcctgcttacatgttacagccgggaaacgggcaccccgatttggacttcacgcctaccccactgtgtgtcagaggagtctctggcctgtgataaccctggcctcccagagaatggctatcagatcctttacaagcgactatacttacctggagaatccctcaccttcatgtgttatgaggggtttgaactgatgggcgaggtcacaatccgatgcatactcggccagccgtcccactggaacggaccattacctgtctgtaaagacgtcgccactatcccgacaagtgcctgcctctag

SEQ ID NO: 277400 - DNA, 420 bp, Artificial Sequence
  derived and/or modified sequence
atgtactgcaccgacccgggtgaggtagaccactccacacggctgatttctgatcccgtactgctcgtaggcactaccatccaatatacctgcaacccagggttcgtgttggagggttcatccctactgacatgctactcacgagaaacaggcacacccatttggacttcacggcttcctcactgtgtcagtgaggagtcgctggcttgcgacaatcctggtctgcctgagaacgggtatcagatcctttacaagaggctgtacctgcccggagagagcctaactttcatgtgttacgagggctttgaactgatgggagaggtgacgattaggtgtattctcgggcagcctagtcactggaacgggcctctgcccgtctgtaaggatgtagctactattcctactagcgcatgtctgtag

SEQ ID NO: 277401 - DNA, 983 bp, Artificial Sequence
  derived and/or modified sequence
aaagaggtatcaaggaatgactcctgctcggatttacccgagatccagaatggctggaaaaccacttctcacacggagttggtgcggggagccagaatcacctaccagtgtgaccccggctatgacatcgtggggagtgacaccctcacctgccagtgggacctcagctggagcagcgaccccccattttgtgagaaaattatgtactgcaccgaccccggagaggtggatcactcgacccgcttaatttcggatcctgtgctgctggtggggaccaccatccaatacacctgcaaccccggttttgtgcttgaagggagttctcttctgacctgctacagccgtgaaacagggactcccatctggacgtctcgcctgccccactgcgtttcggaggagtccctggcatgtgacaacccagggctgcctgaaaatggataccaaatcctgtacaagcgactctacctgccaggagagtccctcaccttcatgtgctacgaaggctttgagctcatgggtgaagtgaccatccgctgcatcctgggacagccatcccactggaacgggcccctgcccgtgtgtaaagatgtcgctactattccaacctccgcctgcctctgatgtactcccacccctacagccagatcaccgtggaaaccgagtttgacaaccccatttacgagacaggggaaaccagagagtatgaggtttctatctaaagagagctacacttgagaaggggacttgtgaactcaaccacaatctcctcgagacattcatccagagaccatgtggcacttgattgaaaccccagaatgtcgactgtcttttgtttagactctttatcaaaggtttactgttttcttccctgtatttattatatttaaaagtgaaataggtgtgggtttggatgtttcgcggcctcagccaaattcatgttacagcctcaattctgaaggcaggtggaagacttgcaaaatggc

SEQ ID NO: 277402 - DNA, 420 bp, Artificial Sequence
  derived and/or modified sequence
atgtactgcaccgaccccggcgaggtggaccacagcaccagactgatcagcgaccccgtgctgctggtgggcaccaccatccagtacacctgcaaccccggcttcgtgctggagggcagcagcctgctgacctgctacagcagagagaccggcacccccatctggaccagcagactgccccactgcgtgagcgaggagagcctggcctgcgacaaccccggcctgcccgagaacggctaccagatcctgtacaagagactgtacctgcccggcgagagcctgaccttcatgtgctacgagggcttcgagctgatgggcgaggtgaccatcagatgcatcctgggccagcccagccactggaacggccccctgcccgtgtgcaaggacgtggccaccatccccaccagcgcctgcctgtag

SEQ ID NO: 277403 - protein, 408 aa, Artificial Sequence
  derived and/or modified sequence
MATSVGHRCLGLLHGVAPWRSSLHPCEITALSQSLQPLRKLPFRAFRTDARKIHTAPARTMFLLRPLPILLVTGGGYAGYRQYEKYRERELEKLGLEIPPKLAGHWEVALYKSVPTRLLSRAWGRLNQVELPHWLRRPVYSLYIWTFGVNMKEAAVEDLHHYRNLSEFFRRKLKPQARPVCGLHSISPSDGRILNFGQVKNCEVEQVKGVTYSLESFLGPRMCTEDLPFPPAASCDSFKNQLVTREGNELYHCVIYLAPGDYHCFHSPTDWTVSHRRHFPGSLMSVNPGMARWIKELFCHNERVVLTGDWKHGFFSLTAVGATNVGSIRIYFDRDLHTNSPRHSKGSYNDFSFVTHTNREGVPMRKGEHLGEFNLGSTIVLIFEAPKDFNFQLKTGQKIRFGEALGSL

SEQ ID NO: 277404 - protein, 409 aa, Artificial Sequence
  derived and/or modified sequence
MATSVGHRCLGLLHGVAPWRSSLHPCEITALSQSLQPLRKLPFRAFRTDARKIHTAPARTMFLLRPLPILLVTGGGYAGYRQYEKYRERELEKLGLEIPPKLAGHWEVALYKSVPTRLLSRAWGRLNQVELPHWLRRPVYSLYIWTFGVNMKEAAVEDLHHYRNLSEFFRRKLKPQARPVCGLHSVISPSDGRILNFGQVKNCEVEQVKGVTYSLESFLGPRMCTEDLPFPPAASCDSFKNQLVTREGNELYHCVIYLAPGDYHCFHSPTDWTVSHRRHFPGSLMSVNPGMARWIKELFCHNERVVLTGDWKHGFFSLTAVGATNVGSIRIYFDRDLHTNSPRHSKGSYNDFSFVTHTNREGVPMRKGEHLGEFNLGSTIVLIFEAPKDFNFQLKTGQKIRFGEALGSL

SEQ ID NO: 277405 - DNA, 1227 bp, Artificial Sequence
  derived and/or modified sequence
atggccaccagcgtgggacaccgctgtttgggattacttcacggagtagcaccctggagatcttcccttcacccctgcgagataaccgcactgtcccagtctttgcagcctctgcgcaaattgccgttccgggcattcaggaccgatgcccgtaaaatacatacagcgcctgcacgcacgatgttcctccttcggccgttgcccatcctgctagtaaccggggggggctacgctggttacaggcaatatgaaaagtaccgggaacgggagcttgagaaattggggcttgagatcccccccaaattggccggacactgggaagtggccctgtacaagtcagttcccaccaggctcctgtctagggcatgggggagactcaaccaggttgaacttccgcactggctgaggcgccccgtgtacagtttgtacatctggacctttggcgttaatatgaaggaggcagcagtggaggacctacatcactaccgcaacctcagcgaattttttcgccgtaagctgaaaccccaagcccgtccggtttgtggtctgcatagtattagtccctcagatggccggatactgaactttggtcaggtgaaaaattgcgaggttgagcaggtgaagggtgttacctactcactcgagtcattcttgggtcctcggatgtgtactgaggatctaccttttcccccagctgccagctgcgacagcttcaagaaccaactcgtgactagggaggggaatgagctctaccattgcgtgatttacctggctcccggagattaccactgttttcattctccgaccgactggactgtctcccaccggcgacatttcccgggctcattgatgtctgtgaatcccggtatggcaagatggattaaggaactgttttgtcataatgagagagttgtacttactggcgattggaaacacggttttttcagcctaacggctgtcggggctaccaatgtcggatccatccggatctactttgaccgagatcttcacactaatagccctcggcactccaaggggtcctataacgacttcagtttcgtcacccatacaaacagggaaggcgtgcccatgcgtaaaggggagcatctgggcgagtttaacctcggatccaccatcgtcttaatctttgaagcccccaaagactttaattttcagctgaagacgggtcagaagattcgatttggagaggccctggggtcactttag

SEQ ID NO: 277406 - DNA, 1230 bp, Artificial Sequence
  derived and/or modified sequence
atggctacatctgttggtcaccgatgcttgggtctgcttcacggcgttgccccatggagatcatccttgcacccctgcgagattactgccctgagccagagtctgcagcccttacgcaagctgccctttcgcgcctttagaaccgacgcccgcaaaatccacacggccccagccaggactatgtttctgctcagaccactaccaattctgctggtgaccggcggagggtacgccggttacaggcagtacgagaaatatagggagcgggagctagaaaagcttggcttagaaattccacctaagctcgcaggccactgggaggtcgccctctacaaatccgtccctaccagattgttaagcagagcatggggacggcttaatcaggtcgaactcccgcattggcttcgccgcccggtttactccctttatatttggaccttcggggtgaatatgaaagaggctgctgtggaggacctgcatcactataggaatttgagcgagtttttcagaaggaagctcaagcctcaggcccggcctgtctgtggcctgcactccgtgattagcccttctgacgggagaatcttaaactttggacaagtgaagaactgtgaggtggagcaggtgaaaggagtgacttatagcctagagtcgtttttgggtccacgcatgtgtacggaggacctcccattcccaccagctgcctcatgcgactctttcaagaatcagctggtgacccgggaagggaacgagctgtatcactgtgttatctacctggcccccggcgactatcattgttttcacagccctacagactggactgtctcacaccggcgccatttcccgggctccctgatgtccgttaacccaggaatggctcggtggatcaaggaactgttttgtcacaacgagcgcgtggtgcttacaggggattggaagcatggcttctttagcctcacggcagtgggagcgactaacgtgggtagcatacgtatatatttcgaccgggatctacataccaactctcccaggcattccaaaggcagttataatgatttctccttcgtgacccacaccaatcgcgagggcgtgcctatgcggaagggggagcatctgggagaatttaatcttggctctacaatcgtgcttattttcgaggcccctaaggatttcaattttcagctgaagaccggacaaaaaatacgctttggcgaggcccttggctcactgtag

SEQ ID NO: 277407 - DNA, 1227 bp, Artificial Sequence
  derived and/or modified sequence
atggccacctctgtgggccaccgctgcctgggcctgctgcacggcgtggccccctggaggagcagcctgcacccctgtgagatcacagccctgagccagagcctgcagcccctgaggaagctgcccttccgggccttcagaacagatgccaggaagatccacacagccccagcccggaccatgttcctgctgcggcccctgcccatcctgctggtgactggaggcggctacgccggctaccggcagtatgagaagtaccgggagcgggagctggagaagctgggcctggagatcccccccaagctggccggccactgggaggtggccctgtacaagtctgtgcccacccggctgctgagccgggcctggggccgcctgaaccaggtggagctgccccactggctgcggcggcctgtgtacagcctgtacatctggacctttggagtgaacatgaaggaggccgctgtggaggacctgcaccactacagaaacctgtctgagttcttccggaggaagctgaagccccaggcccggcctgtgtgtggcctgcacagcatcagccccagtgatggccgcatcctgaactttggccaggtgaagaactgtgaggtggagcaggtgaagggcgtgacctacagcctggagagcttcctgggccccaggatgtgcacagaggacctgcccttccccccagctgccagctgtgacagcttcaagaaccagctggtgacccgggagggcaatgagctgtaccactgtgtgatctacctggcccctggggactaccactgcttccacagccccacagactggacagtgagccaccggcggcacttccctggcagcctgatgtctgtgaaccctggcatggcccgctggatcaaggagctgttctgccacaatgaaagagtggtgctgactggagactggaagcacggcttcttcagcctgacagctgtgggcgccaccaacgtgggcagcatccgcatctactttgaccgggacctgcacaccaacagccccaggcacagcaagggcagctacaatgacttctcctttgtgacccacaccaaccgggagggcgtgcccatgaggaagggggagcacctgggggagttcaacctgggcagcaccatcgtgctgatctttgaggcccccaaggacttcaacttccagctgaagacaggccagaagatccgctttggagaggccctgggcagcctgtag

SEQ ID NO: 277408 - DNA, 1230 bp, Artificial Sequence
  derived and/or modified sequence
atggccacctctgtgggccaccgctgcctgggcctgctgcacggcgtggccccctggaggagcagcctgcacccctgtgagatcacagccctgagccagagcctgcagcccctgaggaagctgcccttccgggccttcagaacagatgccaggaagatccacacagccccagcccggaccatgttcctgctgcggcccctgcccatcctgctggtgactggaggcggctacgccggctaccggcagtatgagaagtaccgggagcgggagctggagaagctgggcctggagatcccccccaagctggccggccactgggaggtggccctgtacaagtctgtgcccacccggctgctgagccgggcctggggccgcctgaaccaggtggagctgccccactggctgcggcggcctgtgtacagcctgtacatctggacctttggagtgaacatgaaggaggccgctgtggaggacctgcaccactacagaaacctgtctgagttcttccggaggaagctgaagccccaggcccggcctgtgtgtggcctgcacagcgtcatcagccccagtgatggccgcatcctgaactttggccaggtgaagaactgtgaggtggagcaggtgaagggcgtgacctacagcctggagagcttcctgggccccaggatgtgcacagaggacctgcccttccccccagctgccagctgtgacagcttcaagaaccagctggtgacccgggagggcaatgagctgtaccactgcgtcatctacctggcccctggggactaccactgcttccacagccccacagactggacagtgagccacagaagacacttccctggcagcctgatgtctgtgaaccctggcatggcccgctggatcaaggagctgttctgccacaatgaaagagtggtgctgaccggggactggaagcacggcttcttcagcctgacagctgtgggcgccaccaacgtgggcagcatccgcatctactttgaccgggacctgcacaccaacagccccaggcacagcaagggcagctacaatgacttctcctttgtgacccacaccaaccgggagggcgtgcccatgaggaaaggagagcacctgggggagttcaacctgggcagcaccatcgtgctgatctttgaggcccccaaggacttcaacttccagctgaagacaggccagaagatccgctttggagaggccctgggcagcctgtag

SEQ ID NO: 277409 - DNA, 1227 bp, Artificial Sequence
  derived and/or modified sequence
atggccaccagcgtgggccaccggtgcctgggcctgctgcacggcgtggccccatggaggtcgagtcttcacccctgcgagattactgcgctttctcagagtctacaaccccttcgcaagcttccttttagagcattccgcacagatgcccggaaaattcatactgctcccgccagaactatgttcctcctcagacccttgcccatcttactagtgacaggtgggggctacgccgggtaccggcagtacgagaagtacagagaacgggagctggaaaagctgggactggaaattcctcccaagttagccggacactgggaagtcgcactttataagagcgtgccaacaagattacttagtagggcctggggaaggctgaaccaggttgagctgcctcattggctgcgccgccccgtgtattctctgtacatttggacgttcggggttaatatgaaggaagcagctgtcgaggaccttcaccactatcggaacctcagtgaattttttcggcgcaaattgaaaccacaagctaggccagtgtgcggactgcactctatatctcccagcgatgggcgcatcctgaactttggccaggttaaaaattgtgaggtcgagcaggtgaaaggggtgacctattctttagaatcatttctgggacctcggatgtgtaccgaggacctgcccttcccccctgccgctagttgtgactctttcaagaaccagctggtgacacgggagggcaacgaattgtatcattgcgttatttacctcgcaccgggtgattaccactgttttcattcacctactgactggaccgtgagccatcgacggcattttccaggctctcttatgtctgttaaccctgggatggctcgttggatcaaagagctgttttgtcacaacgaaagggtggtgttgactggagattggaagcacgggtttttttctctcaccgccgttggggctaccaacgtggggagcataagaatctatttcgaccgagacctgcacaccaactcaccccgccatagcaagggtagctacaatgacttttctttcgtcacccacacgaaccgggaaggggtgccaatgcggaagggcgagcaccttggggaatttaatttagggagcacaatagtgctcatatttgaggcccccaaagactttaacttccagcttaagaccggtcagaagatccggttcggagaggccctaggcagtctgtag

SEQ ID NO: 277410 - DNA, 1230 bp, Artificial Sequence
  derived and/or modified sequence
atggccaccagcgtgggccaccggtgcctgggcctgctgcacggcgtagccccctggcgctcgagtctgcatccatgtgagatcactgcactttcacaatccctgcagcctctgcgtaaattgcccttccgcgcctttcgcaccgacgccaggaaaatccacaccgcccccgcacgaacaatgttcctgctcagacccctgcctattttgctggtgaccgggggcggatacgccggctaccgacagtatgaaaaatatcgcgaaagagagctggagaaacttggactggaaattcctcctaagctcgccggtcactgggaagtggcattatataaatcagtgcctacccgattgctgtcacgcgcttggggcagactcaatcaggtcgaactacctcattggctcaggagaccagtatatagcctgtacatttggacgtttggcgtcaacatgaaagaagctgctgtcgaggaccttcatcactatagaaatttgtctgagttctttaggcgaaaattgaagccccaggctagacccgtctgtggcctgcattccgtgattagtccgtctgacggacgcatccttaactttggacaggtcaagaattgtgaggtcgaacaagttaaaggcgttacctactccctggagagctttctgggcccccgcatgtgcacagaagatctgcctttcccccctgctgctagttgcgactccttcaagaaccagttggtaactagggagggtaacgaactctatcattgtgttatctacctggcacctggggattatcattgcttccactcacccacagattggacagtgtctcaccgtagacatttcccgggaagtctgatgagcgtaaatcccgggatggcgcgctggataaaagaattattctgtcataatgagagagtggttctaacaggagactggaagcatggcttttttagtctgactgctgttggcgcaaccaacgtcgggagtatccgaatttactttgatcgagatctgcataccaactcgccaaggcactctaagggtagttacaacgatttctcatttgtgacacataccaatagggagggcgtacctatgcgaaagggcgagcatctgggagagttcaatctcggctctacaatcgtgctcatatttgaagccccaaaggattttaacttccagctcaagactggccaaaagatccgattcggagaagccctcggatcactgtag

SEQ ID NO: 277411 - DNA, 1736 bp, Artificial Sequence
  derived and/or modified sequence
atggcgacgtccgtggggcaccgatgtctgggattactgcacggggtcgcgccgtggcggagcagcctccatccctgtgagatcactgccctgagccaatccctacagcccttacggaagctgccttttagagcctttcgcacagatgccagaaaaatccacactgcccctgcccgaaccatgttcctgctgcgtcccctgcccattctgttggtgacaggcggcgggtatgcagggtaccggcagtatgagaagtacagggagcgagagctggagaagctgggattggagattccacccaaacttgctggtcactgggaggtggctttgtacaagtcagtgccaacgcgcttgctgtcacgggcctggggtcgcctcaatcaggtggagctgccacactggctgcgcaggcccgtctacagcctgtacatctggacgtttggggtgaacatgaaagaggccgctgtggaggacctgcatcactaccgcaacctcagcgagttcttccggcgcaagctgaagccgcaggcccggcctgtctgtggcctgcacagcattagcccatcggatggaaggatcctcaactttgggcaggtgaagaactgtgaggtggagcaggtaaagggggtcacctactccctggagtcgttcctgggcccgcgtatgtgcacagaggacctgcccttcccaccagccgcgtcgtgtgactccttcaagaaccagctggtcacccgggaagggaatgagctctatcactgtgtcatctacctggcccctggggactaccactgcttccactcccccaccgactggactgtgtcccaccggcgccacttcccaggctccctgatgtcagtgaaccctggcatggctcgctggatcaaagagctcttctgccataacgagcgggtggtcctgacgggggactggaaacatggcttcttctcactgacagctgtgggggccaccaacgtgggctccattcgcatctactttgaccgggacctgcacacaaacagcccaaggcacagcaagggctcctacaatgacttcagcttcgtgacgcacaccaatagagagggcgtccccatgcgtaagggcgagcacctgggcgagttcaacctgggctccaccatcgtgctcatcttcgaggcccccaaggacttcaatttccagctgaaaacaggacagaaaatccgctttggggaagccctgggctcgctctagagtctctttcctgattatggctgctaagggatcttttccaaacagagtgagggtcttttcaagagggaggcccatgaggccatccaggtaagggcctgcctcagcgtggttgggagtctgaccaggtaggacttgaatgattcggctaccacctgttccagaggtgcagacaagaggtggcgagagcccccatcatgcccctcaacctatcccgttccttctgcctacaaataaaaagtgcaggctggaatgatctcagtcacatttggatctttttaaacactgtatagacggaagagcctgcattcctgaccgaaccttcagttggtctcggttgtcgttttttcttgctgctcctccccccatcacctgagctgttttctgttggccccttttgttttttggccttaacgctcctgctgcacagggtgaggtgcctccttggcacagactgtggatgcctctcccccagcagagccacacagccttcgtgacaactgctttccgtt

SEQ ID NO: 277412 - DNA, 1963 bp, Artificial Sequence
  derived and/or modified sequence
ctgcgaccaagcccaggtttagcgaaacctacagctccactagttcccctacctccgcaggtgccaagcgggttaggtggggagtagccacagggcggagcttagtcggctccgcccccaacccgcgcttttctcattggcccactgaactcgagactcgtgacgccttaagcgtgcgcccagcgtgtgaagggggcgtggcacgctgagaaggagcagacaagatggcgacgtccgtggggcaccgatgtctgggattactgcacggggtcgcgccgtggcggagcagcctccatccctgtgagatcactgccctgagccaatccctacagcccttacggaagctgccttttagagcctttcgcacagatgccagaaaaatccacactgcccctgcccgaaccatgttcctgctgcgtcccctgcccattctgttggtgacaggcggcgggtatgcagggtaccggcagtatgagaagtacagggagcgagagctggagaagctgggattggagattccacccaaacttgctggtcactgggaggtggctttgtacaagtcagtgccaacgcgcttgctgtcacgggcctggggtcgcctcaatcaggtggagctgccacactggctgcgcaggcccgtctacagcctgtacatctggacgtttggggtgaacatgaaagaggccgctgtggaggacctgcatcactaccgcaacctcagcgagttcttccggcgcaagctgaagccgcaggcccggcctgtctgtggcctgcacagcgtgattagcccatcggatggaaggatcctcaactttgggcaggtgaagaactgtgaggtggagcaggtaaagggggtcacctactccctggagtcgttcctgggcccgcgtatgtgcacagaggacctgcccttcccaccagccgcgtcgtgtgactccttcaagaaccagctggtcacccgggaagggaatgagctctatcactgtgtcatctacctggcccctggggactaccactgcttccactcccccaccgactggactgtgtcccaccggcgccacttcccaggctccctgatgtcagtgaaccctggcatggctcgctggatcaaagagctcttctgccataacgagcgggtggtcctgacgggggactggaaacatggcttcttctcactgacagctgtgggggccaccaacgtgggctccattcgcatctactttgaccgggacctgcacacaaacagcccaaggcacagcaagggctcctacaatgacttcagcttcgtgacgcacaccaatagagagggcgtccccatgcgtaagggcgagcacctgggcgagttcaacctgggctccaccatcgtgctcatcttcgaggcccccaaggacttcaatttccagctgaaaacaggacagaaaatccgctttggggaagccctgggctcgctctagagtctctttcctgattatggctgctaagggatcttttccaaacagagtgagggtcttttcaagagggaggcccatgaggccatccaggtaagggcctgcctcagcgtggttgggagtctgaccaggtaggacttgaatgattcggctaccacctgttccagaggtgcagacaagaggtggcgagagcccccatcatgcccctcaacctatcccgttccttctgcctacaaataaaaagtgcaggctggaatgatctcagtcacatttggatctttttaaacactgtatagacggaagagcctgcattcctgaccgaaccttcagttggtctcggttgtcgttttttcttgctgctcctccccccatcacctgagctgttttctgttggccccttttgttttttggccttaacgctcctgctgcacagggtgaggtgcctccttggcacagactgtggatgcctctcccccagcagagccacacagccttcgtgacaactgctttccgtt

SEQ ID NO: 277413 - DNA, 1227 bp, Artificial Sequence
  derived and/or modified sequence
atggctaccagcgtgggtcaccggtgtctggggctgctccacggcgtggccccatggcgcagctccctccatccatgtgagatcaccgcccttagccagtccctgcagccactccggaaactgcctttccgggcttttagaaccgacgctcgcaagatccataccgctcccgctcgcacaatgttcttactcagaccactgccaatccttctcgtgacgggaggcggttatgcgggttatcgccagtacgaaaagtatcgggaacgggagctggagaagttgggattggagatcccacccaaactggctggccactgggaagtcgctctgtataagtccgtccctactagactgttaagccgcgcttggggaagactgaatcaagtagaattgccccattggctgagacgcccagtgtactctctctacatttggaccttcggcgttaacatgaaagaggccgctgttgaggatttgcatcattatcgaaatctcagcgagttcttcaggcgtaaacttaagcctcaggcgagacccgtctgtggcctccattcaatctcaccctctgatgggagaattctgaattttggccaagtcaaaaactgcgaggtggaacaggtcaagggcgtgacttatagccttgagtcatttctagggcctcgaatgtgtacagaagacctccccttcccaccggctgctagctgcgattcctttaagaaccagctcgttacccgcgaagggaacgagctttatcattgcgtgatctatcttgcgccaggcgattatcattgcttccactctcccactgactggactgtttcccataggaggcactttcctggctccctgatgtctgttaaccctggtatggcgcgttggataaaagaactgttctgtcacaacgagcgtgtggttctgaccggggattggaagcacggtttcttttctctcacagcagtgggggctactaacgttgggtcaattaggatctatttcgaccgggatctgcatactaactcccctcggcattctaaaggttcttataacgacttctcctttgtaactcatacaaatcgggaaggagtccccatgaggaagggcgagcacctgggagaatttaacctcggctctaccattgtgctgattttcgaagctccaaaggacttcaactttcagctcaaaacgggccagaagatccgcttcggcgaagctctaggcagcctgtag

SEQ ID NO: 277414 - DNA, 1230 bp, Artificial Sequence
  derived and/or modified sequence
atggccacatccgtgggacaccgctgcctcggccttctgcatggcgtggctccgtggaggagctccttacatccatgcgaaattaccgccctttcacagtcactgcagccgctgaggaagctacctttcagagccttcaggacagacgcgaggaagatacacacagctcccgctcgtactatgttcctgcttcgaccattgccgattctcttggtaacaggtgggggttatgcagggtacaggcagtatgaaaagtaccgcgagagagagctggaaaagctgggcctggaaatcccccctaaactggccggacactgggaggtggcactgtataaatctgtaccgactcggttgctgagtcgggcttggggacgactcaatcaggtggaactcccacactggctgaggagaccagtctattcactgtatatatggacctttggggtcaatatgaaagaggctgcagtggaggacctgcatcattatagaaacctgtcagaattctttagaaggaagttgaaacctcaagcacgccctgtgtgtggattgcatagtgtgatctctccgtccgatggtcgaatccttaattttggacaggtgaaaaattgcgaggtggagcaagtcaaaggggtgacctactctcttgagagctttttaggccctcggatgtgtacagaggacttgccctttcctcccgcagcatcgtgcgactcttttaaaaaccaattagttacccgcgaagggaacgaactttaccactgcgtcatatacctggcacctggtgactatcactgtttccattctcctactgattggactgtcagccacaggaggcattttcctggctcacttatgtctgtgaatcccggaatggctcgctggattaaagagctgttctgtcacaatgagcgggtcgtccttacaggagattggaagcatggatttttcagcctgacagcggtgggagctacaaatgtgggatctattcgcatctactttgatagggatctccacactaacagccctaggcatagtaaggggtcatataatgactttagctttgtgacccatacgaacagggagggggttccaatgcggaagggtgagcacctcggcgaattcaatctggggagcacaattgtgctcatcttcgaggcgccaaaagatttcaacttccaacttaagaccggacagaagatccgcttcggcgaggctctggggtccctgtag

SEQ ID NO: 277415 - DNA, 1227 bp, Artificial Sequence
  derived and/or modified sequence
atggccaccagcgtgggccacagatgcctgggcctgctgcacggcgtggccccctggagaagcagcctgcacccctgcgagatcaccgccctgagccagagcctgcagcccctgagaaagctgcccttcagagccttcagaaccgacgccagaaagatccacaccgcccccgccagaaccatgttcctgctgagacccctgcccatcctgctggtgaccggcggcggctacgccggctacagacagtacgagaagtacagagagagagagctggagaagctgggcctggagatcccccccaagctggccggccactgggaggtggccctgtacaagagcgtgcccaccagactgctgagcagagcctggggcagactgaaccaggtggagctgccccactggctgagaagacccgtgtacagcctgtacatctggaccttcggcgtgaacatgaaggaggccgccgtggaggacctgcaccactacagaaacctgagcgagttcttcagaagaaagctgaagccccaggccagacccgtgtgcggcctgcacagcatcagccccagcgacggcagaatcctgaacttcggccaggtgaagaactgcgaggtggagcaggtgaagggcgtgacctacagcctggagagcttcctgggccccagaatgtgcaccgaggacctgcccttcccccccgccgccagctgcgacagcttcaagaaccagctggtgaccagagagggcaacgagctgtaccactgcgtgatctacctggcccccggcgactaccactgcttccacagccccaccgactggaccgtgagccacagaagacacttccccggcagcctgatgagcgtgaaccccggcatggccagatggatcaaggagctgttctgccacaacgagagagtggtgctgaccggcgactggaagcacggcttcttcagcctgaccgccgtgggcgccaccaacgtgggcagcatcagaatctacttcgacagagacctgcacaccaacagccccagacacagcaagggcagctacaacgacttcagcttcgtgacccacaccaacagagagggcgtgcccatgagaaagggcgagcacctgggcgagttcaacctgggcagcaccatcgtgctgatcttcgaggcccccaaggacttcaacttccagctgaagaccggccagaagatcagattcggcgaggccctgggcagcctgtag

SEQ ID NO: 277416 - DNA, 1230 bp, Artificial Sequence
  derived and/or modified sequence
atggccaccagcgtgggccacagatgcctgggcctgctgcacggcgtggccccctggagaagcagcctgcacccctgcgagatcaccgccctgagccagagcctgcagcccctgagaaagctgcccttcagagccttcagaaccgacgccagaaagatccacaccgcccccgccagaaccatgttcctgctgagacccctgcccatcctgctggtgaccggcggcggctacgccggctacagacagtacgagaagtacagagagagagagctggagaagctgggcctggagatcccccccaagctggccggccactgggaggtggccctgtacaagagcgtgcccaccagactgctgagcagagcctggggcagactgaaccaggtggagctgccccactggctgagaagacccgtgtacagcctgtacatctggaccttcggcgtgaacatgaaggaggccgccgtggaggacctgcaccactacagaaacctgagcgagttcttcagaagaaagctgaagccccaggccagacccgtgtgcggcctgcacagcgtgatcagccccagcgacggcagaatcctgaacttcggccaggtgaagaactgcgaggtggagcaggtgaagggcgtgacctacagcctggagagcttcctgggccccagaatgtgcaccgaggacctgcccttcccccccgccgccagctgcgacagcttcaagaaccagctggtgaccagagagggcaacgagctgtaccactgcgtgatctacctggcccccggcgactaccactgcttccacagccccaccgactggaccgtgagccacagaagacacttccccggcagcctgatgagcgtgaaccccggcatggccagatggatcaaggagctgttctgccacaacgagagagtggtgctgaccggcgactggaagcacggcttcttcagcctgaccgccgtgggcgccaccaacgtgggcagcatcagaatctacttcgacagagacctgcacaccaacagccccagacacagcaagggcagctacaacgacttcagcttcgtgacccacaccaacagagagggcgtgcccatgagaaagggcgagcacctgggcgagttcaacctgggcagcaccatcgtgctgatcttcgaggcccccaaggacttcaacttccagctgaagaccggccagaagatcagattcggcgaggccctgggcagcctgtag

SEQ ID NO: 277417 - protein, 375 aa, Artificial Sequence
  derived and/or modified sequence
MMCQSEARQGPELRAAKWLHFPQLALRRRLGQLSCMSRPALKLRSWPLTVLYYLLPFGALRPLSRVGWRPVSRVALYKSVPTRLLSRAWGRLNQVELPHWLRRPVYSLYIWTFGVNMKEAAVEDLHHYRNLSEFFRRKLKPQARPVCGLHSVISPSDGRILNFGQVKNCEVEQVKGVTYSLESFLGPRMCTEDLPFPPAASCDSFKNQLVTREGNELYHCVIYLAPGDYHCFHSPTDWTVSHRRHFPGSLMSVNPGMARWIKELFCHNERVVLTGDWKHGFFSLTAVGATNVGSIRIYFDRDLHTNSPRHSKGSYNDFSFVTHTNREGVPMRKGEHLGEFNLGSTIVLIFEAPKDFNFQLKTGQKIRFGEALGSL

SEQ ID NO: 277418 - protein, 262 aa, Artificial Sequence
  derived and/or modified sequence
MMCQSEARQGPELRAAKWLHFPQLALRRRLGQLSCMSRPALKLRSWPLTVLYYLLPFGALRPLSRVGWRPVSRVALYKSVPTRLLSRAWGRLNQVELPHWLRRPVYSLYIWTFGVNMKEAAVEDLHHYRNLSEFFRRKLKPQARPVCGLHSVISPSDGRILNFGQVKNCEVEQVKGVTYSLESFLGPRMCTEDLPFPPAASCDSFKNQLVTREGNELYHCVIYLAPGDYHCFHSPTDWTVSHRRHFPGPAHKQPKAQQGLLQ

SEQ ID NO: 277419 - protein, 228 aa, Artificial Sequence
  derived and/or modified sequence
MMCQSEARQGPELRAAKWLHFPQLALRRRLGQLSCMSRPALKLRSWPLTVLYYLLPFGALRPLSRVGWRPVSRVALYKSVPTRLLSRAWGRLNQVELPHWLRRPVYSLYIWTFGVNMKEAAVEDLHHYRNLSEFFRRKLKPQARPVCGLHSVISPSDGRILNFGQVKNCEVEQVKGVTYSLESFLGPRMCTEDLPFPPAASCDSFKNQLVTREGNELYHCVIYLAPGD

SEQ ID NO: 277420 - protein, 73 aa, Artificial Sequence
  derived and/or modified sequence
MMCQSEARQGPELRAAKWLHFPQLALRRRLGQLSCMSRPALKLRSWPLTVLYYLLPFGALRPLSRVGWRPVSR

SEQ ID NO: 277421 - protein, 81 aa, Artificial Sequence
  derived and/or modified sequence
MMCQSEARQGPELRAAKWLHFPQLALRRRLGQLSCMSRPALKLRSWPLTVLYYLLPFGALRPLSRVGWRPVSRVALYKSVP

SEQ ID NO: 277422 - protein, 326 aa, Artificial Sequence
  derived and/or modified sequence
MMCQSEARQGPELRAAKWLHFPQLALRRRLGQLSCMSRPALKLRSWPLTVLYYLLPFGALRPLSRVGWRPVSRVALYKSVPTRLLSRAWGRLNQVELPHWLRRPVYSLYIWTFGVNMKEAAVEDLHHYRNLSEFFRRKLKPQARPVCGLHSVISPSDGRILNFGQVKNCEVEQVKGVTYSLESFLGPRMCTEDLPFPPAASCDSFKNQLVTREGNELYHCVIYLAPGDYHCFHSPTDWTVSHRRHFPGSLMSVNPGMARWIKELFCHNERVVLTGDWKHGFFSLTAVGATNVGSIRIYFDRDLHTNSPRHSKGSYNDFSVVGSLTR

SEQ ID NO: 277423 - DNA, 1128 bp, Artificial Sequence
  derived and/or modified sequence
atgatgtgccaatcggaagcccgccagggccccgaactccgcgcggcaaagtggttgcacttccctcagctcgccttgcgacggcgtttagggcaattgagttgcatgtcccgcccggccctgaaactgcgttcttggcccctcaccgtcctgtactacctgcttccatttggcgcactaaggcctctgagccgggtcggctggagacccgtcagcagagttgctctctacaagtcagttcccactaggctgttaagccgcgcttggggccggcttaaccaggtcgagctaccacactggcttcgccgaccagtctactcattgtacatctggaccttcggtgtcaatatgaaggaggcggccgtggaagatctgcatcactatcgcaacctcagcgagtttttccgccggaaactcaaaccccaggccaggcccgtttgcggcttgcactctgtaatatcaccatctgatggccggatactcaatttcgggcaggtgaaaaactgcgaggtggagcaggtcaaaggtgttacttactccctggagtcgttcctggggcccaggatgtgtaccgaagaccttcctttccctcccgccgccagctgtgattcattcaagaaccagttagtgaccagggaaggcaacgaactgtaccattgtgtaatctacctcgcgcctggggattaccattgcttccacagtcctaccgattggacagtgtcacatagaagacattttcctggatccctcatgagcgttaacccaggaatggcaagatggattaaggaattgttctgtcacaacgagcgagtcgttcttacaggagattggaaacacgggttctttagtctcaccgctgtcggagctacaaacgtggggagcattcgcatctactttgaccgggacctccacacaaactccccccgccactcaaaggggtcatacaatgatttctccttcgtcactcataccaatagggaaggcgtgccaatgcgtaaaggagagcatctcggggaattcaacctagggagcactatcgtgctgatctttgaggcacctaaggacttcaacttccagctgaagactgggcaaaaaatcagatttggggaggcattgggttctttatag

SEQ ID NO: 277424 - DNA, 1128 bp, Artificial Sequence
  derived and/or modified sequence
atgatgtgtcagtctgaggctcgacaaggaccggagctgcgggctgcaaaatggctccacttcccccagctcgctctgagacgtcgcttgggtcagctctcctgcatgagcagacctgccttgaaactgcggagctggcccctcactgtgctgtactatttgttaccttttggtgccctcaggccactctctagagttgggtggaggccggtgtcccgcgtcgccttgtataagagcgtcccaaccaggctgctgtctcgcgcatggggccggcttaatcaagttgagctcccacattggcttcggaggcccgtgtacagtctgtacatctggacgttcggggtgaatatgaaggaagccgctgttgaggatctccatcactatcggaacctgtccgagtttttcaggagaaaacttaaaccgcaagcgcggcccgtgtgtggcctgcatagcgtcatctccccttctgacggtcggattcttaacttcggtcaggtgaagaactgtgaggtagagcaggtaaaaggggttacgtacagcctagagtcgtttttgggcccccggatgtgtaccgaggatctccctttccccccagcagcgtcttgtgactcgttcaagaaccagttggtcactcgggagggtaacgaactctaccattgtgtcatttatctggcccccggggactatcactgcttccactctcccaccgactggacagtcagtcatagacgccacttccctggcagtcttatgagtgtaaatccaggtatggcacgatggattaaagagctattttgtcacaacgagcgggtggtacttactggagactggaagcacgggtttttctccttaaccgccgtcggggctacaaacgtcggcagcatcaggatctattttgacagagaccttcatactaactccccaaggcacagcaaaggaagctataatgacttttccttcgtcacccataccaatagagaaggagtcccaatgaggaaaggtgagcacttgggtgagtttaatttgggatcaaccatcgtgctaatctttgaggcccccaaggatttcaatttccagctgaagacgggccagaaaatccggttcggggaagctctcggttctctgtag

SEQ ID NO: 277425 - DNA, 789 bp, Artificial Sequence
  derived and/or modified sequence
atgatgtgtcagtccgaagctcggcaggggcctgagctgcgggccgctaagtggcttcacttcccacagctcgcgctgcgccggaggctcgggcagctttcctgcatgagtagaccagcacttaaactgcgttcatggcccctgaccgtcctgtactatcttctgccatttggagccctgaggcctctctcaagggtcgggtggaggccagtcagccgagtggcactatataagagtgtaccaaccaggctgctgagcagggcatggggacggctcaatcaagtggaactgccccactggttaaggagaccagtatacagcctctacatatggacgtttggtgtaaacatgaaggaggccgctgtcgaggatttgcatcattatcggaatctgtctgaatttttccggcggaaactcaaacctcaggcccgtccggtgtgcggcctccattccgtgatcagcccttcagacggtagaatcctgaatttcgggcaggtgaagaattgtgaagtagaacaggttaaaggggtgacttacagtctagagagtttcctgggaccgcgaatgtgcacagaagacctgcccttcccaccagccgctagttgtgactcctttaagaaccaactggttactagggagggaaatgaactgtatcattgcgtgatttacttagccccaggggattaccactgcttccacagtccaactgattggacagtcagtcataggcgccacttccctggcccagcccacaagcagcctaaagcacagcaaggtctcctccagtag

SEQ ID NO: 277426 - DNA, 687 bp, Artificial Sequence
  derived and/or modified sequence
atgatgtgccaaagtgaagctagacaggggccagaacttcgggcagctaaatggttacacttcccccagctggcactgcgccgccgcctcggccagctttcctgcatgagtagaccagcactgaagctccgtagttggcccctcactgtgctgtattatctcctacccttcggagctttaaggccactctcacgtgtggggtggaggcccgtatccagagtggcgctgtataagtcagttcccacgcgccttttgagtagggcatggggccgcttaaaccaggtggagctgcctcactggctcagaaggccggtgtattccctgtatatctggactttcggagtgaatatgaaggaggctgccgtagaggacctgcatcactacagaaacttaagcgaattttttcgccgcaaacttaagccccaggcccggcctgtatgcggattacatagtgtgattagcccgtcagacggaaggattttgaattttggccaggtgaagaattgcgaagttgagcaggtgaagggagtcacgtactctctagaaagctttctgggaccccgcatgtgcacggaggacttgccattcccccctgccgcttcttgtgattccttcaaaaatcagttagtgactagggagggtaatgaactgtatcactgcgtgatctatcttgcccctggcgattag

SEQ ID NO: 277427 - DNA, 222 bp, Artificial Sequence
  derived and/or modified sequence
atgatgtgtcagagtgaggcgcgccagggccccgagctgagagcggccaaatggctacacttccctcagttggccctacgtagacggttgggccaattaagctgtatgtcacgcccagctttgaaactcaggtcttggccactcaccgtcctctactacctgctgcccttcggcgcactgcgtccactgagtcgggtgggttggaggcctgtctccagatag

SEQ ID NO: 277428 - DNA, 222 bp, Artificial Sequence
  derived and/or modified sequence
atgatgtgtcagtctgaggcgcgacaggggccagagctgagagccgccaagtggctgcatttcccccagctcgcattaagacgacgcctcgggcagctaagctgtatgagccgaccagccttaaagctgcggtcatggcctctgaccgtcctttattacttgcttccattcggagccttgcggcccttgtcccgagttggatggagaccggtgtcccgctag

SEQ ID NO: 277429 - DNA, 246 bp, Artificial Sequence
  derived and/or modified sequence
atgatgtgccagtccgaggcgaggcagggtccagaactgcgggctgcgaaatggttgcatttccctcaattagcactccgtcggcgactgggacaactcagctgtatgagtcgtcccgccttgaaattgcgctcttggccactgacagtcctctattatctgctcccttttggcgcacttcgtccactgtctcgtgtaggatggcggcccgtttcaagggtcgccctgtacaagtctgtgccttag

SEQ ID NO: 277430 - DNA, 981 bp, Artificial Sequence
  derived and/or modified sequence
atgatgtgtcaatcggaggccagacagggccccgagctacgcgctgccaagtggcttcattttccacagctggccctccggaggcgactaggccagttgtcttgcatgtcccgccctgccttaaaactcagatcttggccactgacagttctgtactatctgctgccattcggcgcgctccggccacttagtcgagtggggtggaggccagtgagccgcgttgccctttataagtcagttcccacacggctactgagccgcgcctggggcagactcaaccaagtggagctgcctcactggttgcgtcgccccgtctatagcctatacatatggacgtttggagtaaacatgaaagaggctgctgttgaggatttacaccactataggaacctgtcggagtttttccgtcgaaaactgaagccacaagcacgacccgtctgtggtctccattcggtgatctcaccaagcgacggaaggatcctaaattttggtcaagtgaaaaactgtgaagtggaacaggtcaagggtgttacgtattcgctggagtccttcctaggcccacgcatgtgcacggaagacttgccttttcctccagccgcttcctgcgactcctttaagaatcaactcgtgacacgcgagggcaacgaattgtatcactgtgtgatctacctcgccccaggggattatcactgtttccactccccgactgattggaccgtctcccaccgcaggcacttcccgggaagtttgatgtcagtaaacccaggcatggccaggtggattaaagaactcttttgccataacgaacgcgtcgtgttgaccggagattggaagcacggattcttttctttgaccgctgtaggtgctactaatgtgggttcaattcgcatatatttcgatagagacttacacactaactctccacggcacagtaaggggagctacaacgacttctctgtcgtggggtcgctgaccagatag

SEQ ID NO: 277431 - DNA, 1128 bp, Artificial Sequence
  derived and/or modified sequence
atgatgtgccagagcgaggcccggcagggccctgagctgcgggccgccaagtggctgcacttcccccagctggccctgcggcggcggctgggccagctgagctgcatgagcaggcctgccctgaagctgcgctcctggcccctgactgtgctgtactacctgctgccctttggagccctgcggcccctgagccgggtgggctggaggcctgtgtcccgggtggccctgtacaagtctgtgcccacccggctgctgagccgggcctggggccgcctgaaccaggtggagctgccccactggctgcggcggcctgtgtacagcctgtacatctggacctttggagtgaacatgaaggaggccgctgtggaggacctgcaccactacagaaacctgtctgagttcttccggaggaagctgaagccccaggcccggcctgtgtgtggcctgcacagcgtcatcagccccagtgatggccgcatcctgaactttggccaggtgaagaactgtgaggtggagcaggtgaagggcgtgacctacagcctggagagcttcctgggccccaggatgtgcacagaggacctgcccttccccccagctgccagctgtgacagcttcaagaaccagctggtgacccgggagggcaatgagctgtaccactgcgtcatctacctggcccctggggactaccactgcttccacagccccacagactggacagtgagccacagaagacacttccctggcagcctgatgtctgtgaaccctggcatggcccgctggatcaaggagctgttctgccacaatgaaagagtggtgctgaccggggactggaagcacggcttcttcagcctgacagctgtgggcgccaccaacgtgggcagcatccgcatctactttgaccgggacctgcacaccaacagccccaggcacagcaagggcagctacaatgacttctcctttgtgacccacaccaaccgggagggcgtgcccatgaggaaaggagagcacctgggggagttcaacctgggcagcaccatcgtgctgatctttgaggcccccaaggacttcaacttccagctgaagacaggccagaagatccgctttggagaggccctgggcagcctgtag

SEQ ID NO: 277432 - DNA, 789 bp, Artificial Sequence
  derived and/or modified sequence
atgatgtgccagagcgaggcccggcagggccctgagctgcgggccgccaagtggctgcacttcccccagctggccctgcggcggcggctgggccagctgagctgcatgagcaggcctgccctgaagctgcgctcctggcccctgactgtgctgtactacctgctgccctttggagccctgcggcccctgagccgggtgggctggaggcctgtgtcccgggtggccctgtacaagtctgtgcccacccggctgctgagccgggcctggggccgcctgaaccaggtggagctgccccactggctgcggcggcctgtgtacagcctgtacatctggacctttggagtgaacatgaaggaggccgctgtggaggacctgcaccactacagaaacctgtctgagttcttccggaggaagctgaagccccaggcccggcctgtgtgtggcctgcacagcgtcatcagccccagtgatggccgcatcctgaactttggccaggtgaagaactgtgaggtggagcaggtgaagggcgtgacctacagcctggagagcttcctgggccccaggatgtgcacagaggacctgcccttccccccagctgccagctgtgacagcttcaagaaccagctggtgacccgggagggcaatgagctgtaccactgcgtcatctacctggcccctggggactaccactgcttccacagccccacagactggacagtgagccacagaagacacttccctggccctgcccacaagcagcccaaggcccagcagggcctgctgcagtag

SEQ ID NO: 277433 - DNA, 687 bp, Artificial Sequence
  derived and/or modified sequence
atgatgtgccagagcgaggcccggcagggccctgagctgcgggccgccaagtggctgcacttcccccagctggccctgcggcggcggctgggccagctgagctgcatgagcaggcctgccctgaagctgcgctcctggcccctgactgtgctgtactacctgctgccctttggagccctgcggcccctgagccgggtgggctggaggcctgtgtcccgggtggccctgtacaagtctgtgcccacccggctgctgagccgggcctggggccgcctgaaccaggtggagctgccccactggctgcggcggcctgtgtacagcctgtacatctggacctttggagtgaacatgaaggaggccgctgtggaggacctgcaccactacagaaacctgtctgagttcttccggaggaagctgaagccccaggcccggcctgtgtgtggcctgcacagcgtcatcagccccagtgatggccgcatcctgaactttggccaggtgaagaactgtgaggtggagcaggtgaagggcgtgacctacagcctggagagcttcctgggccccaggatgtgcacagaggacctgcccttccccccagctgccagctgtgacagcttcaagaaccagctggtgacccgggagggcaatgagctgtaccactgcgtcatctacctggcccctggggactag

SEQ ID NO: 277434 - DNA, 222 bp, Artificial Sequence
  derived and/or modified sequence
atgatgtgccagagcgaggcccggcagggccctgagctgcgggccgccaagtggctgcacttcccccagctggccctgcggcggcggctgggccagctgagctgcatgagcaggcctgccctgaagctgcgctcctggcccctgactgtgctgtactacctgctgccctttggagccctgcggcccctgagccgggtgggctggaggcctgtgtccaggtag

SEQ ID NO: 277435 - DNA, 246 bp, Artificial Sequence
  derived and/or modified sequence
atgatgtgccagagcgaggcccggcagggccctgagctgcgggccgccaagtggctgcacttcccccagctggccctgcggcggcggctgggccagctgagctgcatgagcaggcctgccctgaagctgcgctcctggcccctgactgtgctgtactacctgctgccctttggagccctgcggcccctgagccgggtgggctggaggcctgtgtcccgggtggccctgtacaagtctgtgccctag

SEQ ID NO: 277436 - DNA, 981 bp, Artificial Sequence
  derived and/or modified sequence
atgatgtgccagagcgaggcccggcagggccctgagctgcgggccgccaagtggctgcacttcccccagctggccctgcggcggcggctgggccagctgagctgcatgagcaggcctgccctgaagctgcgctcctggcccctgactgtgctgtactacctgctgccctttggagccctgcggcccctgagccgggtgggctggaggcctgtgtcccgggtggccctgtacaagtctgtgcccacccggctgctgagccgggcctggggccgcctgaaccaggtggagctgccccactggctgcggcggcctgtgtacagcctgtacatctggacctttggagtgaacatgaaggaggccgctgtggaggacctgcaccactacagaaacctgtctgagttcttccggaggaagctgaagccccaggcccggcctgtgtgtggcctgcacagcgtcatcagccccagtgatggccgcatcctgaactttggccaggtgaagaactgtgaggtggagcaggtgaagggcgtgacctacagcctggagagcttcctgggccccaggatgtgcacagaggacctgcccttccccccagctgccagctgtgacagcttcaagaaccagctggtgacccgggagggcaatgagctgtaccactgcgtcatctacctggcccctggggactaccactgcttccacagccccacagactggacagtgagccacagaagacacttccctggcagcctgatgtctgtgaaccctggcatggcccgctggatcaaggagctgttctgccacaatgaaagagtggtgctgaccggggactggaagcacggcttcttcagcctgacagctgtgggcgccaccaacgtgggcagcatccgcatctactttgaccgggacctgcacaccaacagccccaggcacagcaagggcagctacaatgacttctctgtggtgggcagcctgaccaggtag

SEQ ID NO: 277437 - DNA, 1128 bp, Artificial Sequence
  derived and/or modified sequence
atgatgtgccagagcgaggcccggcagggccccgagctgcgggccgctaagtggctgcacttcccacagctcgctttgcgacgtaggctaggccagttgagctgcatgagtagacccgccttaaagttgcggtcatggcctctcaccgtactgtactacctgctaccctttggtgcactgcgccccttgtctcgtgtagggtggcggccagtgtcacgcgtggcactgtacaaaagcgttcccacaagacttctctcaagggcctggggacgcctcaaccaagttgagttgccccattggttgaggcgcccagtctactccctctatatctggacgttcggagttaatatgaaggaggctgctgtggaggatctccaccactatagaaacctgagtgagttttttcgtaggaagttgaagcctcaggccaggccagtctgtggtctccacagtgttatcagtcctagtgatggccggatcctcaactttggccaagtaaaaaactgtgaagtggagcaagtcaagggcgtcacttacagccttgaatcctttctcgggccccgcatgtgcacagaggacttacccttcccgcccgcagcctcttgcgattcctttaagaatcagttggtaaccagagagggtaacgaactttaccactgtgtcatttacctagctcctggggattaccattgctttcatagccctaccgactggacggtcagccaccgccgacatttccctggctccctgatgtctgttaaccccgggatggcccgctggatcaaagagctgttttgtcataatgaaagagtggtgctcaccggagactggaaacatggcttcttttcgctcactgccgtgggggcaacaaatgtgggtagcattcgcatttactttgaccgcgatctacacacaaattctcctcgacattccaaagggtcgtataacgattttagcttcgtgactcacaccaatagagagggcgtccctatgcgtaaaggcgaacatctgggggagtttaacctaggctctacgattgtcttaattttcgaggcaccaaaagatttcaatttccaactaaaaactggccagaagatcaggttcggcgaagcactgggctccttgtag

SEQ ID NO: 277438 - DNA, 1128 bp, Artificial Sequence
  derived and/or modified sequence
atgatgtgccagagcgaggcccggcagggccccgagctgcgggccgccaagtggctgcacttcccccagttggcactgaggaggaggcttggccaacttagctgcatgtcgagaccagcacttaagctacggtcgtggcccctaactgtactttattacctgttgccttttggagccctcaggccgctgtccagagtgggatggagaccagtcagccgagtggcactgtataagagcgtacctacaaggctcctcagtcgcgcatggggcagattgaaccaggtagaacttccccactggctgcggcggccagtgtacagtctctacatctggacgttcggcgttaatatgaaggaagcagctgtggaggaccttcaccactatcgcaacctgtcagagtttttcaggcggaagttgaaaccacaagccaggcccgtatgcggtctacattccgttatctccccatcggacggtaggatcctgaattttggacaggtgaaaaattgtgaggtggaacaggtgaagggcgtcacttactcactggaatctttcctcggcccgagaatgtgcactgaggacctcccattcccgccagccgcaagttgcgactcatttaagaaccagctggtgacccgcgaggggaatgagttgtatcactgcgttatctatctcgctccaggcgattaccattgcttccatagccccactgactggaccgtttcacatcggcgacacttccctggcagtcttatgtctgtgaatccaggcatggcacggtggattaaggaactgttttgtcataacgaaagagtcgttctgacgggggactggaaacacggattcttctccttgacggcagttggcgcaactaacgttggctcaattagaatttactttgatagggacctgcacacaaacagcccacggcatagtaaaggctcgtataatgacttttccttcgtgacgcacacaaaccgtgagggcgtacctatgcgaaaaggcgagcacctgggagagtttaatctgggcagtacaatcgtccttatcttcgaggcacccaaggattttaactttcaactcaagaccgggcagaaaatccgcttcggagaagcacttgggtccctgtag

SEQ ID NO: 277439 - DNA, 789 bp, Artificial Sequence
  derived and/or modified sequence
atgatgtgccagagcgaggcccggcagggccccgagctgcgggccgcgaaatggctacactttccacagcttgctctcagacgacggctgggccaactgagctgcatgagcaggccagcactgaagctccggtcttggcctttgacggtcctgtactacctgcttccttttggggctctgcgacccctgagccgagtcggctggaggcccgttagccgtgtggctctgtataaaagcgtgcccacacggttactttccagggcttggggacgactgaatcaggtggagctcccccactggttaagaagacctgtatacagcttgtacatttggacgtttggcgttaatatgaaagaagctgctgtggaggacttacaccattacagaaacctgagcgagtttttccggcggaagctgaagccacaggctcggcctgtctgtggactacacagcgtgatttcaccaagcgacggccggattctgaacttcggccaagtgaaaaattgcgaggttgagcaggtgaaaggggtcacttacagcctcgaatctttcctcggtccaagaatgtgcaccgaggaccttccctttcccccagccgccagctgcgattccttcaaaaatcaactggtcacacgcgaggggaacgagctgtatcactgcgtgatctatctggccccgggcgattaccattgctttcatagccctaccgactggaccgtatcacacaggcggcactttccagggcccgcccataaacagccgaaagcccagcagggtctcctgcagtag

SEQ ID NO: 277440 - DNA, 687 bp, Artificial Sequence
  derived and/or modified sequence
atgatgtgccagagcgaggcccggcagggccccgagctgcgggccgcaaagtggctccatttccctcagctcgctctgagacgcagactcgggcagctctcgtgtatgtcacgcccagccctgaaactccggagttggccactgactgtcttgtactacctactcccctttggagcgcttcgacccttatcccgggttggttggcggcccgtgagtagggtggccctgtacaaatctgtgcctaccagactcttgtcccgagcatggggcaggctgaatcaggtagaattaccccattggctgagacgcccggtttactctctgtacatctggacatttggggtgaatatgaaggaagctgccgttgaagacttacaccactacagaaatctctccgaattttttcgacggaaactcaagcctcaagcccgtcctgtatgcggcctccactctgttattagcccatctgacggccgaattcttaatttcggacaggtgaaaaattgcgaagtggagcaagtgaagggagtgacctacagtctggaatcttttctggggcctcgcatgtgcactgaagatctgccctttccccctgctgctagctgtgatagttttaaaaaccagttggtgaccagggagggcaacgagctctaccactgtgtgatttatctcgcccccggcgactag

SEQ ID NO: 277441 - DNA, 222 bp, Artificial Sequence
  derived and/or modified sequence
atgatgtgccagagcgaggcccggcagggccccgagctgcgggccgccaaatggctgcatttcccacagttagctcttcgacggcgcctcggacagctgagctgtatgtctaggcccgcgttgaaactgcgcagttggcccctgacggttctgtactaccttctccccttcggcgcgcttaggcctcttagtcgtgtgggctggcggccagtgagccgatag

SEQ ID NO: 277442 - DNA, 222 bp, Artificial Sequence
  derived and/or modified sequence
atgatgtgccagagcgaggcccggcagggccccgagctgcgggccgccaagtggctgcactttcctcaactcgccctgaggcggaggctggggcagttatcctgtatgagccggcccgcgttgaagttacgctcttggccacttacggttctttactatctgcttccgtttggggcgttgcggccactctcacgcgtagggtggaggcctgtgtcaaggtag

SEQ ID NO: 277443 - DNA, 246 bp, Artificial Sequence
  derived and/or modified sequence
atgatgtgccagagcgaggcccggcagggccccgagctgcgggccgcgaaatggctgcacttcccacagcttgccttaagacgacgactgggtcagctgagctgtatgtccaggcccgctttgaagctgcgctcctggcctctgactgtgttgtactacctactgcccttcggtgccctcagaccactatctagggtgggctggagacctgtgtcgcgagtggccctgtataaaagcgtaccctag

SEQ ID NO: 277444 - DNA, 981 bp, Artificial Sequence
  derived and/or modified sequence
atgatgtgccagagcgaggcccggcagggccccgagctgcgggccgccaagtggctacattttccacaactggcccttcgaagacggctcggccagctgtcttgcatgagccggcctgccctgaagctgagatcctggcctctgaccgtgctgtactatctgttgcccttcggcgctttgaggcctttgagtcgcgtggggtggcggccagtctctagagttgccctctataaaagtgttccaacccgtctgctgagccgggcttgggggaggctcaaccaagtagagcttccacactggctccgacgcccagtttattccctgtacatctggacgtttggcgtgaacatgaaggaggctgcagtggaggatttgcaccattatcgcaatctgagcgagttctttaggcgtaagctaaagccccaggcccggcctgtgtgcggactccattcggtgattagtccatccgatggcaggattttgaatttcggccaagtgaaaaattgcgaagtagaacaggtgaagggcgtgacctatagccttgaaagctttctgggcccaagaatgtgtactgaagacttgccattcccaccagcagcaagctgcgattcttttaagaaccaactagtcacccgcgaggggaatgagctctaccactgcgtgatttacctcgcccccggagactaccactgctttcatagtccgactgactggaccgtctcacatagacgacacttcccagggagtctcatgtccgtgaaccccggaatggcgagatggatcaaagagcttttctgtcataacgaacgagttgtactaactggtgactggaagcacggctttttcagcttgaccgccgtcggcgcaaccaacgtagggagcatcaggatctacttcgacagagatctccacacaaactccccccggcactccaaaggaagctacaatgacttttcagttgtaggaagtctcactcgatag

SEQ ID NO: 277445 - DNA, 2655 bp, Artificial Sequence
  derived and/or modified sequence
ggaagctggagccacctgcggctctgagagggacagacggtgctcagcctgtgtcctggggcaaagctggattcattttcctccctggcgatcttctggggcccacagctggtgatatggaggcactgacaccctggtctcggcgcttgttttagaagaggcagaacagtgataaagacaaggatctaaatgggcaaggacgccctgccctcactgggctcactggcagccctgaccctctattctgcaccctgtgagccaccgagactgaaccaaacccaggaagcggcgccaccaaccagcctcgcagaggcagaggccctggagcagtgacagcacaggagatctgctggctcgggggaaggggaggaaagaggaaaacaaagggagtgatcgagtgagcctcgccccgccctccctgcgccggcccatgatgtgtcagtcagaggcgcggcaaggaccagagctccgcgcggcgaaatggttgcacttcccccagctggccctgaggcggaggctggggcagctgagctgcatgtccagacccgctctgaaactgcgctcctggcccttgaccgtcctctactacctcctgcccttcggcgccctcagaccgctcagccgggtgggatggaggcccgtaagcagggtggctttgtacaagtcagtgccaacgcgcttgctgtcacgggcctggggtcgcctcaatcaggtggagctgccacactggctgcgcaggcccgtctacagcctgtacatctggacgtttggggtgaacatgaaagaggccgctgtggaggacctgcatcactaccgcaacctcagcgagttcttccggcgcaagctgaagccgcaggcccggcctgtctgtggcctgcacagcgtgattagcccatcggatggaaggatcctcaactttgggcaggtgaagaactgtgaggtggagcaggtaaagggggtcacctactccctggagtcgttcctgggcccgcgtatgtgcacagaggacctgcccttcccaccagccgcgtcgtgtgactccttcaagaaccagctggtcacccgggaagggaatgagctctatcactgtgtcatctacctggcccctggggactaccactgcttccactcccccaccgactggactgtgtcccaccggcgccacttcccaggctccctgatgtcagtgaaccctggcatggctcgctggatcaaagagctcttctgccataacgagcgggtggtcctgacgggggactggaaacatggcttcttctcactgacagctgtgggggccaccaacgtgggctccattcgcatctactttgaccgggacctgcacacaaacagcccaaggcacagcaagggctcctacaatgacttcagcttcgtgacgcacaccaatagagagggcgtccccatgcgtaagggcgagcacctgggcgagttcaacctgggctccaccatcgtgctcatcttcgaggcccccaaggacttcaatttccagctgaaaacaggacagaaaatccgctttggggaagccctgggctcgctctagagtctctttcctgattatggctgctaagggatcttttccaaacagagtgagggtcttttcaagagggaggcccatgaggccatccaggtaagggcctgcctcagcgtggttgggagtctgaccaggtaggacttgaatgattcggctaccacctgttccagaggtgcagacaagaggtggcgagagcccccatcatgcccctcaacctatcccgttccttctgcctacaaataaaaagtgcaggctggaatgatctcagtcacatttggatctttttaaacactgtatagacggaagagcctgcattcctgaccgaaccttcagttggtctcggttgtcgttttttcttgctgctcctccccccatcacctgagctgttttctgttggccccttttgttttttggccttaacgctcctgctgcacagggtgaggtgcctccttggcacagactgtggatgcctctcccccagcagagccacacagccttcgtgacaactgctttccgttcccacattcacctcatcctgctctttagaaaaagcagtctttgtgcttgtggctgaacgcatcaccctggactctgctagtgtcttctgaggacactgatgacactgattaatgatacagacctttgcaggacctgatgagtgacccttctggagctggccaggtcctctgcagcaggcaagaccaatcaatcactgaacctgcctcatggcaccagagtgaacagggcaggcaggtagtaggcccagctggggaaatgggagagttcctgtccccctccacatatccctacatgaaatatgggaaagttgctgctattgattcagggtctgtcttggaggcagaggacccttggtggatagttggtcagtgcctggaaaacctgtcccagtttatcaggaacgcaggcctggggagcccccagtggcggggacagggccagatttcatgttgaccctggggatgctgtgaatttctcctgcaggagagacatcattgaattttttcaactgtatcagtagcacagtatttttgtatgaaaagtgggagacttctgaacagtaattcatttaattgcaaagcattttg

SEQ ID NO: 277446 - DNA, 2669 bp, Artificial Sequence
  derived and/or modified sequence
ccatcctgcagctctgagagggacagacggtgctcagcctgtgtcctggggcaaagctggattcattttcctccctggcgatcttctggggcccacagctggtgatatggaggcactgacaccctggtctcggcgcttgttttagaagaggcagaacagtgataaagacaaggatctaaatgggcaaggacgccctgccctcactgggctcactggcagccctgaccctctattctgcaccctgtgagccaccgagactgaaccaaacccaggaagcggcgccaccaaccagcctcgcagaggcagaggccctggagcagtgacagcacaggagatctgctggctcgggggaaggggaggaaagaggaaaacaaagggagtgatcgagtgagcctcgccccgccctccctgcgccggcccatgatgtgtcagtcagaggcgcggcaaggaccagagctccgcgcggcgaaatggttgcacttcccccagctggccctgaggcggaggctggggcagctgagctgcatgtccagacccgctctgaaactgcgctcctggcccttgaccgtcctctactacctcctgcccttcggcgccctcagaccgctcagccgggtgggatggaggcccgtaagcagggtggctttgtacaagtcagtgccaacgcgcttgctgtcacgggcctggggtcgcctcaatcaggtggagctgccacactggctgcgcaggcccgtctacagcctgtacatctggacgtttggggtgaacatgaaagaggccgctgtggaggacctgcatcactaccgcaacctcagcgagttcttccggcgcaagctgaagccgcaggcccggcctgtctgtggcctgcacagcgtgattagcccatcggatggaaggatcctcaactttgggcaggtgaagaactgtgaggtggagcaggtaaagggggtcacctactccctggagtcgttcctgggcccgcgtatgtgcacagaggacctgcccttcccaccagccgcgtcgtgtgactccttcaagaaccagctggtcacccgggaagggaatgagctctatcactgtgtcatctacctggcccctggggactaccactgcttccactcccccaccgactggactgtgtcccaccggcgccacttcccaggctccctgatgtcagtgaaccctggcatggctcgctggatcaaagagctcttctgccataacgagcgggtggtcctgacgggggactggaaacatggcttcttctcactgacagctgtgggggccaccaacgtgggctccattcgcatctactttgaccgggacctgcacacaaacagcccaaggcacagcaagggctcctacaatgacttcagcttcgtgacgcacaccaatagagagggcgtccccatgcgtaagggcgagcacctgggcgagttcaacctgggctccaccatcgtgctcatcttcgaggcccccaaggacttcaatttccagctgaaaacaggacagaaaatccgctttggggaagccctgggctcgctctagagtctctttcctgattatggctgctaagggatcttttccaaacagagtgagggtcttttcaagagggaggcccatgaggccatccaggtaagggcctgcctcagcgtggttgggagtctgaccaggtaggacttgaatgattcggctaccacctgttccagaggtgcagacaagaggtggcgagagcccccatcatgcccctcaacctatcccgttccttctgcctacaaataaaaagtgcaggctggaatgatctcagtcacatttggatctttttaaacactgtatagacggaagagcctgcattcctgaccgaaccttcagttggtctcggttgtcgttttttcttgctgctcctccccccatcacctgagctgttttctgttggccccttttgttttttggccttaacgctcctgctgcacagggtgaggtgcctccttggcacagactgtggatgcctctcccccagcagagccacacagccttcgtgacaactgctttccgttcccacattcacctcatcctgctctttagaaaaagcagtctttgtgcttgtggctgaacgcatcaccctggactctgctagtgtcttctgaggacactgatgacactgattaatgatacagacctttgcaggacctgatgagtgacccttctggagctggccaggtcctctgcagcaggcaagaccaatcaatcactgaacctgcctcatggcaccagagtgaacagggcaggcaggtagtaggcccagctggggaaatgggagagttcctgtccccctccacatatccctacatgaaatatgggaaagttgctgctattgattcagggtctgtcttggaggcagaggacccttggtggatagttggtcagtgcctggaaaacctgtcccagtttatcaggaacgcaggcctggggagcccccagtggcggggacagggccagatttcatgttgaccctggggatgctgtgaatttctcctgcaggagagacatcattgaattttttcaactgtatcagtagcacagtatttttgtatgaaaagtgggagacttctgaacagtaattcatttaattgcaaagcattttgaaataaaaaaaatcaaacttaaaa

SEQ ID NO: 277447 - DNA, 2194 bp, Artificial Sequence
  derived and/or modified sequence
ggagcccggaagctggagccacctgcggccctgaccctctattctgcaccctgtgagccaccgagactgaaccaaacccaggaagcggcgccaccaaccagcctcgcagaggcagaggccctggagcagtgacagcacaggagatctgctggctcgggggaaggggaggaaagaggaaaacaaagggagtgatcgagtgagcctcgccccgccctccctgcgccggcccatgatgtgtcagtcagaggcgcggcaaggaccagagctccgcgcggcgaaatggttgcacttcccccagctggccctgaggcggaggctggggcagctgagctgcatgtccagacccgctctgaaactgcgctcctggcccttgaccgtcctctactacctcctgcccttcggcgccctcagaccgctcagccgggtgggatggaggcccgtaagcagggtggctttgtacaagtcagtgccaacgcgcttgctgtcacgggcctggggtcgcctcaatcaggtggagctgccacactggctgcgcaggcccgtctacagcctgtacatctggacgtttggggtgaacatgaaagaggccgctgtggaggacctgcatcactaccgcaacctcagcgagttcttccggcgcaagctgaagccgcaggcccggcctgtctgtggcctgcacagcgtgattagcccatcggatggaaggatcctcaactttgggcaggtgaagaactgtgaggtggagcaggtaaagggggtcacctactccctggagtcgttcctgggcccgcgtatgtgcacagaggacctgcccttcccaccagccgcgtcgtgtgactccttcaagaaccagctggtcacccgggaagggaatgagctctatcactgtgtcatctacctggcccctggggactaccactgcttccactcccccaccgactggactgtgtcccaccggcgccacttcccaggacctgcacacaaacagcccaaggcacagcaagggctcctacaatgacttcagcttcgtgacgcacaccaatagagagggcgtccccatgcgtaagggcgagcacctgggcgagttcaacctgggctccaccatcgtgctcatcttcgaggcccccaaggacttcaatttccagctgaaaacaggacagaaaatccgctttggggaagccctgggctcgctctagagtctctttcctgattatggctgctaagggatcttttccaaacagagtgagggtcttttcaagagggaggcccatgaggccatccaggtaagggcctgcctcagcgtggttgggagtctgaccaggtaggacttgaatgattcggctaccacctgttccagaggtgcagacaagaggtggcgagagcccccatcatgcccctcaacctatcccgttccttctgcctacaaataaaaagtgcaggctggaatgatctcagtcacatttggatctttttaaacactgtatagacggaagagcctgcattcctgaccgaaccttcagttggtctcggttgtcgttttttcttgctgctcctccccccatcacctgagctgttttctgttggccccttttgttttttggccttaacgctcctgctgcacagggtgaggtgcctccttggcacagactgtggatgcctctcccccagcagagccacacagccttcgtgacaactgctttccgttcccacattcacctcatcctgctctttagaaaaagcagtctttgtgcttgtggctgaacgcatcaccctggactctgctagtgtcttctgaggacactgatgacactgattaatgatacagacctttgcaggacctgatgagtgacccttctggagctggccaggtcctctgcagcaggcaagaccaatcaatcactgaacctgcctcatggcaccagagtgaacagggcaggcaggtagtaggcccagctggggaaatgggagagttcctgtccccctccacatatccctacatgaaatatgggaaagttgctgctattgattcagggtctgtcttggaggcagaggacccttggtggatagttggtcagtgcctggaaaacctgtcccagtttatcaggaacgcaggcctggggagcccccagtggcggggacagggccagatttcatgttgaccctggggatgctgtgaatttctcctgcaggagag

SEQ ID NO: 277448 - DNA, 1015 bp, Artificial Sequence
  derived and/or modified sequence
gggccggtcactccgcgcaagtttgggttcctgttttagaactgccacctaagcccctcttatttcatctttcctgtggtggaaacccctgcccccaccggagtgtgaggttgactttttggaaagagagccctgaccctctattctgcaccctgtgagccaccgagactgaaccaaacccaggaagcggcgccaccaaccagcctcgcagaggcagaggccctggagcagtgacagcacaggagatctgctggctcgggggaaggggaggaaagaggaaaacaaagggagtgatcgagtgagcctcgccccgccctccctgcgccggcccatgatgtgtcagtcagaggcgcggcaaggaccagagctccgcgcggcgaaatggttgcacttcccccagctggccctgaggcggaggctggggcagctgagctgcatgtccagacccgctctgaaactgcgctcctggcccttgaccgtcctctactacctcctgcccttcggcgccctcagaccgctcagccgggtgggatggaggcccgtaagcagggtggctttgtacaagtcagtgccaacgcgcttgctgtcacgggcctggggtcgcctcaatcaggtggagctgccacactggctgcgcaggcccgtctacagcctgtacatctggacgtttggggtgaacatgaaagaggccgctgtggaggacctgcatcactaccgcaacctcagcgagttcttccggcgcaagctgaagccgcaggcccggcctgtctgtggcctgcacagcgtgattagcccatcggatggaaggatcctcaactttgggcaggtgaagaactgtgaggtggagcaggtaaagggggtcacctactccctggagtcgttcctgggcccgcgtatgtgcacagaggacctgcccttcccaccagccgcgtcgtgtgactccttcaagaaccagctggtcacccgggaagggaatgagctctatcactgtgtcatctacctggcccctggggac

SEQ ID NO: 277449 - DNA, 609 bp, Artificial Sequence
  derived and/or modified sequence
ccttcatccccccttcctcgcccctccacagacccagggcatttggtggacacttttgcttgcagttaggtcaagtggaggtatggaagaacatggaaatccatggaggaggaccctatctgtcttcttccccctgccgcatcccagggctgtggcttgtcatgtggcacttgcttgggctggatccagccctgaccctctattctgcaccctgtgagccaccgagactgaaccaaacccaggaagcggcgccaccaaccagcctcgcagaggcagaggccctggagcagtgacagcacaggagatctgctggctcgggggaaggggaggaaagaggaaaacaaagggagtgatcgagtgagcctcgccccgccctccctgcgccggcccatgatgtgtcagtcagaggcgcggcaaggaccagagctccgcgcggcgaaatggttgcacttcccccagctggccctgaggcggaggctggggcagctgagctgcatgtccagacccgctctgaaactgcgctcctggcccttgaccgtcctctactacctcctgcccttcggcgccctcagaccgctcagccgggtgggatggaggcccgtaagcagg

SEQ ID NO: 277450 - DNA, 460 bp, Artificial Sequence
  derived and/or modified sequence
atttggtggacacttttgcttgcagttaggtcaagtggagccctgaccctctattctgcaccctgtgagccaccgagactgaaccaaacccaggaagcggcgccaccaaccagcctcgcagaggcagaggccctggagcagtgacagcacaggagatctgctggctcgggggaaggggaggaaagaggaaaacaaagggagtgatcgagtgagcctcgccccgccctccctgcgccggcccatgatgtgtcagtcagaggcgcggcaaggaccagagctccgcgcggcgaaatggttgcacttcccccagctggccctgaggcggaggctggggcagctgagctgcatgtccagacccgctctgaaactgcgctcctggcccttgaccgtcctctactacctcctgcccttcggcgccctcagaccgctcagccgggtgggatggaggcccgtaagcagg

SEQ ID NO: 277451 - DNA, 722 bp, Artificial Sequence
  derived and/or modified sequence
aagtggggcctgaaagccctggcagcagtggctggtcccctccctgtcatggcttactggaccgggcagccctagggccttgccccctactgcctccccaggccagctgaggaagaggatgagcagtgcaggctggctcagccctgggtagcagggacagagcaggtggccaggactggggacagtgggctttagtgcaggggcttttgcactggactgcaagccctgagcaggtgacctgagcaggtgtgtgaccagtgcctgtctgtctgcaatagccctgaccctctattctgcaccctgtgagccaccgagactgaaccaaacccaggaagcggcgccaccaaccagcctcgcagaggcagaggccctggagcagtgacagcacaggagatctgctggctcgggggaaggggaggaaagaggaaaacaaagggagtgatcgagtgagcctcgccccgccctccctgcgccggcccatgatgtgtcagtcagaggcgcggcaaggaccagagctccgcgcggcgaaatggttgcacttcccccagctggccctgaggcggaggctggggcagctgagctgcatgtccagacccgctctgaaactgcgctcctggcccttgaccgtcctctactacctcctgcccttcggcgccctcagaccgctcagccgggtgggatggaggcccgtaagcagggtggctttgtacaagtcagtgcca

SEQ ID NO: 277452 - DNA, 1349 bp, Artificial Sequence
  derived and/or modified sequence
ttggccaacaagcgtttctccctcttccctgttctccccacttccccacttcatcccccttcatccccccttcctcgcccctccacagacccagggcatttggtggacacttttgcttgcagttaggtcaagtggagccctgaccctctattctgcaccctgtgagccaccgagactgaaccaaacccaggaagcggcgccaccaaccagcctcgcagaggcagaggccctggagcagtgacagcacaggagatctgctggctcgggggaaggggaggaaagaggaaaacaaagggagtgatcgagtgagcctcgccccgccctccctgcgccggcccatgatgtgtcagtcagaggcgcggcaaggaccagagctccgcgcggcgaaatggttgcacttcccccagctggccctgaggcggaggctggggcagctgagctgcatgtccagacccgctctgaaactgcgctcctggcccttgaccgtcctctactacctcctgcccttcggcgccctcagaccgctcagccgggtgggatggaggcccgtaagcagggtggctttgtacaagtcagtgccaacgcgcttgctgtcacgggcctggggtcgcctcaatcaggtggagctgccacactggctgcgcaggcccgtctacagcctgtacatctggacgtttggggtgaacatgaaagaggccgctgtggaggacctgcatcactaccgcaacctcagcgagttcttccggcgcaagctgaagccgcaggcccggcctgtctgtggcctgcacagcgtgattagcccatcggatggaaggatcctcaactttgggcaggtgaagaactgtgaggtggagcaggtaaagggggtcacctactccctggagtcgttcctgggcccgcgtatgtgcacagaggacctgcccttcccaccagccgcgtcgtgtgactccttcaagaaccagctggtcacccgggaagggaatgagctctatcactgtgtcatctacctggcccctggggactaccactgcttccactcccccaccgactggactgtgtcccaccggcgccacttcccaggctccctgatgtcagtgaaccctggcatggctcgctggatcaaagagctcttctgccataacgagcgggtggtcctgacgggggactggaaacatggcttcttctcactgacagctgtgggggccaccaacgtgggctccattcgcatctactttgaccgggacctgcacacaaacagcccaaggcacagcaagggctcctacaatgacttcagcgtggttgggagtctgaccaggtaggacttgaatgattcggctaccacctgttcc

SEQ ID NO: 277453 - DNA, 1128 bp, Artificial Sequence
  derived and/or modified sequence
atgatgtgccagagtgaagcccgacagggtcctgaactacgagctgctaaatggcttcacttccctcaacttgccctgcgacggcgtcttggtcagctcagctgcatgagccggccagcgcttaagttacgctcatggccactgacagtgctctactatctgctccccttcggggctctccgtcccttgagccgagtcggctggagacccgtgtcaagagtggccctctacaagagcgtgcctactaggcttctgagccgcgcttgggggaggctgaaccaggttgagctcccccactggctccgtcgtccagtctactcattatacatctggacctttggcgttaatatgaaagaagcggcagtggaggatctgcatcactaccggaatctgtcagagttcttcaggaggaagctgaaaccgcaggcaagacctgtgtgcggcctgcacagcgttatctctccctctgatgggaggatcctgaatttcggccaggttaaaaactgcgaggtagagcaggttaagggtgtgacctactcacttgaatctttcctagggcctagaatgtgcactgaagatctgcctttcccaccagcagcctcctgtgattcttttaagaaccaactcgtcactagagagggaaacgagctttaccactgtgtcatttatctcgcacccggtgactaccattgtttccacagtccaacagactggacagtgagccaccggagacacttcccagggagcctgatgtcagtcaatccgggaatggcccgttggattaaagagctgttttgtcacaacgagagggttgtgctgacaggagactggaagcacggcttcttctctctgaccgccgtcggcgctacgaatgtcggtagcatcagaatctactttgacagggatctccacaccaactcaccaaggcattccaagggcagctataacgatttctcattcgtaactcacaccaacagagaaggtgtgcccatgagaaagggggagcatctgggagagtttaacctgggcagtacaattgtgctcatctttgaggcccctaaggactttaactttcagctgaagacagggcagaaaattcggtttggcgaggctctggggtctctatag

SEQ ID NO: 277454 - DNA, 1128 bp, Artificial Sequence
  derived and/or modified sequence
atgatgtgccagtccgaggccaggcaaggtcctgagttgcgcgcagccaagtggctgcactttccccaactcgccctgcgcagacgactgggccagctgagctgcatgagtcggccagccttgaagttgagaagttggcccctaaccgttctgtactatctactgccattcggggcacttaggcccctgagcagggttggctggagaccagtatcaagagtagccctgtacaagtctgtcccaaccaggttgctcagcagggcctggggcagattaaaccaggtcgaacttcctcactggttacgaaggcccgtatactctctatacatctggacttttggcgtgaatatgaaagaagcagcggtagaagacctccatcattacaggaatctctccgaattctttcggagaaagctcaagccacaggccaggcccgtgtgtggattgcatagcgtgatctccccatctgacggtcgtatactcaattttgggcaggtgaagaactgcgaggtggagcaggtaaagggggttacatacagcctggagtctttcctggggcctcgaatgtgtaccgaggaccttccttttcctcccgcagccagctgcgactcttttaagaaccagctggtgacgagggaagggaatgagctgtaccattgcgtgatatatctggctcctggggattaccattgtttccacagtccaaccgattggactgtatctcaccggagacattttccagggtctctgatgagtgttaacccaggaatggcacgctggatcaaggagctcttttgtcataacgagagagtagtcctgaccggcgactggaaacatgggttttttagcttgacagccgttggagctacaaatgttggttcgatacgcatctatttcgaccgggatttgcacaccaattcaccccgacacagtaagggaagttataacgatttttcttttgtcacacacacaaatcgggaaggcgtgccgatgaggaagggtgagcacctgggtgaatttaatctgggatcaactatcgtgttaatctttgaagcgcctaaggatttcaactttcaattaaaaaccgggcagaagattcgattcggagaggcgttaggcagcctgtag

SEQ ID NO: 277455 - DNA, 789 bp, Artificial Sequence
  derived and/or modified sequence
atgatgtgccagagcgaggcaagacagggtccggagttacgggctgcgaagtggctgcactttcctcagcttgctctgagaagacgtctgggacaacttagttgcatgagccgccctgctttgaaattgaggagttggccattgacagtactctattacctgttaccgtttggggctttgagacccctttctagggtgggctggcggcctgtgtctcgtgtcgccctatacaagagtgtccctacacggctcctgtcacgcgcttggggccgactgaatcaggttgagttgccccactggctgaggcggccagtctattctttgtatatttggaccttcggcgtgaatatgaaggaagcggcagtcgaagacctgcatcattaccggaacctctctgagtttttcagacggaagctgaaaccacaggcaaggcctgtgtgtggactccattcagtcatcagccccagcgacgggagaattctgaatttcggacaggtcaagaattgcgaagtggagcaagtgaagggggtcacgtactccctggagagtttcctgggcccaagaatgtgcactgaggacctgccctttcccccagcagccagctgtgactcttttaagaatcagctggtgacccgcgaaggcaacgaactgtatcattgcgtgatttatctggctcctggtgactaccattgctttcattcacctactgattggactgtgagccacaggcgacactttcccggtccagcccacaaacaacccaaagctcagcagggactactacagtag

SEQ ID NO: 277456 - DNA, 687 bp, Artificial Sequence
  derived and/or modified sequence
atgatgtgtcagtccgaagccaggcaaggcccagaattgcgcgcagccaaatggctgcatttcccccagcttgcattgagaaggcgcttaggtcagctctcttgcatgtcccgccctgctttgaagctacggtcctggcccctaacagtgttatactatctgctgccctttggcgcactacgtccattatccagggttggctggaggcccgtgagccgcgtcgcgctgtacaagagcgtgccaacacggctcctgtctagggcttggggtagactcaaccaggtggagctgcctcattggttaagaaggcctgtctatagtctatacatttggactttcggcgtcaacatgaaggaggccgcagtcgaagacctgcaccattaccgcaacctgtccgaattcttccgaagaaaactgaagccgcaggccagacccgtgtgcgggctgcactctgtgatctcacccagcgatggtcgaattcttaacttcgggcaggtaaagaattgcgaggttgaacaggttaagggcgtcacatactccctcgagtcatttctgggcccacggatgtgtaccgaagatttgccctttcccccagccgcatcatgtgattcattcaagaaccagctcgtgactcgtgagggaaatgagctctatcattgcgtgatttaccttgccccaggcgattag

SEQ ID NO: 277457 - DNA, 222 bp, Artificial Sequence
  derived and/or modified sequence
atgatgtgtcaatctgaagccaggcaggggccagaactgagagccgctaaatggttacactttccccagcttgccctgcgacggcgattaggacagctgtcttgtatgagccgacctgccttaaaactgcgttcatggcccttgacagtgctctactacttactgccttttggtgccttgaggcctttgtctagagtcggctggcgccctgtctccagatag

SEQ ID NO: 277458 - DNA, 222 bp, Artificial Sequence
  derived and/or modified sequence
atgatgtgccagagcgaagccaggcagggtcccgagctgcgagcggcaaaatggcttcatttcccacagctggctttaagaaggcgcctagggcagctttcctgcatgtctcggccagccctgaaacttcgatcttggccgctgaccgtcctgtactacctactgcccttcggcgctctgcgaccattgtcgcgggtaggatggaggccagtaagtcgctag

SEQ ID NO: 277459 - DNA, 246 bp, Artificial Sequence
  derived and/or modified sequence
atgatgtgccagtctgaagcgaggcagggccctgagctgcgcgcagccaagtggttacactttccacagctagccttacggaggcggctcgggcagctgtcctgcatgtcccgtcctgctctcaaattgcggtcctggcccttaaccgtcctctattaccttcttccttttggtgccctgagaccactgagcagagttgggtggcgtccagtttcacgcgtcgctctttataaatccgttccttag

SEQ ID NO: 277460 - DNA, 981 bp, Artificial Sequence
  derived and/or modified sequence
atgatgtgccagagtgaggccaggcagggacctgagctgcgcgcagcaaagtggttacacttcccacagctcgcactgcggagacgactgggccaactgagttgtatgtctcgtcccgctctgaaactgcggtcttggcctctgactgtcctctattatctgctcccttttggagctctccgaccgctgtctcgcgtgggatggagacccgtgagtagagtcgctctttacaagagcgtccctacccgcttgctgtcccgcgcatgggggaggctcaatcaggtcgagttaccacactggttgcgacggcctgtctatagcttatatatctggactttcggtgttaatatgaaagaggccgcagtggaggatttacaccactatcgcaatttatctgagtttttccgcagaaagctcaaaccccaggctaggcccgtctgcggtctccatagtgtcatcagccccagcgatgggaggattctgaactttggccaagtaaagaattgtgaagtggagcaagtgaaaggcgtgacatattccctggaatcctttttgggacctcggatgtgcactgaagacctcccctttcctccagcggcatcttgcgatagtttcaagaaccagcttgtaaccagggaaggcaatgaattgtatcattgcgtgatttatctagccccaggcgattatcactgtttccactctcctacagattggactgtcagccaccgacggcattttcctggctcactgatgagcgttaatccgggaatggcaaggtggattaaggagctcttttgccataatgagcgcgtagttctcaccggcgactggaagcacggattcttttccctaacagcagttggcgctacaaatgtcggctctattcgcatctattttgatcgggacttgcataccaactctccacgccactccaaggggtcctataatgatttctccgtcgtgggctcccttactaggtag

SEQ ID NO: 277461 - DNA, 1128 bp, Artificial Sequence
  derived and/or modified sequence
atgatgtgccagagcgaggccagacagggccccgagctgagagccgccaagtggctgcacttcccccagctggccctgagaagaagactgggccagctgagctgcatgagcagacccgccctgaagctgagaagctggcccctgaccgtgctgtactacctgctgcccttcggcgccctgagacccctgagcagagtgggctggagacccgtgagcagagtggccctgtacaagagcgtgcccaccagactgctgagcagagcctggggcagactgaaccaggtggagctgccccactggctgagaagacccgtgtacagcctgtacatctggaccttcggcgtgaacatgaaggaggccgccgtggaggacctgcaccactacagaaacctgagcgagttcttcagaagaaagctgaagccccaggccagacccgtgtgcggcctgcacagcgtgatcagccccagcgacggcagaatcctgaacttcggccaggtgaagaactgcgaggtggagcaggtgaagggcgtgacctacagcctggagagcttcctgggccccagaatgtgcaccgaggacctgcccttcccccccgccgccagctgcgacagcttcaagaaccagctggtgaccagagagggcaacgagctgtaccactgcgtgatctacctggcccccggcgactaccactgcttccacagccccaccgactggaccgtgagccacagaagacacttccccggcagcctgatgagcgtgaaccccggcatggccagatggatcaaggagctgttctgccacaacgagagagtggtgctgaccggcgactggaagcacggcttcttcagcctgaccgccgtgggcgccaccaacgtgggcagcatcagaatctacttcgacagagacctgcacaccaacagccccagacacagcaagggcagctacaacgacttcagcttcgtgacccacaccaacagagagggcgtgcccatgagaaagggcgagcacctgggcgagttcaacctgggcagcaccatcgtgctgatcttcgaggcccccaaggacttcaacttccagctgaagaccggccagaagatcagattcggcgaggccctgggcagcctgtag

SEQ ID NO: 277462 - DNA, 789 bp, Artificial Sequence
  derived and/or modified sequence
atgatgtgccagagcgaggccagacagggccccgagctgagagccgccaagtggctgcacttcccccagctggccctgagaagaagactgggccagctgagctgcatgagcagacccgccctgaagctgagaagctggcccctgaccgtgctgtactacctgctgcccttcggcgccctgagacccctgagcagagtgggctggagacccgtgagcagagtggccctgtacaagagcgtgcccaccagactgctgagcagagcctggggcagactgaaccaggtggagctgccccactggctgagaagacccgtgtacagcctgtacatctggaccttcggcgtgaacatgaaggaggccgccgtggaggacctgcaccactacagaaacctgagcgagttcttcagaagaaagctgaagccccaggccagacccgtgtgcggcctgcacagcgtgatcagccccagcgacggcagaatcctgaacttcggccaggtgaagaactgcgaggtggagcaggtgaagggcgtgacctacagcctggagagcttcctgggccccagaatgtgcaccgaggacctgcccttcccccccgccgccagctgcgacagcttcaagaaccagctggtgaccagagagggcaacgagctgtaccactgcgtgatctacctggcccccggcgactaccactgcttccacagccccaccgactggaccgtgagccacagaagacacttccccggccccgcccacaagcagcccaaggcccagcagggcctgctgcagtag

SEQ ID NO: 277463 - DNA, 687 bp, Artificial Sequence
  derived and/or modified sequence
atgatgtgccagagcgaggccagacagggccccgagctgagagccgccaagtggctgcacttcccccagctggccctgagaagaagactgggccagctgagctgcatgagcagacccgccctgaagctgagaagctggcccctgaccgtgctgtactacctgctgcccttcggcgccctgagacccctgagcagagtgggctggagacccgtgagcagagtggccctgtacaagagcgtgcccaccagactgctgagcagagcctggggcagactgaaccaggtggagctgccccactggctgagaagacccgtgtacagcctgtacatctggaccttcggcgtgaacatgaaggaggccgccgtggaggacctgcaccactacagaaacctgagcgagttcttcagaagaaagctgaagccccaggccagacccgtgtgcggcctgcacagcgtgatcagccccagcgacggcagaatcctgaacttcggccaggtgaagaactgcgaggtggagcaggtgaagggcgtgacctacagcctggagagcttcctgggccccagaatgtgcaccgaggacctgcccttcccccccgccgccagctgcgacagcttcaagaaccagctggtgaccagagagggcaacgagctgtaccactgcgtgatctacctggcccccggcgactag

SEQ ID NO: 277464 - DNA, 222 bp, Artificial Sequence
  derived and/or modified sequence
atgatgtgccagagcgaggccagacagggccccgagctgagagccgccaagtggctgcacttcccccagctggccctgagaagaagactgggccagctgagctgcatgagcagacccgccctgaagctgagaagctggcccctgaccgtgctgtactacctgctgcccttcggcgccctgagacccctgagcagagtgggctggagacccgtgagcagatag

SEQ ID NO: 277465 - DNA, 246 bp, Artificial Sequence
  derived and/or modified sequence
atgatgtgccagagcgaggccagacagggccccgagctgagagccgccaagtggctgcacttcccccagctggccctgagaagaagactgggccagctgagctgcatgagcagacccgccctgaagctgagaagctggcccctgaccgtgctgtactacctgctgcccttcggcgccctgagacccctgagcagagtgggctggagacccgtgagcagagtggccctgtacaagagcgtgccctag

SEQ ID NO: 277466 - DNA, 981 bp, Artificial Sequence
  derived and/or modified sequence
atgatgtgccagagcgaggccagacagggccccgagctgagagccgccaagtggctgcacttcccccagctggccctgagaagaagactgggccagctgagctgcatgagcagacccgccctgaagctgagaagctggcccctgaccgtgctgtactacctgctgcccttcggcgccctgagacccctgagcagagtgggctggagacccgtgagcagagtggccctgtacaagagcgtgcccaccagactgctgagcagagcctggggcagactgaaccaggtggagctgccccactggctgagaagacccgtgtacagcctgtacatctggaccttcggcgtgaacatgaaggaggccgccgtggaggacctgcaccactacagaaacctgagcgagttcttcagaagaaagctgaagccccaggccagacccgtgtgcggcctgcacagcgtgatcagccccagcgacggcagaatcctgaacttcggccaggtgaagaactgcgaggtggagcaggtgaagggcgtgacctacagcctggagagcttcctgggccccagaatgtgcaccgaggacctgcccttcccccccgccgccagctgcgacagcttcaagaaccagctggtgaccagagagggcaacgagctgtaccactgcgtgatctacctggcccccggcgactaccactgcttccacagccccaccgactggaccgtgagccacagaagacacttccccggcagcctgatgagcgtgaaccccggcatggccagatggatcaaggagctgttctgccacaacgagagagtggtgctgaccggcgactggaagcacggcttcttcagcctgaccgccgtgggcgccaccaacgtgggcagcatcagaatctacttcgacagagacctgcacaccaacagccccagacacagcaagggcagctacaacgacttcagcgtggtgggcagcctgaccagatag

SEQ ID NO: 277467 - protein, 874 aa, Artificial Sequence
  derived and/or modified sequence
MGKAAAPSRGGGCGGRSRGLSSLFTVVPCLSCHTAAPGMSASTSGSGPEPKPQPQPVPEPERGPLSEQVSEAVSEAVPRSEPVSETTSEPEPGAGQPSELLQGSRPGSESSSGVGAGPFTKAASEPLSRAVGSATFLRPESGSLPALKPLPLLRPGQAKTPLGVPMSGTGTTSSAPLALLPLDSFEGWLLKWTNYLKGYQRRWFVLGNGLLSYYRNQGEMAHTCRGTINLSTAHIDTEDSCGILLTSGARSYHLKASSEVDRQQWITALELAKAKAVRVMNTHSDDSGDDDEATTPADKSELHHTLKNLSLKLDDLSTCNDLIAKHGAALQRSLTELDGLKIPSESGEKLKVVNERATLFRITSNAMINACRDFLELAEIHSRKWQRALQYEQEQRVHLEETIEQLAKQHNSLERAFHSAPGRPANPSKSFIEGSLLTPKGEDSEEDEDTEYFDAMEDSTSFITVITEAKEDSRKAEGSTGTSSVDWSSADNVNFNEPLSMLQRLTEDLEYHHLLDKAVHCTSSVEQMCLVAAFSVSSYSTTVHRIAKPFNPMLGETFELDRLDDMGLRSLCEQVSHHPPSAAHYVFSKHGWSLWQEITISSKFRGKYISIMPLGAIHLEFQASGNHYVWRKSTSTVHNIIVGKLWIDQSGDIEIVNHKTNDRCQLKFLPYSYFSKEAARKVTGVVSDSQGKAHYVLSGSWDEQMECSKVMHSSPSSPSSDGKQKTVYQTLSAKLLWKKYPLPENAENMYYFSELALTLNEHEEGVAPTDSRLRPDQRLMEKGRWDEANTEKQRLEEKQRLSRRRRLEACGPGSSCSSEEGEAGREGRPGGEERGARVGVPQGRIPGEQATSPPTSPLCLPSREGGGCLHATVV

SEQ ID NO: 277468 - DNA, 2625 bp, Artificial Sequence
  derived and/or modified sequence
atgggtaaggccgctgctccttcgcgaggtggaggatgtggagggcgcagccgcggactgtcctctctgtttacagtggtcccttgcctgtcctgtcatactgccgcacccggcatgtccgccagcaccagtgggagcggcccagagccgaagcctcaacctcagcccgttcctgagccagagcgcggccctctgtcagagcaagtgtctgaagccgtgtctgaggctgttccgcgcagtgagccagtgtcagaaacgacatccgaacctgaacccggcgccggccagcctagcgaactcctgcaggggtctcgtcccggctctgaatctagcagcggcgtgggggcaggaccgttcactaaagcagcttccgaacccctttcaagggcggttggctccgcaacgtttctgcggcctgaaagtggctcattacccgcattgaagcccctgcccctgctgaggccaggccaggccaaaacgccgctgggcgtccctatgtctggcaccggtaccacctcctctgcccccctggccctcctacctttggactccttcgaggggtggttgttaaagtggaccaactatttgaagggataccagcgaagatggtttgtgttaggtaatggtcttctgtcgtactaccggaaccagggggagatggcacatacttgcagggggacaattaacctgtccaccgcccacattgacacagaggatagctgtggcatccttttgacctccggggctaggtcttatcacttgaaggcctcttctgaagttgataggcaacagtggatcaccgccctagagctagccaaggccaaagcggtccgcgtcatgaatacccactctgacgattcaggtgatgacgatgaggctacaacccctgccgacaaatctgaattgcatcatactctgaagaacctgagccttaagttagacgacctgtctacgtgtaacgacctgatcgccaagcacggtgccgccttacaaaggtccctcacagagctggacggacttaaaatcccctctgagagcggggagaagcttaaggtcgttaatgagagggcaacccttttcagaattacgtcgaacgcgatgatcaacgcctgtagggactttctggagttagccgagatccatagcaggaagtggcagcgggcattacagtacgagcaggagcagagggtgcacctggaggagaccatcgagcaactggccaaacagcacaacagtcttgaacgcgctttccactctgcccccgggcgaccagcgaaccctagtaagtcctttatcgaggggtccctgctgactcccaagggcgaagactccgaggaggacgaggacacagagtattttgatgccatggaagactctacttctttcataactgtgatcaccgaggccaaggaagattcgcggaaggcagaggggtccaccggcacaagctcagtggattggtcttccgcagacaatgtgaacttcaatgagccgctgtcaatgttacagcgtctcacagaagacctagaataccatcaccttctggataaagctgtgcactgcacatctagcgtggaacagatgtgcctggtggccgccttctccgtgagcagctatagcacaacagtacaccggatcgccaaacccttcaaccctatgctgggtgagacttttgagcttgaccgacttgacgatatggggctgcggagcctgtgcgagcaggtatcgcaccaccctccctccgcagcacattacgttttcagcaaacatggttggagcttgtggcaagagattaccattagttcaaagtttaggggtaagtacataagtataatgccactcggcgccattcacctggaattccaagcgagcgggaatcactatgtatggcgaaagtccacctcaaccgtgcacaacatcatcgtcgggaagctgtggatagatcagtccggcgacatcgagattgtgaatcacaagaccaacgatcggtgccagttaaagttcttaccttacagctacttctccaaggaagctgcacggaaggtgactggcgtcgtgagcgacagccaggggaaggcacactatgttctgtccggcagctgggatgaacagatggaatgctcaaaagtgatgcatagtagcccgagcagtcccagtagcgacggaaagcagaaaacagtctaccaaacattgagtgcaaaattgctgtggaagaagtatcctctgcccgagaatgcagaaaatatgtactatttcagcgagctcgcactgaccctgaacgagcatgaagagggcgtggccccaacagactctaggttaaggccagatcaaagactaatggagaaagggcggtgggatgaggctaataccgagaaacagcgcctagaggagaaacaacggttgagcaggcgccggcgtctggaagcctgtgggcctggatcatcatgcagctcagaagagggggaagccggacgcgaaggccggcctggaggcgaggagcgaggagcacgcgtgggcgttccccagggaagaatccccggagagcaggcaacttccccaccgaccagccccctgtgcctccccagccgcgaaggaggaggatgcctgcatgccaccgtggtgtag

SEQ ID NO: 277469 - DNA, 2625 bp, Artificial Sequence
  derived and/or modified sequence
atgggcaaggctgctgcccccagccggggcggcggctgcggcggccgcagccggggcctgagcagcctcttcaccgtggtgccctgcctgagctgccacacagctgcccctggcatgtctgccagcaccagcggcagcggccctgagcccaagccccagccccagcctgtgcctgagcctgagcggggccccctgtctgagcaggtgtctgaggccgtgtctgaggccgtgcccaggtctgagcctgtgtctgagaccaccagcgagcctgagcccggggccggccagcccagcgagctgctgcagggcagccggcccggcagcgagagcagcagcggcgtgggcgccggccccttcaccaaggccgccagcgagcccctgagcagagctgtgggcagcgccaccttcctgcggcctgagagcggcagcctgcctgccctgaagcccctgcccctgctgcggcccggccaggccaagacccccctgggcgtgcccatgtctggaacaggcaccaccagcagcgcccccctggccctgctgcccctggacagctttgagggctggctgctgaagtggaccaactacctgaagggctaccagaggcgctggtttgtgctgggcaatggcctgctgagctactacagaaaccagggcgagatggcccacacctgccggggcaccatcaacctgagcacagcccacatcgacacagaggacagctgtggcatcctgctgaccagcggggcccggagctaccacctgaaggccagcagcgaggtggaccggcagcagtggatcacagccctggagctggccaaggccaaggctgtgcgggtgatgaacacccacagtgatgattctggagatgatgatgaggccaccaccccagctgacaagtctgagctgcaccacaccctgaagaacctgagcctgaagctggatgacctgagcacctgcaatgacctgattgccaagcacggggccgccctgcagaggagcctgacagagctggatggcctgaagatccccagcgagagcggggagaagctgaaggtggtgaatgaaagagccaccctcttccgcatcaccagcaatgccatgatcaatgcctgccgggacttcctggagctggccgagatccacagcaggaagtggcagagggccctgcagtatgagcaggagcagagggtgcacctggaggagaccatcgagcagctggccaagcagcacaacagcctggagcgggccttccacagcgcccctggccggcctgccaaccccagcaagagcttcatcgagggcagcctgctgacccccaagggggaggacagcgaggaggatgaggacacagagtactttgatgccatggaggacagcaccagcttcatcaccgtcatcacagaggccaaggaggacagcaggaaggccgagggcagcacaggcaccagctctgtggactggagcagcgctgacaacgtgaacttcaatgagcccctgtccatgctgcagaggctgacagaggacctggagtaccaccacctgctggacaaggctgtgcactgcaccagctctgtggagcagatgtgcctggtggccgccttctctgtgagcagctacagcaccaccgtgcaccgcatcgccaagcccttcaaccccatgctgggggagacctttgagctggaccggctggatgacatgggcctgcggagcctgtgtgagcaggtgagccaccaccccccatctgctgcccactacgtgttcagcaagcacggctggagcctgtggcaggagatcaccatcagcagcaagttccggggcaagtacatcagcatcatgcccctgggcgccatccacctggagttccaggccagcggcaaccactacgtgtggaggaagagcaccagcacagtgcacaacatcatcgtgggcaagctgtggattgaccagagcggggacattgaaattgtgaaccacaagaccaatgaccgctgccagctgaagttcctgccctacagctacttcagcaaggaggccgccaggaaggtgactggagtggtgtctgacagccagggcaaggcccactacgtgctgagcggctcctgggatgagcagatggagtgcagcaaggtgatgcacagcagccccagcagccccagcagtgatggcaagcagaagacagtgtaccagaccctgagcgccaagctgctgtggaagaagtaccccctgcctgaaaatgctgagaacatgtactacttcagcgagctggccctgaccctgaatgagcacgaggagggcgtggcccccacagacagccggctgcggccagaccagaggctgatggagaagggccgctgggatgaggccaacacagagaagcagaggctggaggagaagcagaggctgagcagaagaagaaggctggaggcctgtggccctggcagcagctgcagcagcgaggagggggaggccggccgggagggccggcctggaggagaggagcggggggcccgggtgggcgtgccccagggccgcatccctggagagcaggccaccagcccccccaccagccccctgtgcctgcccagccgggagggcggcggctgcctgcacgccaccgtggtgtag

SEQ ID NO: 277470 - DNA, 2625 bp, Artificial Sequence
  derived and/or modified sequence
atgggcaaggccgccgcccccagccggggcggcggctgcggcggcagaagccgcggactgagctctttattcactgtcgtgccctgcttatcctgtcacaccgctgcacccggcatgtccgccagcactagtggctcagggcccgaacctaagccacagccccagcccgtccccgaacctgagagagggcctttaagtgagcaagtgtctgaagccgtgagcgaggccgtgcccaggagcgaacccgtctccgagacaacctccgagcccgagcctggcgcaggacagccttctgagctgctgcaggggagccggccaggatctgagagttccagcggcgtcggcgccggcccattcacaaaggcggctagtgaaccattatcaagagccgttggatccgctaccttcctgcggcctgaatccgggagcctacccgcactgaagccacttcccctactcaggccaggtcaggccaagacccccctaggggtgccaatgtcaggtacaggcaccacctcctcagcccctctcgcactcctccccctggattcttttgagggttggctgctcaagtggacaaattacttaaagggctatcagagacggtggttcgtccttggcaacgggttgctgagctactaccggaatcaaggtgaaatggcccacacctgccgcggaacgattaacttgagcactgcacacatcgacacagaagactcttgcggaatcttgctcacatccggtgcgcgtagttaccatttaaaagcttccagcgaagttgatcggcaacagtggattacagccctcgagctggcgaaggccaaggccgttcgcgttatgaacacccattccgacgattctggcgacgatgatgaggccacgactccggcagataaatcagagctccaccacacactgaagaacctgtccctgaagctggatgacctttctacttgtaacgatctgattgccaaacacggggcagctctgcagaggtccctgacagagctggatgggctgaaaatcccgtccgaatccggcgagaagttgaaggtcgtaaacgaacgcgctacactgtttcgcataacaagcaacgccatgataaatgcttgccgagattttctcgagttggcagagattcatagccgaaagtggcagcgggcacttcagtacgagcaggagcagcgggtgcacttggaagagactattgagcaactcgccaagcagcacaactcattggaaagagcttttcactctgcacctggcagacccgccaacccttctaagtccttcattgagggcagcctgctgaccccaaagggagaggatagcgaagaggacgaggacaccgagtattttgatgctatggaggattcgaccagcttcattactgttattaccgaggctaaagaggacagtaggaaagcggaggggtcaactggaacttcctccgtggactggtcttccgctgataatgtgaatttcaatgaaccattgtccatgttgcaacggttaacggaagatcttgagtaccaccacttgctcgataaagctgttcactgtacaagctccgttgagcagatgtgcctggtggcagctttctcggtctcttcctatagcacaacagttcataggattgctaagcctttcaaccctatgctgggtgagaccttcgagcttgaccgtctcgacgacatgggcttgcgctccctgtgcgaacaggtatctcatcaccctcctagcgcagcacattatgtattctccaagcacggatggtcactctggcaggaaatcacaatcagttccaaatttcgtggcaagtatataagtattatgcccctaggcgcaatacacttggagttccaggctagtgggaaccattacgtttggcgcaaaagcacatcaactgttcacaatatcatcgtgggcaagctgtggatcgatcagtccggcgacattgagatcgtgaaccacaaaactaacgataggtgccagcttaaattcctgccatatagttatttttccaaagaggctgcgagaaaggtgaccggagtagtgtcagactctcagggcaaggcccactacgtgctatccgggtcatgggatgagcagatggagtgtagcaaagtgatgcactctagtccatctagcccaagctccgacggcaagcagaagacagtttaccaaacgttgtcggcaaaactgttgtggaaaaaataccctctccccgaaaacgccgagaacatgtattatttctccgagctagctctgacacttaacgaacatgaagaaggtgtggcgcctactgacagcaggttgcgcccagaccagcgcttaatggaaaaaggccgttgggatgaagcaaatactgaaaagcagaggctggaggaaaagcagaggctgtctaggagaagacggctcgaggcatgtggtcccggtagctcctgttcctcagaagagggagaggccggtagagaaggacgtccaggaggcgaagagcgcggtgcacgcgtgggggttccccagggcagaatccccggtgagcaagcaactagccctcccacatcccctctttgcttgccttctagggaagggggaggatgccttcatgcaactgtagtgtag

SEQ ID NO: 277471 - DNA, 2992 bp, Artificial Sequence
  derived and/or modified sequence
actggccgctcggccgcgcgcgggtcggccggctctatggggaaagcggcggctccgagccgaggcggcggctgtggcggccgctcccgcgggctctcgtcgctgttcacggttgtcccctgcctgtcgtgccacacggcggcgccgggcatgagcgcttccacgtccggctccgggccggagcccaagccccagccccagcccgtgcccgaaccggagcggggaccgctgtcagaacaggtgtcggaggcagtttcggaggcagtgccaagatcggaacctgtgtccgagacgacgtctgagccggagccaggggctgggcagccatcggaactgctgcaggggtcgcggccggggtcagagtcaagctcaggtgtaggggctgggcccttcactaaggccgcatcggagccgctctcccgggcggtggggagcgcgacctttctcagacccgagtcaggatcgctgccagcgttaaagcccctgcctcttctgcgaccaggacaggcgaagactcctcttggggttccaatgtcggggactggcacgacctccagtgccccactggccttactgcctctggacagcttcgagggctggcttctcaagtggaccaactatctgaagggctaccagcgccgctggttcgtgctgggcaatggtttgctctcttactacagaaatcagggtgaaatggcccacacgtgccgtggaaccatcaacctgtccaccgcgcacattgacacggaggactcttgtggtatcttgctgaccagtggggccaggagctaccacctcaaggccagctcagaggtggaccggcagcagtggatcaccgccctggagctggccaaggccaaggctgtccgcgtgatgaacactcattcagatgactctggggacgacgacgaggctaccaccccagccgacaagagcgagctgcaccacaccctgaagaatctttccctgaagttagatgacctcagcacgtgcaatgacctcatcgccaagcacggcgctgcactccagcgctccctgacagagctggacggcctcaagatcccatctgagagtggggagaagctgaaggtggtgaatgagcgggccaccctcttccgcatcacatccaatgctatgatcaacgcctgcagggacttcttggaactagcagagatacacagtcggaaatggcagcgggcactgcagtatgagcaggagcagcgcgtgcacttggaggaaaccattgagcagctggcgaagcagcacaacagcctcgagcgggccttccacagtgcccctggccggccggccaacccctccaagagcttcattgagggaagcctcttgactcccaaaggagaggacagtgaggaagatgaagataccgagtactttgatgccatggaagactccacatccttcatcaccgtgatcaccgaggccaaggaagacagcagaaaagctgaaggtagcaccgggacaagttccgtggactggagctcagcagacaatgtgaacttcaatgagcccctgtccatgctccagcggctgacagaggacctggagtaccaccacctgctggacaaggcagtgcactgcaccagctcagtggagcagatgtgcctggtggccgccttctctgtgtcctcctactccaccacagtgcaccgcatcgccaagcccttcaaccccatgctgggggagaccttcgagctggaccgcctcgacgacatgggcctgcgctccctctgtgagcaggtgagccaccaccccccctcagctgcgcactacgtgttctccaagcatggctggagcctctggcaggagatcaccatctccagcaagttccggggaaaatacatctccatcatgccgctaggtgccatccacttagaattccaggccagtgggaatcactacgtgtggaggaagagcacctcaactgttcacaacatcatcgtgggcaagctctggatcgaccagtcaggggacatcgagattgtgaaccataagaccaatgaccggtgccagctgaagttcctgccctacagctacttctccaaagaggcagcccggaaggtgacaggagtggtgagtgacagccagggcaaggcccattacgtgctgtccggctcgtgggatgaacaaatggagtgctccaaggtcatgcatagcagtcccagcagccccagctctgacgggaagcagaagacagtgtaccagaccctgtcagccaagctgctgtggaagaagtacccgctgccggagaacgcggagaacatgtactacttctcagagctggccctgaccctcaacgagcacgaggagggcgtagcgccaaccgacagccgcctgcggcccgaccagcggctgatggagaagggccgttgggacgaggccaataccgagaagcagcggctggaggagaagcagcgcctgtcgcggcgccggcggctggaggcctgcgggccgggcagcagctgcagctcggaggaaggtgaggccgggcgggaagggcgccccggaggggaggaaaggggtgcccgggtgggggtgccgcagggacggattccgggggagcaggccacaagcccacccaccagcccactgtgcctgcccagcagagaaggaggcggatgcctacacgccactgtggtttgagaagaggctggatccgctgaccggggagatggcctgtgtgtacaagggcggctactgggaggccaaggagaagcaagactggcatatgtgccccaacatcttctgagcgccacccttgcaacaaatacaggcgcctgcacagcctggcccacctgttcattaatgcactcaatttagtactgaatggtctttctcccagcccattcccagcccttcctatttcctttcctattttttttttctccccacactttcttgggactcccaccttggaaggaggaagggctgacctgggttctctccagcccccaggtgcgccgggtcacccgtg

SEQ ID NO: 277472 - DNA, 2625 bp, Artificial Sequence
  derived and/or modified sequence
atgggaaaggccgcagctccttctcggggtggcggatgtggtgggaggtcaagaggcctgtccagcttgttcacagtggtcccatgcttatcttgtcacacagctgcacctggaatgagcgcctcaacttccggcagtggaccagagccaaagccgcaaccccagccagtgccagagccagaaaggggtccactaagcgagcaggtctcagaagctgtcagcgaggccgtcccccgatctgaacctgtatcagaaaccacctccgagccggaacctggggctggacagccttctgaattgctgcagggatctcgacctggcagcgaaagcagcagcggggtcggcgctggcccatttacaaaagctgctagcgaaccattgagcagagccgtgggctccgctaccttcctgcggccagagtcgggaagtttaccggctctgaagccgctgccactgcttaggccaggccaagcaaagacgccattaggggtgcccatgtcgggaaccgggacgacctcaagtgccccactggctctcctgccactggacagtttcgagggatggttgctcaaatggaccaactacctcaagggctatcagagacgttggtttgtgctcggtaacggtctcctaagctactatcggaaccagggggaaatggctcacacctgtcgcggaaccattaatctctctacagcccatattgacaccgaggattcctgcgggatacttctcaccagcggcgctaggtcctaccatctgaaagcaagctctgaggtcgaccgccagcagtggatcaccgctctggaattggctaaggctaaggcagtcagagtgatgaatacacatagcgatgactccggggacgatgacgaggcaactactcccgctgacaagagtgaactgcaccacacacttaagaatctatcactgaagttggacgacttgtctacctgtaatgatctaatcgctaaacatggagccgctctgcagaggtccctgaccgagctagatggtctcaaaatacccagcgaatccggagaaaaactgaaggtcgttaacgagagagctaccctctttagaataacgtcgaatgcaatgatcaacgcctgcagagacttcctggagctggctgagatccactctcggaagtggcagcgggctttgcagtacgagcaggagcaaagggtccatctggaggaaacaattgaacagctggccaaacagcataattcacttgagcgggcttttcacagtgcccctgggcgtccagctaacccctccaagtcatttattgaaggttctttactcacccccaagggagaggatagcgaggaggacgaggatactgaatacttcgatgcgatggaggattctacctctttcatcactgttattactgaggcaaaagaagattcccggaaagctgaaggctccaccggtacctccagtgtcgactggagtagcgcagacaacgtgaacttcaatgaacccctcagtatgctccagcggctcaccgaggacttagagtaccaccaccttctcgacaaagccgtccactgcacatcctctgtcgagcagatgtgcctcgtagccgctttttcggtgtcctcttattctaccactgtccatcgtatagccaagcccttcaatcctatgctaggcgagacttttgaattggaccgcctggacgacatgggactccgttctctgtgtgagcaggttagccaccacccgccaagcgcagcacactatgtgttctctaaacacggctggtccctgtggcaggaaattactattagcagcaaattccgtggcaagtatatctcaataatgccgctgggcgctatacatttggaattccaggcctctggtaaccattacgtgtggcggaagtcaacgagcaccgtgcacaatatcattgttggaaaactctggatcgaccagagcggtgacattgagatcgtgaatcacaaaacgaacgatagatgtcagcttaaattccttccatactcctacttttccaaggaagcagctcgaaaggtgaccggagtagtgtccgatagtcagggcaaggcacattatgtattgtccggtagctgggacgaacagatggagtgcagcaaagtcatgcacagtagtccaagcagtccctcttccgatggcaaacagaagaccgtgtatcagaccctctccgcgaaactcctatggaaaaagtatcccctccccgagaacgccgaaaatatgtactactttagtgagcttgctctgactcttaacgaacacgaggaaggggtagccccaaccgactccagattacggcctgatcaaaggttgatggagaagggcagatgggacgaagctaacacagaaaagcaaagactggaggagaagcagcgactgagccggaggcggaggcttgaggcctgcgggcctggtagcagctgcagctccgaagaaggagaagccggtcgggaaggtcgccctggaggagaagaacggggagctcgagtgggcgtcccacaggggagaatcccaggcgagcaggccaccagcccacctaccagcccgctgtgcctaccgagtcgtgagggtggagggtgcctccacgcaaccgtggtgtag

SEQ ID NO: 277473 - DNA, 2625 bp, Artificial Sequence
  derived and/or modified sequence
atgggcaaggccgccgcccccagcagaggcggcggctgcggcggcagaagcagaggcctgagcagcctgttcaccgtggtgccctgcctgagctgccacaccgccgcccccggcatgagcgccagcaccagcggcagcggccccgagcccaagccccagccccagcccgtgcccgagcccgagagaggccccctgagcgagcaggtgagcgaggccgtgagcgaggccgtgcccagaagcgagcccgtgagcgagaccaccagcgagcccgagcccggcgccggccagcccagcgagctgctgcagggcagcagacccggcagcgagagcagcagcggcgtgggcgccggccccttcaccaaggccgccagcgagcccctgagcagagccgtgggcagcgccaccttcctgagacccgagagcggcagcctgcccgccctgaagcccctgcccctgctgagacccggccaggccaagacccccctgggcgtgcccatgagcggcaccggcaccaccagcagcgcccccctggccctgctgcccctggacagcttcgagggctggctgctgaagtggaccaactacctgaagggctaccagagaagatggttcgtgctgggcaacggcctgctgagctactacagaaaccagggcgagatggcccacacctgcagaggcaccatcaacctgagcaccgcccacatcgacaccgaggacagctgcggcatcctgctgaccagcggcgccagaagctaccacctgaaggccagcagcgaggtggacagacagcagtggatcaccgccctggagctggccaaggccaaggccgtgagagtgatgaacacccacagcgacgacagcggcgacgacgacgaggccaccacccccgccgacaagagcgagctgcaccacaccctgaagaacctgagcctgaagctggacgacctgagcacctgcaacgacctgatcgccaagcacggcgccgccctgcagagaagcctgaccgagctggacggcctgaagatccccagcgagagcggcgagaagctgaaggtggtgaacgagagagccaccctgttcagaatcaccagcaacgccatgatcaacgcctgcagagacttcctggagctggccgagatccacagcagaaagtggcagagagccctgcagtacgagcaggagcagagagtgcacctggaggagaccatcgagcagctggccaagcagcacaacagcctggagagagccttccacagcgcccccggcagacccgccaaccccagcaagagcttcatcgagggcagcctgctgacccccaagggcgaggacagcgaggaggacgaggacaccgagtacttcgacgccatggaggacagcaccagcttcatcaccgtgatcaccgaggccaaggaggacagcagaaaggccgagggcagcaccggcaccagcagcgtggactggagcagcgccgacaacgtgaacttcaacgagcccctgagcatgctgcagagactgaccgaggacctggagtaccaccacctgctggacaaggccgtgcactgcaccagcagcgtggagcagatgtgcctggtggccgccttcagcgtgagcagctacagcaccaccgtgcacagaatcgccaagcccttcaaccccatgctgggcgagaccttcgagctggacagactggacgacatgggcctgagaagcctgtgcgagcaggtgagccaccacccccccagcgccgcccactacgtgttcagcaagcacggctggagcctgtggcaggagatcaccatcagcagcaagttcagaggcaagtacatcagcatcatgcccctgggcgccatccacctggagttccaggccagcggcaaccactacgtgtggagaaagagcaccagcaccgtgcacaacatcatcgtgggcaagctgtggatcgaccagagcggcgacatcgagatcgtgaaccacaagaccaacgacagatgccagctgaagttcctgccctacagctacttcagcaaggaggccgccagaaaggtgaccggcgtggtgagcgacagccagggcaaggcccactacgtgctgagcggcagctgggacgagcagatggagtgcagcaaggtgatgcacagcagccccagcagccccagcagcgacggcaagcagaagaccgtgtaccagaccctgagcgccaagctgctgtggaagaagtaccccctgcccgagaacgccgagaacatgtactacttcagcgagctggccctgaccctgaacgagcacgaggagggcgtggcccccaccgacagcagactgagacccgaccagagactgatggagaagggcagatgggacgaggccaacaccgagaagcagagactggaggagaagcagagactgagcagaagaagaagactggaggcctgcggccccggcagcagctgcagcagcgaggagggcgaggccggcagagagggcagacccggcggcgaggagagaggcgccagagtgggcgtgccccagggcagaatccccggcgagcaggccaccagcccccccaccagccccctgtgcctgcccagcagagagggcggcggctgcctgcacgccaccgtggtgtag

SEQ ID NO: 277474 - protein, 324 aa, Artificial Sequence
  derived and/or modified sequence
MPTTPVKAKRVSTFQEFESNTSDAWDAGEDDDELLAMAAESLNSEVVMETANRVLRNHSQRQGRPTLQEGPGLQQKPRPEAEPPSPPSGDLRLVKSVSESHTSCPAESASDAAPLQRSQSLPHSATVTLGGTSDPSTLSSSALSEREASRLDKFKQLLAGPNTDLEELRRLSWSGIPKPVRPMTWKLLSGYLPANVDRRPATLQRKQKEYFAFIEHYYDSRNDEVHQDTYRQIHIDIPRMSPEALILQPKVTEIFERILFIWAIRHPASGYVQGINDLVTPFFVVFICEYIAFPGCGRPQIPILAVIWRDEPYPRTDEQIILRR

SEQ ID NO: 277475 - DNA, 975 bp, Artificial Sequence
  derived and/or modified sequence
atgcccaccacccccgtgaaggccaagagagtgagcaccttccaggagttcgagagcaacaccagcgacgcctgggacgccggcgaggacgacgacgagctgctggccatggccgccgagagcctgaacagcgaggtggtgatggagaccgccaacagagtgctgagaaaccacagccagagacagggcagacccaccctgcaggagggccccggcctgcagcagaagcccagacccgaggccgagccccccagcccccccagcggcgacctgagactggtgaagagcgtgagcgagagccacaccagctgccccgccgagagcgccagcgacgccgcccccctgcagagaagccagagcctgccccacagcgccaccgtgaccctgggcggcaccagcgaccccagcaccctgagcagcagcgccctgagcgagagagaggccagcagactggacaagttcaagcagctgctggccggccccaacaccgacctggaggagctgagaagactgagctggagcggcatccccaagcccgtgagacccatgacctggaagctgctgagcggctacctgcccgccaacgtggacagaagacccgccaccctgcagagaaagcagaaggagtacttcgccttcatcgagcactactacgacagcagaaacgacgaggtgcaccaggacacctacagacagatccacatcgacatccccagaatgagccccgaggccctgatcctgcagcccaaggtgaccgagatcttcgagagaatcctgttcatctgggccatcagacaccccgccagcggctacgtgcagggcatcaacgacctggtgacccccttcttcgtggtgttcatctgcgagtacatcgccttccccggctgcggcagaccccagatccccatcctggccgtgatctggagagacgagccctaccccagaaccgacgagcagatcatcctgagaagatag

SEQ ID NO: 277476 - DNA, 975 bp, Artificial Sequence
  derived and/or modified sequence
atgccgacgacacccgtgaaggcaaagagagtttctacgtttcaggagtttgaaagtaacaccagcgacgcctgggacgccggagaagacgatgatgaactactggcgatggctgcagaatcactcaactccgaggtggttatggagacagccaaccgagttctgcgaaaccatagccaacggcaagggagacccacactacaggagggcccaggtctgcagcagaagccacgccctgaggcagaacctccttctcctccatcaggcgatctacggctcgtgaagtccgtgagtgagtctcacaccagctgcccggccgagtcggcgtccgacgctgcaccactccagagaagtcaaagccttcctcactccgccacagtcaccctgggaggcacctctgatccttccaccctgtccagttctgccctgagcgaaagagaagcatcgcgactggataagttcaagcagctactggcaggacctaacactgatctcgaggagctgaggcggctgtcctggtcaggcattccaaagcctgtgagaccaatgacttggaagctgttgtccggttatctgcccgccaatgtggatcgcaggcctgctactctacagagaaaacaaaaggagtacttcgccttcatcgaacactattacgactctcgcaacgatgaagtccaccaggacacctataggcagattcatattgacattcctaggatgtctcccgaggccttgatcctacagcccaaggtgacggaaatttttgagagaattcttttcatttgggccatcagacatcccgcgtctggttacgttcaagggatcaatgaccttgtcacccctttctttgtcgtctttatatgtgagtatattgcttttcctgggtgcggcaggccacagatcccaatcctggctgtcatttggcgagacgaaccatatcccaggactgacgaacaaatcattctccggcggtag

SEQ ID NO: 277477 - DNA, 975 bp, Artificial Sequence
  derived and/or modified sequence
atgcccaccacccctgtgaaggccaagagggtgtccaccttccaggagtttgagagcaacaccagtgatgcctgggatgctggagaagatgatgatgagctgctggccatggctgctgagagcctgaacagcgaggtggtgatggagacagccaacagagtgctgaggaaccacagccagaggcagggccggcccaccctgcaggagggccctggcctgcagcagaagcccaggcctgaggccgagccccccagcccccccagcggggacctgcggctggtgaagtctgtgtctgagagccacaccagctgcccagctgagagcgccagtgatgctgcccccctgcagaggagccagagcctgccccacagcgccaccgtgaccctgggcggcaccagtgaccccagcaccctgagcagcagcgccctgtctgagcgggaggccagccggctggacaagttcaagcagctgctggccggccccaacacagacctggaggagctgcggcggctgtcctggagcggcatccccaagcctgtgcggcccatgacctggaagctgctgagcggctacctgcctgccaacgtggaccggcggcctgccaccctgcagaggaagcagaaggagtactttgccttcatcgagcactactatgacagcagaaatgatgaggtgcaccaggacacctaccggcagatccacatcgacatccccaggatgagccctgaggccctgatcctgcagcccaaggtgacagagatctttgagcgcatcctcttcatctgggccatccgccacccagccagcggctacgtgcagggcatcaatgacctggtgacccccttctttgtggtgttcatctgtgagtacatcgccttccctggctgcggccggccccagatccccatcctggccgtcatctggagagatgagccctaccccaggacagatgagcagatcatcctgcggaggtag

SEQ ID NO: 277478 - DNA, 975 bp, Artificial Sequence
  derived and/or modified sequence
atgcccaccacccccgtgaaggccaagcgggtgagcaccttccaggagtttgaaagcaatacgagcgatgcctgggatgccggagaggacgacgacgagttacttgcaatggctgccgaaagcctgaatagcgaggtggtgatggagactgctaatcgggtgctgcgaaaccatagtcagcgacagggacggcccacgctgcaggaagggcccggcctgcagcagaagccaagacccgaagctgaaccccccagtcctccatctggcgatctccgccttgtgaagtctgtgagtgaaagccatacctcctgtcctgctgagagcgcatcagatgccgctcccttgcagaggtcccagtcattgccccattcggccaccgtcacactcggcggaacttcagatccaagcactctatcatcctcagccctgagcgaacgggaggccagccgactcgacaaatttaaacagttgctcgcaggccctaataccgacttggaagagttgagaagactcagctggagcggtatacctaaaccagtgagaccaatgacgtggaaattattgagcggctatctccccgcgaatgtggataggcggcccgccaccctgcaacgtaaacagaaagaatatttcgcgtttatcgagcactattatgattccaggaacgacgaagtccatcaggatacctacagacagatccacattgacatccccaggatgtctcctgaagccttgatcttacagccaaaggtaactgaaatctttgagaggattctgtttatctgggctatcaggcaccccgcaagcggatacgtccaggggataaatgatcttgttaccccgttctttgtggtgttcatttgcgagtacatcgccttcccaggttgcggcagacctcagatacctattctggctgtgatatggagggatgagccctatccacgcacagacgagcagatcatcctgaggaggtag

SEQ ID NO: 277479 - DNA, 975 bp, Artificial Sequence
  derived and/or modified sequence
atgccgacaacccctgtgaaagcaaagcgcgtctcaacctttcaagaatttgagtctaacacatccgatgcatgggatgctggcgaggatgacgacgagttattggcgatggctgccgagtcactgaattccgaggtcgttatggagacagcaaacagagtgctcagaaatcattcccagcgtcaaggcaggccaactctgcaagaaggacctggtcttcaacagaaaccacggcctgaggccgaaccaccttctccacctagtggggatctccggctggtgaagtcagtgagcgaaagccacactagttgtcctgctgaatccgccagtgatgccgctcccttacagcggagtcagagcctgccacatagcgctaccgtgacactgggaggtacatctgatccctccacgcttagttcttctgcgctgtctgaacgagaggcatctagactagataagttcaagcagctgttggccggaccaaatacggacctggaggaactccgcaggctctcgtggtcaggcattccgaagcctgtccgacctatgacctggaagctgttaagcggctacttgccggcaaacgtagacagacgtcccgcaacattgcagagaaaacagaaagagtattttgccttcattgaacattactatgactcaaggaacgatgaggtgcaccaagatacgtatcggcaaatccatatcgatataccgaggatgtcccctgaggccttgatcttgcagccaaaagtgacagagattttcgagcgcatcttgtttatctgggcaatccgccacccagccagcggatatgtccaggggatcaatgacctcgtaacaccattcttcgtcgtctttatttgtgagtacatcgcatttccgggatgtgggcgaccccaaattcccattctcgcagtcatatggagggatgaaccgtatccccgtaccgatgagcaaatcatcttaagacgttag

SEQ ID NO: 277480 - DNA, 1271 bp, Artificial Sequence
  derived and/or modified sequence
caacttccggaaggaggcggaagagcttctcggctctaggctctggagtcccgggagcagtgaggggccacccggggcacaggaaagggccgctaggggagggccgggtgcactcggggtgtctgggccgcgggtctgagggatgaggaggggccatggccagcgacggggccaggaagcaattctggaagcgcagcaacagcaagctcccgggcagcatccagcacgtgtatggtgcccagcaccccccctttgatccactgttacatggcactttgctcaggtccacggccaagatgccgaccacaccagtgaaggccaagagggtcagcaccttccaggagtttgagagcaataccagcgatgcctgggacgctggggaggacgacgatgagctcctggccatggcggcggagagcctgaactccgaggtggtcatggagacggccaaccgtgtgctgcgtaaccacagccagcggcaggggcggcccacgctgcaggaggggccagggcttcagcagaagcccaggcccgaggcagagccgccctcaccccccagcggcgacctccggctggtgaagtcggtcagtgagagccacacgtcctgtcctgcagaaagtgccagcgatgccgcccctctgcagaggtcccagtctctcccacactcggccaccgtcacgctgggtggcacatctgaccccagcactctcagcagctcagcgctgagcgaaagagaggcctcccggctcgacaagttcaagcagctgcttgccggccccaacacggaccttgaggaattacggaggttgagctggtccggaatccctaagccagtgcgtccaatgacgtggaagctcctctcaggttaccttcccgccaatgtagaccggagaccagccactctccagagaaaacaaaaagaatattttgcatttattgagcactattacgattctaggaacgacgaagttcaccaggacacatacaggcagatccacatagacatccctcgcatgagccctgaagcgttgatcctgcagcccaaggtgacggagatttttgaaaggatcttgttcatatgggcgatccgccacccagccagtggatacgttcagggtataaatgatctcgtcactcctttctttgtggtcttcatttgtgaatacatagcctttccaggttgtggtcggcctcagattcccatccttgctgtgatctggagagatgagccttacccgaggacagatgaacagattatcctcagaagatga

SEQ ID NO: 277481 - DNA, 1736 bp, Artificial Sequence
  derived and/or modified sequence
aaatcccagacgcccctcaaattggagagggacagatgggcgctgtggctcacgcccgtaatcacaaccctctgagaagccgaggcgggcggatcacgaggtcaaaagatcgagaccgtcctggccaacgtggtgaaaccccgtctctactaaaaataaaaaaattagctgggcgtggtggcgcgcgcctctagtcgggaggctgaggcaggagaatcgcttgaacccggaaggcggaggttgcagtgagccgagatcgcgccactgcaccccagcctggcaacagagcgagactctggctcaaaaaaaaaaaaaaaaaaaaaaaaaattggagagggacgctcttccgcctgcctgtacccggaagtgacgttatgtacgtccccccccgaggaagtgacgacaggcgtgcccttgacaggcagggagggctaggctgtgcatccctccgctcgcattgcagggagatggctcagcgacttcttctgaggaggttcctggcctctgtcatctccaggaagccctctcagggtcagtggccacccctcacttccagagccctgcagaccccacaatgcagtcctggtggcctgactgtaacacccaacccagcccggacaatatacaccacgaggatctccttgacaacctttaatatccaggatggacctgactttcaagaccgagtggtcaacagtgagacaccagtggttgtggatttccacgcacagtggtgtggaccctgcaagatcctggggccgaggttagagaagatggtggccaagcagcacgggaaggtggtgatggccaaggtggatattgatgaccacacagacctcgccattgagtatgaggtgtcagcggtgcccactgtgctggccatgaagaatggggacgtggtggacaagtttgtgggcatcaaggatgaggatcagttggaggccttcctgaagaagctgattggctgacaagcagggatgagtcctggttcccttgcccgcgtgggaccccaatagaactcagcccttccatgccagcccttcctgctgcctccctcctgtctggctcctggggcccatgcttagagcccaggctccagccctgagtgcttccgagctggcggactgcccaggggccatcagaggatggtggtgctgctgctgatccggggaccgctgtcttccctcccatacgcctttcatccctccttctagggcctatggcagttctcccaggatgtgtggcgagagcctgggccagcccacagcgttcctagtcaggcagccacaccttggtcctcatcttggtcccttccaatctgaaacctcgtgcctggctcgtctgccacctacatttctctttccagctgctgttttgtaaaaagaaaaagaaaaaagaagcccaaactagtgagagtaatatctaattatctcattttttgtaggtctgtgataaagaacttagtcatcccttccacctcctactgtgaagaacagaccctgggtcccacactgaaatcccctctagtcacccattcccaccccccagggagctgcctcccaggcagggggtgcagaaaatgattgatgggctggggaaccctggagagcctcgactccggaagtctcaaggtgcctcctcctctccttagctggcccgttggttttctgagcagggggctgaactgtgaacaagtcagacaaataaagcaagggtctgcaccatctgcaatgtca

SEQ ID NO: 277482 - DNA, 912 bp, Artificial Sequence
  derived and/or modified sequence
agttcctccttgaattgttgcgtttcatcttttcagacgaccctgggttccagtgttggctgtcatttaatagcggggttactttgggcatgtcacttaacttacttgagcctcgtattccttcccttactcgcagtgtgggcagtacaatagcaacttcctggaagttgctgtaggaagaccaataatgtgtgtaagatggctcagcgacttcttctgaggaggttcctggcctctgtcatctccaggaagccctctcagggtcagtggccacccctcacttccagagccctgcagaccccacaatgcagtcctggtggcctgactgtaacacccaacccagcccggacaatatacaccacgaggatctccttgacaacctttaatatccaggatggacctgactttcaagaccgagtggtcaacagtgagacaccagtggttgtggatttccacgcacagtggtgtggaccctgcaagatcctggggccgaggttagagaagatggtggccaagcagcacgggaaggtggtgatggccaaggtggatattgatgaccacacagacctcgccattgagtatgaggtgtcagcggtgcccactgtgctggccatgaagaatggggacgtggtggacaagtttgtgggcatcaaggatgaggatcagttggaggccttcctgaagaagctgattggctgacaagcagggatgagtcctggttcccttgcccgcgtgggaccccaatagaactcagcccttccatgccagcccttcctgctgcctccctcctgtctggctcctggggcccatgcttagagcccaggctccagccctgagtgcttccgagctggcggactgcccaggggccatcagaggatggtggtgctgctgctgatccggggaccgctgtct

SEQ ID NO: 277483 - protein, 246 aa, Artificial Sequence
  derived and/or modified sequence
MTPGTANRATNPLNKELDWASINGFCEQLNEDFEGPPLATRLLAHKIQSPQEWEAIQALTVLETCMKSCGKRFHDEVGKFRFLNELIKVVSPKYLGSRTSEKVKNKILELLYSWTVGLPEEVKIAEAYQMLKKQGIVKSDPKLPDDTTFPLPPPRPKNVIFEDEEKSKMLARLLKSSHPEDLRAANKLIKEMVQEDQKRMEKISKRVNAIEEVNNNVKLLTEMVMSHSQGGAAAGSSEDLMKELYQ

SEQ ID NO: 277484 - DNA, 741 bp, Artificial Sequence
  derived and/or modified sequence
atgacacccgggactgctaacagggccaccaatcctctcaacaaggaactggattgggcctccatcaacggcttctgcgaacagctcaacgaagattttgagggccctcccctcgctaccagactgttggcacacaagatccagtcgcctcaagagtgggaggccatacaggcccttaccgttctcgagacctgcatgaaatcttgcggtaaaagattccacgatgaagtgggcaagttcaggttcctgaatgagttgataaaagtcgtgtctcccaagtacttggggagcaggacaagtgagaaggtgaagaataagatcctggagctcttgtacagctggacggtgggcctgccagaagaagtaaagatcgccgaagcatatcagatgctgaagaagcaagggatcgtgaaaagtgatcccaagttgccggatgacactacatttcccttaccccccccaagacccaagaacgtgatcttcgaggacgaggaaaagtccaaaatgctggccagattattaaaatcatcgcatccagaggacctccgggctgctaataagctgatcaaggagatggtccaagaggaccaaaagcgcatggaaaagattagcaagcgagtcaatgcgatcgaagaggtcaacaacaacgtgaaattattaactgagatggttatgagtcatagccaagggggcgctgcagccgggtccagcgaagacctgatgaaagagctttatcaatag

SEQ ID NO: 277485 - DNA, 3205 bp, Artificial Sequence
  derived and/or modified sequence
agtcggcccctcagaccctggagcgatggaggaccccggccccggcgcggtccagcggtgggagcgggcgccgcccacctgtcggatccctgggccatgacccctgggacggcgagtgagctgcgccgggaacccccgggacggagagagcagcctccaacccccaaggctcacattgcttcacggagtagcggcccggggaaggagcacgcgagcggttccccggggttgcatctcacacccgggagggagggaccctactattttcaggccccgaatcctccactctctggccctgcatggcgttcctggagcccgtgtggacatgagtggctgggatgcagtgccgtagcaggctgggggacacaaaagagaactgacccagcactgctaccctgggcaggagtagaggattagagaaggggacaccggagccactcccaagggaatgaaggctttctgaacctggtgtgatgatagagccacgaaccccctgaacaaggagctcgactgggccagcatcaacggcttctgcgagcagctcaacgaggactttgaggggcctccactcgccacccggctgctggcccacaagatccagtccccacaggagtgggaggcgatccaggccttgacggtgctggaaacatgcatgaagagctgcggcaagcggttccacgacgaagtgggcaagttccgctttctcaacgagctcatcaaggtcgtgtctcccaagtatctgggctctcggacatcggagaaggtgaagaacaagatcttggagctcctctacagctggacagtgggcctgcccgaggaggtgaaaatcgcagaggcctaccagatgctaaagaagcaggggattgtaaagtccgaccccaagcttccagatgacactacctttccccttcctcctccacggccgaagaatgtgatctttgaagatgaggagaaatccaagatgctggcccgcctgctgaagagctcccatcccgaagacctccgcgcagccaataagctcatcaaagagatggtgcaggaggaccagaagcggatggagaagatctcgaagagggtgaatgccatcgaggaggtgaacaacaatgtgaaactgctcacggagatggtgatgagccacagccagggcggcgcagcagctggcagcagcgaggacctcatgaaggaactgtaccagcgctgtgagcggatgcggcccacgctcttccgactggcgagtgacacagaggacaatgatgaggccttagcggagatcctgcaggccaatgacaacctcacccaggtgatcaacctgtataagcagctggtgcggggtgaggaggtcaacggtgatgccacagccggctccatccctgggagcacctcggccctgctggatctctcaggcctggatctcccgcctgcgggcaccacctacccagctatgcccacccgccctggcgagcaggccagccctgagcagcccagtgcctcagtttccctgcttgacgacgagctcatgtctctgggcctcagtgaccccacacccccttcaggcccaagcctggatggtaccggatggaacagcttccagtcgtcggatgccactgagcccccagcccctgctctggcccaggcccccagtatggaaagccgacccccagcgcagacatccctgccagcaagcagcggtctggacgacctagacctcctggggaagaccctcctgcagcagtcgctgcccccggaatcccagcaagtgcggtgggagaagcagcagccaaccccccggctcacactccgggacctgcagaataagagcagcagctgcagctcccccagctccagcgccaccagccttctccacaccgtgtccccagagccccccaggcctccgcagcagcccgtaccaaccgagctctcactggccagcatcactgtgcccctggagtccatcaaacccagcaacatcctgcccgtgactgtgtatgaccagcacggcttccgcatcctcttccattttgcccgggacccactgccagggcgctccgacgtgctggtggtggtggtttccatgctgagcaccgccccccagcccatccgcaacatcgtgttccagtcagctgtccccaaggttatgaaggtgaagctgcagccaccctcgggcacggagctgccagcttttaaccccatcgtccacccctcagcaatcacccaggtcctgctgcttgccaacccccagaaggagaaggttcgcctccgctacaagctcaccttcaccatgggtgaccagacctacaacgagatgggggatgtggaccagttccccccacctgaaacctggggtagcctctagaacagaggggctggggagaggaaggggcagagggaccggtcactgtccagcctggagggaggcattggtggccaaggacaccctttgttgcccatggccattcacccccaggcctggtgcttctccccacacccctgtaggcctcaagtgactcttccccctcctgctccggccccgcccctgctgagccaaacccagtaggaggctgggcctgggtttgtgccgctggggtctccatcaccgggacctggagagggaggggctgtgtagccttggaagaacttgggtcatggggaggaagcacagctgttggggaagggccaggacctcaggcccagccccaaccccagctggggtggggtcttccccacctgtctcttatgccttatgggaaggcccagccataactcgggggccatgctggagctggggaccagcttaggcctcctccataggaacccagtgactggggggtgacgcctacacccccagctatttgcactctggtgtgtggtttgactctgcttttcttccggattggccctgtggtcacagcctcagggggccaggctgggggaacctcacctggcccgtactcctgggggtttccctttgccattgggccccctgagggactgtgggggctcaagggtaatgccagaggcccatggccccagcgaggggctgtggggcacctagagttctcggtgtgtctccttcattcattggcctctgctggggcctcctatgggtgtcttacgtctgtccatccatctgtccgtggtcagaagtggggtcagtgtgtgagtgagagcaggagtatttatgaaaataaaacgtcgtttttcctgg

SEQ ID NO: 277486 - DNA, 577 bp, Artificial Sequence
  derived and/or modified sequence
agtcggcccctcagaccctggagcgatggaggaccccggccccggcgcggtccagcggtgggagcgggcgccgcccacctgtcggatccctgggccatgacccctgggacggcgagtgagctgcgccgggaacccccgggacggagagagcagcctccaacccccaaggctcacattgcttcacggagtagcggcccggggaaggagcacgcgagcggttccccggggttgcatctcacacccgggagggagggaccctactattttcaggccccgaatcctccactctctggccctgcatggcgttcctggagcccatagagccacgaaccccctgaacaaggagctcgactgggccagcatcaacggcttctgcgagcagctcaacgaggactttgaggggcctccactcgccacccggctgctggcccacaagatccagtccccacaggagtgggaggcgatccaggccttgacggtgctggaaacatgcatgaagagctgcggcaagcggttccacgacgaagtgggcaagttccgctttctcaacgagctcatcaaggtcgtgtctcccaag

SEQ ID NO: 277487 - DNA, 927 bp, Artificial Sequence
  derived and/or modified sequence
ggggcacgaggcgggccccttcccggcgggggcggggtacgggtcgccccctcctcacgccccgcccccggcccgggaggggcggtgtcctcagtcggcccctcagaccctggagcgatggaggaccccggccccggcgcggtccagcggtgggagcgggcgccgcccacctgtcggatccctgggccatgacccctgggacggcgaatagagccacgaaccccctgaacaaggagctcgactgggccagcatcaacggcttctgcgagcagctcaacgaggactttgaggggcctccactcgccacccggctgctggcccacaagatccagtccccacaggagtgggaggcgatccaggccttgacggtgctggaaacatgcatgaagagctgcggcaagcggttccacgacgaagtgggcaagttccgctttctcaacgagctcatcaaggtcgtgtctcccaagtatctgggctctcggacatcggagaaggtgaagaacaagatcttggagctcctctacagctggacagtgggcctgcccgaggaggtgaaaatcgcagaggcctaccagatgctaaagaagcaggggattgtaaagtccgaccccaagcttccagatgacactacctttccccttcctcctccacggccgaagaatgtgatctttgaagatgaggagaaatccaagatgctggcccgcctgctgaagagctcccatcccgaagacctccgcgcagccaataagctcatcaaagagatggtgcaggaggaccagaagcggatggagaagatctcgaagagggtgaatgccatcgaggaggtgaacaacaatgtgaaactgctcacggagatggtgatgagccacagccagggcggcgcagcagctggcagcagcgaggacctcatgaaggaactgtaccagc

SEQ ID NO: 277488 - DNA, 741 bp, Artificial Sequence
  derived and/or modified sequence
atgaccccaggcacagccaacagagccaccaaccccctgaacaaggagctggactgggccagcatcaatggcttctgtgagcagctgaatgaagattttgagggcccccccctggccacccggctgctggcccacaagatccagagcccccaggagtgggaggccatccaggccctgactgtgctggagacctgcatgaagagctgtgggaagcgcttccatgatgaggtgggcaagttccgcttcctgaatgagctgatcaaggtggtgagccccaagtacctgggcagcaggaccagcgagaaggtgaagaacaagatcctggagctgctgtacagctggacagtgggcctgcctgaggaggtgaagattgctgaggcctaccagatgctgaagaagcagggcatcgtgaagagtgaccccaagctgcctgatgacaccaccttccccctgcccccaccccggcccaagaatgtcatctttgaagatgaggagaagagcaagatgctggcccggctgctgaagagcagccaccctgaggacctgcgggccgccaacaagctgatcaaggagatggtgcaggaggaccagaagaggatggagaagatcagcaagagggtgaatgccatcgaggaggtgaacaacaacgtgaagctgctgacagagatggtgatgagccacagccagggcggcgctgctgctggcagcagcgaggacctgatgaaggagctgtaccagtag

SEQ ID NO: 277489 - DNA, 741 bp, Artificial Sequence
  derived and/or modified sequence
atgacccccggcaccgccaaccgggccaccaaccccctgaacaaggagctcgattgggcatcgatcaacggtttctgtgaacagcttaacgaggatttcgaaggcccaccactggccactcggctgctcgctcacaagatccagtccccacaagagtgggaggccattcaagctttgactgtcctggaaacatgcatgaagtcatgcgggaaacggttccacgatgaggtcggcaagtttcggtttcttaatgagcttattaaggtggtgagtcctaagtatctgggctctcgcacctccgagaaagtgaaaaataagatccttgagttactatattcatggaccgtcgggcttcctgaagaggtcaaaattgcggaggcgtatcagatgctcaagaaacaggggatcgtcaaaagtgaccccaagcttcccgacgacaccacattccccctcccaccaccgaggcccaagaacgtcatttttgaggatgaggagaagtctaaaatgctggcccgtttgctgaaatccagtcaccctgaggacctgcgggctgcaaacaagcttatcaaggagatggtacaagaagaccagaaaagaatggagaagattagcaaacgcgtcaatgccatcgaagaggtaaacaataacgtgaagctcctcacggagatggtcatgagccactctcaaggtggagccgccgctggatcgagcgaggatctgatgaaagaactttatcagtag

SEQ ID NO: 277490 - DNA, 741 bp, Artificial Sequence
  derived and/or modified sequence
atgacccccggaacagcaaatcgtgcgaccaacccgctgaacaaagaacttgactgggcatcaattaatgggttttgtgaacaactgaatgaggacttcgaaggcccaccattagctacacgtctgctggcacataagatccaatctccgcaagagtgggaggccatccaggctctcacagttctggaaacctgtatgaagtcttgcgggaaaagatttcatgatgaagttggcaaatttagattcttgaatgagctgattaaggttgtctctccaaagtatcttggatcacgcaccagcgagaaagtcaagaataagatattagaactcctgtattcttggaccgtggggctgccagaagaggtgaaaatcgctgaagcttatcagatgttgaagaagcaggggatcgtgaaatcagacccgaaactgccagacgataccacttttcccctccctcctccacgcccaaaaaatgtcattttcgaagacgaagaaaagagtaaaatgctcgccagattactgaaatcatcccatccagaggacctccgagccgctaacaaactcatcaaagagatggtgcaggaggaccaaaagcgcatggagaaaatttcaaagcgcgtgaatgctattgaggaggtgaacaataatgttaagctgctcaccgagatggtgatgtctcactctcaggggggagcggcagcaggaagtagcgaggacctcatgaaggagctctaccagtag

SEQ ID NO: 277491 - DNA, 741 bp, Artificial Sequence
  derived and/or modified sequence
atgacccccggcaccgccaacagagccaccaaccccctgaacaaggagctggactgggccagcatcaacggcttctgcgagcagctgaacgaggacttcgagggcccccccctggccaccagactgctggcccacaagatccagagcccccaggagtgggaggccatccaggccctgaccgtgctggagacctgcatgaagagctgcggcaagagattccacgacgaggtgggcaagttcagattcctgaacgagctgatcaaggtggtgagccccaagtacctgggcagcagaaccagcgagaaggtgaagaacaagatcctggagctgctgtacagctggaccgtgggcctgcccgaggaggtgaagatcgccgaggcctaccagatgctgaagaagcagggcatcgtgaagagcgaccccaagctgcccgacgacaccaccttccccctgcccccccccagacccaagaacgtgatcttcgaggacgaggagaagagcaagatgctggccagactgctgaagagcagccaccccgaggacctgagagccgccaacaagctgatcaaggagatggtgcaggaggaccagaagagaatggagaagatcagcaagagagtgaacgccatcgaggaggtgaacaacaacgtgaagctgctgaccgagatggtgatgagccacagccagggcggcgccgccgccggcagcagcgaggacctgatgaaggagctgtaccagtag

SEQ ID NO: 277492 - DNA, 930 bp, Artificial Sequence
  derived and/or modified sequence
atgagacagaacgacaagatcatgtgcatcctggagaacagaaagaagagagacagaaagaacctgtgcagagccatcaacgacttccagcagagcttccagaagcccgagaccagaagagagttcgacctgagcgaccccctggccctgaagaaggacctgcccgccagacagagcgacaacgacgtgagaaacaccatcagcggcatgcagaagttcatgggcgaggacctgaacttccacgagagaaagaagttccaggaggagcagaacagagagtggagcctgcagcagcagagagagtggaagaacgccagagccgagcagaagtgcgccgaggccctgtacaccgagaccagactgcagttcgacgagaccgccaagcacctgcagaagctggagagcaccaccagaaaggccgtgtgcgccagcgtgaaggacttcaacaagagccaggccatcgagagcgtggagagaaagaagcaggagaagaagcaggagcaggaggacaacctggccgagatcaccaacctgctgagaggcgacctgctgagcgagaacccccagcaggccgccagcagcttcggcccccacagagtggtgcccgacagatggaagggcatgacccaggagcagctggagcagatcagactggtgcagaagcagcagatccaggagaagctgagactgcaggaggagaagagacagagagacctggactgggacagaagaagaatccagggcgccagagccaccctgctgttcgagagacagcagtggagaagacagagagacctgagaagagccctggacagcagcaacctgagcctggccaaggagcagcacctgcagaagaagtacatgaacgaggtgtacaccaaccagcccaccggcgactacttcacccagttcaacaccggcagcagatag

SEQ ID NO: 277493 - DNA, 930 bp, Artificial Sequence
  derived and/or modified sequence
atgagacagaacgacaaaatcatgtgtattctcgaaaacagaaagaaacgggaccgcaagaacctgtgtcgcgccattaatgactttcagcagtctttccagaagccagaaacccgacgggagtttgatctgtctgaccctctagccctgaaaaaagaccttcccgcccgacaaagcgataatgacgtcaggaatacaatctctggtatgcaaaaattcatgggggaggacctcaacttccacgaacgtaagaagtttcaggaggaacaaaaccgggaatggtctctgcagcagcagcgggaatggaagaacgcgagagcagaacagaaatgcgccgaagccttgtacaccgagacacgcctccagttcgatgaaacggcgaagcatctccagaagctcgaaagcacaacgagaaaagcagtatgtgccagcgttaaggactttaacaagtcccaagcgattgagagcgtcgagcgaaagaagcaggagaaaaagcaagagcaggaagataatcttgccgagatcaccaacttgctcagaggcgatttactgagcgaaaatcctcagcaggcagcatctagttttggtcctcaccgcgtggtgccagacagatggaaagggatgacacaggaacagctggagcagattcgacttgtgcagaaacagcagattcaagaaaagttgagactgcaggaagagaagcggcaacgtgaccttgattgggataggcgaaggatacagggtgctagggcaactctgttgttcgagagacagcagtggcgaagacagagggacctgagaagggccctggactcaagtaaccttagcttggccaaagaacagcacttgcagaaaaagtacatgaacgaagtctacacaaaccagcctactggcgattacttcacccagtttaacaccggcagtagatag

SEQ ID NO: 277494 - DNA, 930 bp, Artificial Sequence
  derived and/or modified sequence
atgaggcagaatgacaagatcatgtgcatcctggagaacaggaagaagagggacaggaagaacctgtgccgggccatcaatgacttccagcagagcttccagaagccagagacccggcgggagtttgacctgagtgaccccctggccctgaagaaggacctgcctgcccggcagagcgacaatgatgtgaggaacaccatcagcggcatgcagaagttcatgggagaggacctgaacttccacgagaggaagaagttccaggaggagcagaaccgggagtggagcctgcagcagcagcgggagtggaagaatgcccgggcagagcagaagtgtgccgaggccctgtacacagagacccggctgcagtttgatgaaacagccaagcacctgcagaagctggagagcaccaccaggaaggctgtgtgtgcctctgtgaaggacttcaacaagagccaggccatcgagagcgtggagaggaagaagcaggagaagaagcaggagcaggaggacaacctggccgagatcaccaacctgctgcggggggacctgctgtctgagaacccccagcaggccgccagcagctttggcccccaccgggtggtgcctgaccgctggaagggcatgacccaggagcagctggagcagatccggctggtgcagaagcagcagatccaggagaagctgcggctgcaggaggagaagaggcagagggacctggactgggacagaagacgcatccagggcgcccgggccaccctgctgtttgagcggcagcagtggaggcggcagagggacctgcggcgggccctggacagcagcaacctgagcctggccaaggagcagcacctgcagaagaagtacatgaatgaggtgtacaccaaccagcccactggagactacttcacccagttcaacacaggcagcaggtag

SEQ ID NO: 277495 - DNA, 930 bp, Artificial Sequence
  derived and/or modified sequence
atgcggcagaacgacaagatcatgtgcatcctggagaaccggaagaagagggatagaaagaacttgtgcagagctataaatgatttccagcagtcatttcaaaagcctgaaaccagaagagaatttgatctctccgacccgctcgcgctcaagaaggacctccccgctcgccagtcagacaatgatgtgcggaatactatcagtggtatgcagaagttcatgggtgaagacctgaactttcacgagaggaagaagttccaggaagaacagaatcgagagtggtcactccagcagcaacgggaatggaagaatgcgcgggctgagcagaaatgtgctgaggcgctctacacagagaccagactacagtttgacgaaacagccaagcacctgcagaagctggagagcacgacacgaaaggcggtatgtgccagtgtgaaggactttaacaagtcgcaggccattgagtccgttgagcgtaagaaacaagaaaaaaagcaagagcaggaggacaaccttgcagaaatcactaacttgctccgcggcgacctactgtctgagaatccccagcaggcagcctcttcctttggcccacaccgcgtggttcccgatcgatggaagggtatgacgcaagaacagctcgagcaaatcaggcttgttcagaagcaacagatacaagagaagctgagactccaagaggagaaacggcagcgtgacttagattgggaccggcggcgtattcagggtgctcgcgccacactcttatttgagcgccagcagtggcgccgccaacgcgatctcagaagggccttggacagctcaaacttgtcattggcaaaagagcagcaccttcagaagaagtacatgaatgaagtgtacactaatcagcccaccggcgattatttcacgcagttcaacacaggctcacgctag

SEQ ID NO: 277496 - DNA, 930 bp, Artificial Sequence
  derived and/or modified sequence
atgcgccagaatgacaagattatgtgcatcctggagaaccgaaagaaacgggaccggaaaaacctgtgcagggccattaacgacttccagcagtcttttcagaagccggagacacgcagagagtttgaccttagcgaccccttagctttgaagaaagacctgcccgctagacagtccgacaacgacgttcgcaacactatcagcggaatgcaaaagtttatgggagaagatctcaacttccacgaaagaaagaagtttcaggaggagcagaacagggagtggtcactgcaacagcaaagggaatggaaaaacgctagggcagagcagaagtgtgccgaggctctgtacacggaaacgcggttgcagttcgacgaaacagctaaacacttgcagaagttggagtccaccactagaaaagcagtgtgcgcgtcagtcaaagattttaataagtcacaggccattgagtccgttgagcggaaaaaacaggagaaaaagcaggagcaggaggacaatcttgcagagataacaaatctccttagaggcgatctactttcagagaatccccaacaggcagcctcgagtttcggccctcacagagttgttcccgacaggtggaaaggcatgacacaggagcagctggaacagatccggttggtccagaagcagcagatccaggaaaagttgcgactgcaggaagagaagagacagagagatttggattgggataggagacggattcagggggctcgggctactctgctctttgagcgccagcaatggcgtaggcagagagatctccgccgagccctcgatagtagcaatctgtccttggctaaggagcagcatttgcagaagaaatacatgaatgaggtgtatacaaaccagccaacaggcgattattttactcagtttaatactggaagccgctag

SEQ ID NO: 277497 - protein, 273 aa, Artificial Sequence
  derived and/or modified sequence
  misc_feature (1)..(1): Xaa can be any naturally occurring amino acid
XLALFQVSDTAWASAIAEPSSLTSRPVETTLENNEGGQEQGPSVEGLNVPTKATLEVSSIIKKKPNQAKKGLGAKKGSLGAQKLANTCFNEIEKQAQAADKMKEQEDLAKVVSKEESIVSSLRLAYKDLEIQMKKDEKMNISGKKNVDSDRLGMGFGNCRSVISHSVTSDMQTIEQESPIMAKPRKKYNDDSDDSYFTSSSRPTARRKPDYEPVENTDEAQKKFGNVKAISSDMYFGRQSQADYETRARLERLSASSSISSADLFEEPRKQPA

SEQ ID NO: 277498 - DNA, 822 bp, Artificial Sequence
  derived and/or modified sequence
tgacttgcacttttccaggtgtctgatactgcctgggctagtgccatcgccgagccctcatccctcacttcacgtccagtggaaacaacattggaaaataacgagggcggacaggaacaggggcccagcgtggaagggcttaacgtgcctacaaaggccactctggaggtatcctcgattattaaaaaaaaaccgaatcaggccaagaagggtttgggggcaaaaaaaggctctttaggggcacagaagttagccaatacctgcttcaatgaaatcgagaaacaagcgcaggctgcagacaagatgaaagagcaagaggacctggccaaagtggttagcaaagaagagtctatagtttctagtctgagactggcatacaaggatctcgagattcaaatgaagaaggatgagaagatgaatatcagcggaaaaaagaatgtcgactctgaccggttgggcatgggctttggtaattgtagaagtgtcatcagccactccgttacatctgacatgcagacaatcgagcaggagtctcccatcatggcgaagccaagaaaaaagtataacgacgattctgatgacagctacttcacaagttcgtctcgccctaccgcacggcgtaaaccagactatgagcccgtggaaaataccgatgaggcacaaaagaaattcggaaacgtcaaggctatttctagtgacatgtactttgggcgacagtctcaggccgactacgaaacccgagcccgattggagagactaagcgcgtcctcctctatcagctcggctgacctcttcgaagagccgcgcaaacaacccgcgtag

SEQ ID NO: 277499 - DNA, 817 bp, Artificial Sequence
  derived and/or modified sequence
tctcgccttgtttcaggtgagtgacacagcgtgggcatcagcaatagcagaaccatcttctttaacatcaaggcctgtggaaaccactttggaaaataatgaaggtggacaagagcaaggaccaagtgtggaaggtcttaatgtaccaacaaaggctactttagaggtatcctctatcataaaaaagaaaccaaatcaagctaaaaaaggccttggggccaaaaaaggaagtttgggagctcagaaactggcaaacacatgctttaatgaaattgaaaaacaagctcaagctgcggataaaatgaaggagcaggaagacctggccaaggtggtatctaaagaagaatcaattgtttcatcattacgattagcctataaggatcttgaaattcaaatgaagaaagacgaaaagatgaacattagtggcaaaaaaaatgttgactcagacagactcggcatgggatttggaaattgcagaagtgttatttcacattcagtgacttcagatatgcagaccatagagcaggaatcacccattatggcaaaaccaagaaaaaagtataatgatgacagtgacgattcatattttacttccagctcaagacctactgctcgccgcaagccagattatgagccagttgaaaatacagatgaggcccagaagaagtttggcaatgtcaaggccatttcatcagatatgtattttggaagacaatcccaggctgattatgagaccagggcccgcctagagaggctgtcggcaagttcctccataagctcggctgatctgttcgaggagccgaggaagcagccagca

SEQ ID NO: 277500 - DNA, 822 bp, Artificial Sequence
  derived and/or modified sequence
tgactggccctcttccaggtgtctgacacagcctgggccagcgccatcgccgagcccagcagcctgaccagcaggcctgtggagaccaccctggagaacaatgaaggaggccaggagcagggccccagcgtggagggcctgaatgtgcccaccaaggccaccctggaggtgagcagcatcatcaagaagaagcccaaccaggccaagaagggcctgggcgccaagaagggcagcctgggcgcccagaagctggccaacacctgcttcaatgaaattgagaagcaggcccaggccgctgacaagatgaaggagcaggaggacctggccaaggtggtgtccaaggaggagagcatcgtgagcagcctgcggctggcctacaaggacctggagatccagatgaagaaggatgagaagatgaacatcagcggcaagaagaatgtggacagcgaccggctgggcatgggcttcggcaactgccgcagcgtcatcagccacagcgtgaccagtgacatgcagaccatcgagcaggagagccccatcatggccaagcccaggaagaagtacaatgatgacagtgatgacagctacttcaccagcagcagccggcccacagcccggaggaagccagactatgagcctgtggagaacacagatgaggcccagaagaagtttggaaatgtgaaggccatcagcagtgacatgtacttcggccggcagagccaggccgactatgagacccgggcccggctggagcggctgagcgccagcagcagcatcagcagcgctgacctgtttgaggagcccaggaagcagcctgcctag

SEQ ID NO: 277501 - DNA, 822 bp, Artificial Sequence
  derived and/or modified sequence
tgactggccctgttccaggtgagcgacaccgcctgggccagcgccatcgccgaaccatcctcgctgacttcaaggcccgtggaaaccaccttggagaataacgagggcggacaggagcaaggcccgtcagtagaaggactgaacgtgcctacaaaggccaccttggaggtgtcttcaatcatcaaaaaaaaacccaatcaggcaaaaaaggggctgggtgcgaagaaggggtccttgggtgctcaaaaactcgccaacacatgcttcaacgagatcgaaaaacaggcccaggcggccgacaagatgaaggaacaggaggacttagccaaggtggtatccaaggaagaatcgattgtttcatcccttcgcctggcatacaaagatctggaaatacaaatgaaaaaagacgagaaaatgaatatctctggcaagaagaacgtggactcagataggctgggcatgggatttgggaattgtaggagtgtcatctctcattccgtcacctcggatatgcagacaatcgaacaggagtcacccatcatggccaagccaagaaaaaaatacaatgacgattctgacgatagctacttcacctcctcttcccggcctactgctcgcagaaaaccagattacgagcctgtggaaaatacagatgaggcgcagaagaaattcggcaatgtcaaggccatctcttctgatatgtacttcggcaggcagtcccaggctgattacgaaaccagggcccgactcgagagattatcggctagctcctcaattagttccgccgatctcttcgaggagcccagaaaacaacccgcatag

SEQ ID NO: 277502 - DNA, 822 bp, Artificial Sequence
  derived and/or modified sequence
taactggctctgtttcaagtctccgatacggcatgggcatcagctattgcggagccctcttcccttacctcccgtcccgtagaaaccactctcgagaacaatgaaggcggtcaggaacagggaccctctgtcgaaggattgaatgtgccgacgaaggcaactctggaagtcagtagtatcatcaaaaagaagccaaatcaggctaagaaagggctcggcgctaaaaagggctcactcggtgctcagaagctggccaacacatgctttaacgaaatcgaaaagcaggcccaggccgctgataagatgaaggagcaggaggacctcgccaaagtggtgtccaaagaggagagcatcgtgagttctcttcgtttagcctacaaggacctggagatacagatgaaaaaagacgaaaagatgaatatctctgggaaaaagaatgttgactcagatcggcttggcatgggttttggaaattgccgctctgttatctctcattccgtcacatcggacatgcagaccatcgaacaggaatctcctatcatggccaaaccacgtaaaaagtacaacgacgatagcgacgactcttatttcaccagcagttcccgccctaccgcacgcaggaaacctgactacgaacccgtggagaataccgatgaagcccagaagaagtttggcaacgtgaaggccatatccagcgatatgtacttcggcagacaatctcaggccgattacgagacccgtgctagattggaacgcctcagcgccagttcctccatatcctccgcagacctttttgaagagcctcggaaacagcccgcttag

SEQ ID NO: 277503 - DNA, 822 bp, Artificial Sequence
  derived and/or modified sequence
tgactggccctgttccaggtgagcgacaccgcctgggccagcgccatcgccgagcccagcagcctgaccagcagacccgtggagaccaccctggagaacaacgagggcggccaggagcagggccccagcgtggagggcctgaacgtgcccaccaaggccaccctggaggtgagcagcatcatcaagaagaagcccaaccaggccaagaagggcctgggcgccaagaagggcagcctgggcgcccagaagctggccaacacctgcttcaacgagatcgagaagcaggcccaggccgccgacaagatgaaggagcaggaggacctggccaaggtggtgagcaaggaggagagcatcgtgagcagcctgagactggcctacaaggacctggagatccagatgaagaaggacgagaagatgaacatcagcggcaagaagaacgtggacagcgacagactgggcatgggcttcggcaactgcagaagcgtgatcagccacagcgtgaccagcgacatgcagaccatcgagcaggagagccccatcatggccaagcccagaaagaagtacaacgacgacagcgacgacagctacttcaccagcagcagcagacccaccgccagaagaaagcccgactacgagcccgtggagaacaccgacgaggcccagaagaagttcggcaacgtgaaggccatcagcagcgacatgtacttcggcagacagagccaggccgactacgagaccagagccagactggagagactgagcgccagcagcagcatcagcagcgccgacctgttcgaggagcccagaaagcagcccgcctag

SEQ ID NO: 277504 - protein, 596 aa, Artificial Sequence
  derived and/or modified sequence
MEDAPQRLRWQAHLEFTHNHDVGDLTWDKIAVSLPRSEKLRSLVLAGIPHGMRPQLWMRLSGALQKKRNSELSYREIVKNSSNDETIAAKQIEKDLLRTMPSNACFASMGSIGVPRLRRVLRALAWLYPEIGYCQGTGMVAACLLLFLEEEDAFWMMSAIIEDLLPASYFSTTLLGVQTDQRVLRHLIVQYLPRLDKLLQEHDIELSLITLHWFLTAFASVVDIKLLLRIWDLFFYEGSRVLFQLTLGMLHLKEEELIQSENSASIFNTLSDIPSQMEDAELLLGVAMRLAGSLTDVAVETQRRKHLAYLIADQGQLLGAGTLTNLSQVVRRRTQRRKSTITALLFGEDDLEALKAKNIKQTELVADLREAILRVARHFQCTDPKNCSVELTPDYSMESHQRDHENYVACSRSHRRRAKALLDFERHDDDELGFRKNDIITIVSQKDEHCWVGELNGLRGWFPAKFVEVLDERSKEYSIAGDDSVTEGVTDLVRGTLCPALKALFEHGLKKPSLLGGACHPWLFIEEAAGREVERDFASVYSRLVLCKTFRLDEDGKVLTPEELLYRAVQSVNVTHDAVHAQMDVKLRSLICVGLK

SEQ ID NO: 277505 - DNA, 2359 bp, Artificial Sequence
  derived and/or modified sequence
gcgagtggggaagctgctaacccgacccggattggcgctgaggtggcccgtggggcagggcagatgattctggaccagatgaagcctgaggagccttccagctctaagatagcaggataggagacttctaagattggagctgcagaagacttgccagcccaccagcacaatgtcagaaggaagagtcagcagagcaaccagagttctactacgatgagtttggtttccgtgtgtacaaggaagaaggtgatgagcctggctccagtctgctggcgaactcccctctgatggaggatgctccacagaggctgcggtggcaggcccacctggagttcacccataaccacgatgtgggggatctcacctgggacaagattgccgtctccctaccccgctctgagaagctccgctccctggtgctggccggcatcccacatggcatgaggccacagctgtggatgcggctctctggggccctgcagaagaagaggaactctgagctgtcctaccgcgagattgtgaagaacagctccaacgatgagaccatcgctgccaagcagatcgagaaggacctgctccgcaccatgcccagcaacgcctgcttcgccagcatgggtagcatcggggtgccccgcctgcgcagggtgctccgggccctggcctggctctacccagagatcggctactgccagggcaccggcatggtggccgcctgcctcctgctgttcctggaggaggaggacgccttctggatgatgtctgccatcatcgaggacctgctccccgcctcctacttcagcaccaccctgctgggtgtccagactgaccagcgggtcctgcgccacctcattgtccagtacctgcctcgcctggacaagctgctccaggagcatgacattgagctgtccctgatcacactgcactggttcctcacggccttcgccagcgtggtggacatcaagctgctcctgcgcatctgggacctgtttttctacgagggctcccgggtgctgttccagctcacgctgggcatgctgcacctcaaggaggaagagctgatccagtcagagaactcggcctccatcttcaacacgctatcggatatcccgtcgcagatggaggacgcggagctgcttctgggggtggccatgcggctggccggctccctcaccgatgtggccgtggagactcagcgccgcaagcacctggcctatctcattgcagaccagggccagctcctgggggccggcaccctcaccaacctctctcaggttgttcgccgcaggacccagcggaggaagtccaccatcactgctctgctcttcggggaggatgacctggaggcactcaaggccaagaacatcaagcagacggaactggtggctgacctccgggaagccatcctgcgcgtggcacgccacttccagtgcacagaccccaaaaactgcagcgtggagctgactccagactatagcatggagagccaccagcgggaccacgagaactacgtggcgtgctcacgcagccaccggcgccgagccaaggccctgctggactttgagcggcacgacgacgacgagctgggcttccgcaagaacgacatcatcacaatcgtgtctcagaaggacgagcactgctgggtgggggagctcaacggcctgcgaggctggtttccagccaagttcgtggaagtcctggatgagcgcagcaaagagtactccatcgcgggggatgactcggtgacggagggggtcacagacctcgtgcgagggaccctctgcccggcccttaaggccctgttcgaacatggactgaagaagccatccctgcttgggggcgcctgccacccctggctgtttatcgaggaggctgcaggccgggaggtcgagagagactttgcctccgtgtattcccgtctggtgctctgtaagaccttcaggttggatgaagatggcaaagtcctgaccccggaggagctgctctaccgggctgtgcagtctgtgaacgtgacccacgatgcagtgcatgcacaaatggatgtgaagctccgctcactgatctgcgtggggctcaagtgagtgtggaaaaggggttggaggagagccctggagtggggggacccagcccagcatcagggggggtccttacagggaaccctaaaggacaaagaacctcaggggctcaggtccttccccaaagagggtggtctgggagctgctgagagacaggtcagaggcttccaccgtggctgcagccagaagggcctggagctgcccctgctccccactcctggccatgtccccagtgagcaggtgctgcacctgtggctggaggtgctctgctccagcctgcccaccgt

SEQ ID NO: 277506 - DNA, 1791 bp, Artificial Sequence
  derived and/or modified sequence
atggaggacgccccccagagactgagatggcaggcccacctggagttcacccacaaccacgacgtgggcgacctgacctgggacaagatcgccgtgagcctgcccagaagcgagaagctgagaagcctggtgctggccggcatcccccacggcatgagaccccagctgtggatgagactgagcggcgccctgcagaagaagagaaacagcgagctgagctacagagagatcgtgaagaacagcagcaacgacgagaccatcgccgccaagcagatcgagaaggacctgctgagaaccatgcccagcaacgcctgcttcgccagcatgggcagcatcggcgtgcccagactgagaagagtgctgagagccctggcctggctgtaccccgagatcggctactgccagggcaccggcatggtggccgcctgcctgctgctgttcctggaggaggaggacgccttctggatgatgagcgccatcatcgaggacctgctgcccgccagctacttcagcaccaccctgctgggcgtgcagaccgaccagagagtgctgagacacctgatcgtgcagtacctgcccagactggacaagctgctgcaggagcacgacatcgagctgagcctgatcaccctgcactggttcctgaccgccttcgccagcgtggtggacatcaagctgctgctgagaatctgggacctgttcttctacgagggcagcagagtgctgttccagctgaccctgggcatgctgcacctgaaggaggaggagctgatccagagcgagaacagcgccagcatcttcaacaccctgagcgacatccccagccagatggaggacgccgagctgctgctgggcgtggccatgagactggccggcagcctgaccgacgtggccgtggagacccagagaagaaagcacctggcctacctgatcgccgaccagggccagctgctgggcgccggcaccctgaccaacctgagccaggtggtgagaagaagaacccagagaagaaagagcaccatcaccgccctgctgttcggcgaggacgacctggaggccctgaaggccaagaacatcaagcagaccgagctggtggccgacctgagagaggccatcctgagagtggccagacacttccagtgcaccgaccccaagaactgcagcgtggagctgacccccgactacagcatggagagccaccagagagaccacgagaactacgtggcctgcagcagaagccacagaagaagagccaaggccctgctggacttcgagagacacgacgacgacgagctgggcttcagaaagaacgacatcatcaccatcgtgagccagaaggacgagcactgctgggtgggcgagctgaacggcctgagaggctggttccccgccaagttcgtggaggtgctggacgagagaagcaaggagtacagcatcgccggcgacgacagcgtgaccgagggcgtgaccgacctggtgagaggcaccctgtgccccgccctgaaggccctgttcgagcacggcctgaagaagcccagcctgctgggcggcgcctgccacccctggctgttcatcgaggaggccgccggcagagaggtggagagagacttcgccagcgtgtacagcagactggtgctgtgcaagaccttcagactggacgaggacggcaaggtgctgacccccgaggagctgctgtacagagccgtgcagagcgtgaacgtgacccacgacgccgtgcacgcccagatggacgtgaagctgagaagcctgatctgcgtgggcctgaagtag

SEQ ID NO: 277507 - DNA, 1791 bp, Artificial Sequence
  derived and/or modified sequence
atggaggatgctccccagcgccttagatggcaggcccatctggagttcacacataatcatgacgtgggggacctgacctgggacaagatcgctgtgagtcttcctaggtccgagaagctccggtcactggtgctcgcgggcattccgcatgggatgcgcccccaattatggatgagactttccggcgccctacaaaaaaaacgaaactccgagctctcataccgagagatcgtgaaaaactctagtaacgacgagaccattgcagctaagcagatcgaaaaagacctgttgcggaccatgccctccaatgcatgttttgcatccatgggatctattggggtgccaaggttaaggcgcgtgctacgagctctggcctggctttacccagaaatagggtactgtcaaggaaccggaatggttgcggcttgtctgttattatttctggaggaggaggacgctttctggatgatgtcggcgatcattgaggacctgctaccagcgtcctacttctctacaactctgctcggagttcagactgaccaacgggtactccggcatttaatcgtccagtacctgccccgattggacaagctgttacaggagcacgacatcgagcttagtcttatcaccttgcattggttcctcacagccttcgcctccgttgtagacattaagctcttgctccgcatttgggacctcttcttttatgagggatcccgagtgctgtttcaactgaccctcgggatgttgcacctgaaggaggaagaactgattcagagtgaaaacagtgccagtatatttaacactctttccgacatcccgtcgcagatggaagacgctgaattactgctcggggttgctatgaggctggcaggctcgctgacagatgtggcagtcgagacacaacgcaggaaacacttagcctatctgattgcggatcaaggccagctccttggcgccggtacactaaccaacctgagtcaggtggtcaggcgccgaacacaacggagaaagagcaccatcaccgccctgttgttcggggaagatgacctagaggccctcaaagccaagaatatcaagcaaacagagttagtagccgaccttcgcgaagcaatacttagggtggccagacacttccagtgcactgatcccaagaactgcagcgtcgagctgactcccgactattccatggagagtcaccagagggaccacgagaattatgtcgcctgcagccgcagtcacaggcgccgtgctaaagcgctgctggactttgagcgacacgacgacgatgaactgggatttcggaaaaacgacatcataaccattgtctcccagaaggacgaacactgctgggtcggtgagttaaatggcctccgcggatggttcccagccaaatttgtagaggtcttggacgaacggtcaaaggagtattcaatcgctggggatgactcggtgaccgaaggcgtcacagacctggtgaggggcacgttgtgccccgccctgaaggctctattcgagcacgggctaaaaaaacctagccttctaggaggtgcttgccatccatggctttttatcgaagaggcggcgggtcgggaagtagagcgggacttcgcaagcgtgtactcacgactggtgctttgcaagaccttccggttagatgaggacggaaaggtgctgacccctgaagagcttctctacagggccgtacagagcgtgaacgtcacccatgatgccgtccatgcccagatggacgtgaaactaaggtcgcttatttgtgtaggcctcaaatag

SEQ ID NO: 277508 - DNA, 1791 bp, Artificial Sequence
  derived and/or modified sequence
atggaggatgccccccagaggctgcgctggcaggcccacctggagttcacccacaaccatgatgtgggggacctgacctgggacaagattgctgtgtccctgcccaggtctgagaagctgcggagcctggtgctggccggcatcccccacggcatgaggccccagctgtggatgaggctgagcggggccctgcagaagaagaggaacagcgagctgagctaccgggagatcgtgaagaacagcagcaatgatgagaccatcgccgccaagcagatcgagaaggacctgctgcggaccatgcccagcaatgcctgctttgcctccatgggcagcattggagtgccccggctgcggcgggtgctgcgggccctggcctggctgtacccagaaattggctactgccagggcaccggcatggtggccgcctgcctgctgctcttcctggaggaggaggatgccttctggatgatgtctgccatcatcgaggacctgctgcctgccagctacttcagcaccaccctgctgggcgtgcagacagaccagagggtgctgcggcacctgattgtgcagtacctgccccggctggacaagctgctgcaggagcatgacatcgagctgagcctcatcaccctgcactggttcctgacagcctttgcctctgtggtggacatcaagctgctgctgcgcatctgggacctcttcttctatgagggcagccgggtgctcttccagctgaccctgggcatgctgcacctgaaggaggaggagctgatccagagtgaaaattctgccagcatcttcaacaccctgagtgacatccccagccagatggaggatgctgagctgctgctgggcgtggccatgaggctggccggcagcctgacagatgtggccgtggagacccagaggaggaagcacctggcctacctgattgctgaccagggccagctgctgggcgccggcaccctgaccaacctgagccaggtggtgagaagaaggacccagaggaggaagagcaccatcacagccctgctgtttggagaagatgacctggaggccctgaaggccaagaacatcaagcagacagagctggtggccgacctgcgggaggccatcctgcgggtggcccggcacttccagtgcacagaccccaagaactgcagcgtggagctgaccccagactacagcatggagagccaccagagggaccatgaaaattatgtggcctgcagccgcagccacagaagaagagccaaggccctgctggactttgaaagacatgatgatgatgagctgggcttcaggaagaatgacatcatcaccatcgtgtcccagaaggatgagcactgctgggtgggggagctgaatggcctgcggggctggttccctgccaagtttgtggaggtgctggatgagaggagcaaggagtacagcattgctggagatgacagcgtgacagagggcgtgacagacctggtgcggggcaccctgtgcccagccctgaaggccctgtttgaacatggcctgaagaagcccagcctgctgggcggggcctgccacccctggctgttcatcgaggaggccgccggccgggaggtggagcgggactttgcctctgtgtacagccggctggtgctgtgcaagaccttccggctggatgaagatggcaaggtgctgaccccagaggagctgctgtacagagctgtgcagagcgtgaatgtgacccatgatgctgtgcacgcccagatggatgtgaagctgcggagcctcatctgtgtgggcctgaagtag

SEQ ID NO: 277509 - DNA, 1791 bp, Artificial Sequence
  derived and/or modified sequence
atggaggacgccccccagcggctgcggtggcaggcccacctggagttcacccacaaccatgatgtgggcgatctcacatgggacaagattgcagtgagtctgccacggtcggagaaacttagaagcctcgtcctggccggaattccacatggtatgcggccccaactctggatgcgccttagtggcgcattacagaagaagagaaattcagaactctcctaccgcgagatagtaaagaactcgtctaacgacgaaacaattgctgccaagcagatagaaaaggacctccttcggactatgccttccaacgcctgcttcgcatcgatgggttcaattggagtgccacgacttaggcgggttttgagagctttggcctggctgtaccctgagatagggtactgtcagggaaccggcatggttgcggcctgtctactactcttcttggaggaggaagacgccttctggatgatgtccgccatcattgaggatttactgcccgcgtcatacttcagtaccacacttctcggggtgcaaaccgatcagagagtcctgagacacctgattgtccagtaccttcccaggttagataaactgctgcaggagcatgatatcgaactcagtttgataacactgcactggtttctgactgctttcgcctctgtggttgacatcaaattactgctgcgaatctgggacctgttcttttacgagggctcaagagtactgtttcagctcacgctggggatgttacatcttaaagaggaggaactcattcagtccgaaaacagtgcgtctatattcaacactctgtctgatattccttcccaaatggaggacgccgagctgttactcggggtggccatgcgtctcgccgggagcctgacggacgtggctgtggagacccaacgccgtaagcatctcgcctacctaatagcagatcaaggccagctgctgggcgccggaaccctgaccaacctgtcccaggtggtccgacggaggacccagcggcgaaagtcaactataactgctttgcttttcggcgaggatgacctcgaagccctaaaggctaaaaatattaaacaaacagagctggtcgcagacctccgggaagccatcctccgtgtggcgcgacatttccagtgtacagatcctaagaactgctccgtggagctgaccccggactactcaatggagagtcaccagcgggatcacgagaattacgtggcatgttctcgcagtcatcgacgccgagccaaagccctcctggactttgagcgccatgacgacgatgagctcggcttcagaaagaacgacattattactatcgtgtcacagaaggatgaacattgttgggtgggggagctgaatggccttagaggctggttccctgcaaagtttgtggaggttcttgacgagcggagcaaagaatactctatagccggcgacgacagcgtgacggagggggtgaccgaccttgtgagaggaactctgtgtccagctctcaaagccttgtttgagcatgggcttaagaaacctagccttctgggtggagcttgccacccgtggttgtttattgaggaggcagcgggccgagaagtagaaagagacttcgcctctgtatactcccgcctggtcctgtgcaaaaccttccggctcgacgaggacgggaaggtgctcacgcccgaggagcttctctaccgtgctgtgcagtcagttaatgtgacacacgatgcagttcacgctcagatggacgtaaaactgaggtctctgatctgcgtgggccttaaatag

SEQ ID NO: 277510 - DNA, 1791 bp, Artificial Sequence
  derived and/or modified sequence
atggaagatgcgccacagagacttcgctggcaggcacacctggagttcacccataatcatgacgtcggagatcttacctgggacaagattgcggtgagcctgccccgaagcgaaaagcttagatctctggtgttggcgggaatacctcatggaatgaggccacagttgtggatgaggctttctggtgcactgcagaaaaaaaggaatagtgagctttcttatcgcgaaattgtcaagaatagctctaacgatgaaaccatcgcagcaaagcagattgagaaagacttactgaggaccatgccatcgaacgcctgctttgcgtctatgggctcaataggcgtgccccgactgagacgagttctccgcgctttagcttggctgtacccggagatcggctactgccagggtactggtatggtggcggcatgcctcctccttttcttagaagaagaggatgcattttggatgatgtccgccattatcgaggatctcttacccgcatcttatttcagcaccactcttcttggggtgcagaccgatcagagagtgctgcgtcacctcatcgtccaatacctaccacggctggacaaactgctccaggagcacgatatcgaattatccctcataacgctgcactggttcctgacagccttcgcatcagtggtagatattaagctgctgttgcgcatctgggacctgttcttctatgagggttcacgggtcctttttcaactgacattaggcatgttacacctaaaagaagaggagttgattcagtccgagaactctgctagcatctttaacacgctctcagacattccttcccagatggaagacgccgagttgctccttggcgtggctatgaggcttgctggctctctgaccgacgtggctgttgagacccaacggagaaaacacctagcctatctgatcgctgatcagggtcaactgttgggagccggtacgctaacaaatctcagccaggtcgtgcggagacgcactcaacgccgaaaaagcacaattaccgcacttctgttcggagaagacgatctggaggctctgaaggctaaaaacattaagcagacagagcttgtcgctgatctgcgggaggcgatcctccgcgtggctcgacattttcagtgtacagaccccaaaaattgctccgtggaactaactccagactactccatggagtcacatcagcgcgaccatgagaattacgtggcctgttcacggagccatagaaggagagccaaggcgttactggattttgaacgccatgacgatgatgaactagggtttcggaaaaacgatattatcactattgtgtctcagaaagacgagcattgctgggtgggtgagctgaacggattgcgaggttggtttccagccaagtttgtcgaggttctagacgagagatctaaggagtatagtatcgctggcgatgactcagtgaccgaaggcgtgaccgacctcgtgcgtggcacactgtgccccgctctgaaggccttattcgaacacggcctgaagaaaccgtctttactcggaggagcttgtcacccctggctatttatcgaggaggctgcaggaagggaagtagaacgtgacttcgcctccgtatactcgagactggtgctgtgcaagacgttcagattggacgaagacggcaaggtgctgacccctgaggagctgctttacagggccgttcagtccgtaaacgttactcatgatgccgtgcacgcacagatggatgtgaagctgcggtccctgatttgcgttggcttaaaatag

SEQ ID NO: 277511 - protein, 253 aa, Artificial Sequence
  derived and/or modified sequence
MEDAPQRLRWQAHLEFTHNHDVGDLTWDKIAVSLPRSEKLRSLVLAGIPHGMRPQLWMRLSGALQKKRNSELSYREIVKNSSNDETIAAKQIEKDLLRTMPSNACFASMGSIGVPRLRRVLRALAWLYPEIGYCQGTGMVAACLLLFLEEEDAFWMMSAIIEDLLPASYFSTTLLGVQTDQRVLRHLIVQYLPRLDKLLQEHDIELSLITLHWFLTAFASVVDIKLLLRIWDLFFYEGSRVLFQLTLGMLHLK

SEQ ID NO: 277512 - protein, 400 aa, Artificial Sequence
  derived and/or modified sequence
AWLQSAGELPSDGGCSRLRWQAHLEFTHNHDVGDLTWDKIAVSLPRSEKLRSLVLAGIPHGMRPQLWMRLSGALQKKRNSELSYREIVKNSSNDETIAAKQIEKDLLRTMPSNACFASMGSIGVPRLRRVLRALAWLYPEIGYCQGTGMVAACLLLFLEEEDAFWMMSAIIEDLLPASYFSTTLLGVQTDQRVLRHLIVQYLPRLDKLLQEHDIELSLITLHWFLTAFASVVDIKLLLRIWDLFFYEGSRVLFQLTLGMLHLKEEELIQSENSASIFNTLSDIPSQMEDAELLLGVAMRLAGSLTDVAVETQRRKHLAYLIADQGQLLGAGTLTNLSQVAQDGGPHLDPQHTGRRGHLEVQSAGAAENKPALPALPPSLAQSDHSCGVIQASSGFVHLRF

SEQ ID NO: 277513 - DNA, 762 bp, Artificial Sequence
  derived and/or modified sequence
atggaggacgccccccagagactgagatggcaggcccacctggagttcacccacaaccacgacgtgggcgacctgacctgggacaagatcgccgtgagcctgcccagaagcgagaagctgagaagcctggtgctggccggcatcccccacggcatgagaccccagctgtggatgagactgagcggcgccctgcagaagaagagaaacagcgagctgagctacagagagatcgtgaagaacagcagcaacgacgagaccatcgccgccaagcagatcgagaaggacctgctgagaaccatgcccagcaacgcctgcttcgccagcatgggcagcatcggcgtgcccagactgagaagagtgctgagagccctggcctggctgtaccccgagatcggctactgccagggcaccggcatggtggccgcctgcctgctgctgttcctggaggaggaggacgccttctggatgatgagcgccatcatcgaggacctgctgcccgccagctacttcagcaccaccctgctgggcgtgcagaccgaccagagagtgctgagacacctgatcgtgcagtacctgcccagactggacaagctgctgcaggagcacgacatcgagctgagcctgatcaccctgcactggttcctgaccgccttcgccagcgtggtggacatcaagctgctgctgagaatctgggacctgttcttctacgagggcagcagagtgctgttccagctgaccctgggcatgctgcacctgaagtag

SEQ ID NO: 277514 - DNA, 1203 bp, Artificial Sequence
  derived and/or modified sequence
gcctggctgcagagcgccggcgagctgcccagcgacggcggctgcagcagactgagatggcaggcccacctggagttcacccacaaccacgacgtgggcgacctgacctgggacaagatcgccgtgagcctgcccagaagcgagaagctgagaagcctggtgctggccggcatcccccacggcatgagaccccagctgtggatgagactgagcggcgccctgcagaagaagagaaacagcgagctgagctacagagagatcgtgaagaacagcagcaacgacgagaccatcgccgccaagcagatcgagaaggacctgctgagaaccatgcccagcaacgcctgcttcgccagcatgggcagcatcggcgtgcccagactgagaagagtgctgagagccctggcctggctgtaccccgagatcggctactgccagggcaccggcatggtggccgcctgcctgctgctgttcctggaggaggaggacgccttctggatgatgagcgccatcatcgaggacctgctgcccgccagctacttcagcaccaccctgctgggcgtgcagaccgaccagagagtgctgagacacctgatcgtgcagtacctgcccagactggacaagctgctgcaggagcacgacatcgagctgagcctgatcaccctgcactggttcctgaccgccttcgccagcgtggtggacatcaagctgctgctgagaatctgggacctgttcttctacgagggcagcagagtgctgttccagctgaccctgggcatgctgcacctgaaggaggaggagctgatccagagcgagaacagcgccagcatcttcaacaccctgagcgacatccccagccagatggaggacgccgagctgctgctgggcgtggccatgagactggccggcagcctgaccgacgtggccgtggagacccagagaagaaagcacctggcctacctgatcgccgaccagggccagctgctgggcgccggcaccctgaccaacctgagccaggtggcccaggacggcggcccccacctggacccccagcacaccggcagaagaggccacctggaggtgcagagcgccggcgccgccgagaacaagcccgccctgcccgccctgccccccagcctggcccagagcgaccacagctgcggcgtgatccaggccagcagcggcttcgtgcacctgagattctag

SEQ ID NO: 277515 - DNA, 762 bp, Artificial Sequence
  derived and/or modified sequence
atggaagacgcgccccagcggctcaggtggcaggctcatcttgaattcacacataatcacgacgtgggagatcttacatgggacaaaatcgccgtgagcttacctagaagtgagaagcttcgctctttggtcttggccggcatccctcacgggatgcgaccacagctctggatgagactgagcggggctctgcagaaaaaacgaaattccgaactgtcctaccgtgaaatcgtgaagaactcttctaatgatgaaactatagctgccaaacagatcgaaaaggatttgcttcggaccatgccttcaaacgcttgcttcgcaagcatggggagcatcggggttccgaggctgcggagagtactgagagccctggcctggctttacccagaaatcgggtactgccaggggactggcatggtcgcagcctgcctcttgctctttcttgaagaagaggacgccttctggatgatgtccgcgattatcgaggatctattaccggccagttacttctccacaacgctgttaggggtgcaaaccgatcaaagggttcttcgccacctcatagtccagtaccttccaaggctggacaaactgctccaggagcacgacatagagctatccctaattaccctgcactggtttctcacggcctttgcctctgtggttgatattaaattacttctgcggatttgggacttgtttttctacgaaggtagcagagtgcttttccagctgacactgggaatgttacacctgaaatag

SEQ ID NO: 277516 - DNA, 1203 bp, Artificial Sequence
  derived and/or modified sequence
gcttggctgcagtctgcaggcgagctcccctcggatgggggctgtagccggcttcgctggcaggcccatctcgaatttactcacaaccacgatgtcggggatctcacatgggataagatcgcagtttctctgcctcggagcgaaaagctgcggtccctggtcctagcaggaatcccacatggaatgaggccacagctgtggatgcggctgagcggtgctctgcagaagaagcgaaatagtgagctgtcttacagggagattgtgaaaaactcatcaaacgatgaaaccatcgcagccaaacagatcgaaaaggatctgctgaggactatgcctagcaacgcttgcttcgccagtatgggttctatcggtgtgccccgtttgcgccgggttcttagggccctcgcatggctttatcctgagataggctattgccagggaactggcatggtcgccgcttgtctgttgctattcttagaagaagaagatgctttctggatgatgtcagccatcatcgaggatttattacccgccagctatttctctaccacactgttaggcgtgcaaacagatcagcgtgtgcttcggcatttgatcgttcaatatctccccagactagacaaactgttacaggaacacgatattgagctgtctcttatcactcttcattggttcctaaccgccttcgctagcgtggtggacataaaactgcttctgcgaatatgggatctcttcttctacgagggctctagagttctttttcagttaacactagggatgctgcacctaaaagaagaagaactgattcaaagcgagaactccgcatccatctttaataccctgtcagatatcccttcacagatggaagacgccgaactgctgctcggtgtcgccatgagactggccggcagccttactgatgtcgcagttgagactcagaggagaaaacatctcgcttatctcatcgctgatcaaggccaactgttaggagccggtacactgactaacctgagccaggtggcacaggatggcgggcctcatcttgatcctcagcacacgggccgccgcggacacctggaagtgcagtccgccggcgcagctgagaataaacctgcactgcccgctctgcctccctctctggcccaaagtgatcactcatgcggggttatccaggccagcagcggtttcgtccatcttcggttttag

SEQ ID NO: 277517 - DNA, 762 bp, Artificial Sequence
  derived and/or modified sequence
atggaggatgccccccagaggctgcgctggcaggcccacctggagttcacccacaaccatgatgtgggggacctgacctgggacaagattgctgtgtccctgcccaggtctgagaagctgcggagcctggtgctggccggcatcccccacggcatgaggccccagctgtggatgaggctgagcggggccctgcagaagaagaggaacagcgagctgagctaccgggagatcgtgaagaacagcagcaatgatgagaccatcgccgccaagcagatcgagaaggacctgctgcggaccatgcccagcaatgcctgctttgcctccatgggcagcattggagtgccccggctgcggcgggtgctgcgggccctggcctggctgtacccagaaattggctactgccagggcaccggcatggtggccgcctgcctgctgctcttcctggaggaggaggatgccttctggatgatgtctgccatcatcgaggacctgctgcctgccagctacttcagcaccaccctgctgggcgtgcagacagaccagagggtgctgcggcacctgattgtgcagtacctgccccggctggacaagctgctgcaggagcatgacatcgagctgagcctcatcaccctgcactggttcctgacagcctttgcctctgtggtggacatcaagctgctgctgcgcatctgggacctcttcttctatgagggcagccgggtgctcttccagctgaccctgggcatgctgcacctgaagtag

SEQ ID NO: 277518 - DNA, 1203 bp, Artificial Sequence
  derived and/or modified sequence
gcctggctgcagagcgctggggagctgcccagtgatggcggctgcagccggctgcgctggcaggcccacctggagttcacccacaaccatgatgtgggggacctgacctgggacaagattgctgtgtccctgcccaggtctgagaagctgcggagcctggtgctggccggcatcccccacggcatgaggccccagctgtggatgaggctgagcggggccctgcagaagaagaggaacagcgagctgagctaccgggagatcgtgaagaacagcagcaatgatgagaccatcgccgccaagcagatcgagaaggacctgctgcggaccatgcccagcaatgcctgctttgcctccatgggcagcattggagtgccccggctgcggcgggtgctgcgggccctggcctggctgtacccagaaattggctactgccagggcaccggcatggtggccgcctgcctgctgctcttcctggaggaggaggatgccttctggatgatgtctgccatcatcgaggacctgctgcctgccagctacttcagcaccaccctgctgggcgtgcagacagaccagagggtgctgcggcacctgattgtgcagtacctgccccggctggacaagctgctgcaggagcatgacatcgagctgagcctcatcaccctgcactggttcctgacagcctttgcctctgtggtggacatcaagctgctgctgcgcatctgggacctcttcttctatgagggcagccgggtgctcttccagctgaccctgggcatgctgcacctgaaggaggaggagctgatccagagtgaaaattctgccagcatcttcaacaccctgagtgacatccccagccagatggaggatgctgagctgctgctgggcgtggccatgaggctggccggcagcctgacagatgtggccgtggagacccagaggaggaagcacctggcctacctgattgctgaccagggccagctgctgggcgccggcaccctgaccaacctgagccaggtggcccaggacggcggcccccacctggacccccagcacacaggccggcggggccacctggaggtgcagagcgctggagctgctgagaacaagccagccctgcctgccctgccccccagcctggcccagagcgaccacagctgtggggtcatccaggccagcagcggctttgtgcacctgcgcttctag

SEQ ID NO: 277519 - DNA, 762 bp, Artificial Sequence
  derived and/or modified sequence
atggaggacgccccccagcggctgcggtggcaggcccacctggagttcacacacaaccatgacgtaggggatcttacctgggataagattgcagtgtcactgcctcgctctgagaagctgagaagtctggtgttggcaggcattccacacggcatgcggccccagctgtggatgcgcctgagcggcgcgttgcagaagaaacgaaactcggaactgtcatatagagaaatcgtaaagaatagcagcaacgatgagaccatcgccgcgaagcagatcgagaaggatttgctgaggacaatgccctcgaatgcctgttttgcaagcatgggctcaatcggggtcccccgcctgcggcgtgtgctcagggcacttgcttggctctatcctgagattggatactgtcaaggcaccggaatggtggctgcctgtctcttactgttccttgaagaggaggatgcattttggatgatgtctgcgatcatcgaggatctgttgcctgcatcctacttctcaacgaccctcctgggagtacagaccgatcagagagtgctgaggcatctcattgttcagtaccttccccgattagacaagctgctccaggaacatgacatcgagctgagcctgatcaccttgcactggttcctgaccgccttcgcttcagtggtggatatcaaactgctactcagaatctgggatctgttcttctatgagggaagccgcgtgctgtttcagctgaccctgggaatgttacatttaaaatag

SEQ ID NO: 277520 - DNA, 1203 bp, Artificial Sequence
  derived and/or modified sequence
gcctggctgcagagcgccggcgagctgcccagcgacggcggctgcagtagattgcgttggcaggctcacctggagtttacacacaatcatgacgtgggggatctgacctgggataagattgccgtatccctcccccgttccgaaaaattgcgctccttggtcctggcaggcatcccacacggcatgcggccgcaactctggatgcggctgtctggcgcccttcagaagaaaagaaattcagagctgagctacagagaaattgtcaagaactcctcaaatgacgaaacgatcgcagctaagcagattgagaaagacctcctgcggaccatgccttctaacgcgtgcttcgcatccatggggagcatcggagtcccccggttgcggcgggtcttgcgggccctggcttggctctatccagagattgggtattgtcagggaacggggatggtcgctgcatgcctgctcctcttcctcgaagaagaggatgctttctggatgatgtccgccattattgaagatcttctccccgcctcatacttttccacaactttactgggggtgcagactgaccagcgtgtcctgcggcacttaatcgtccagtatctgccacgtctggacaagttgttgcaagagcatgatatcgagctaagccttataacactgcactggttcctgactgctttcgcttcagtggtggacattaagctactgctgaggatctgggacctgtttttctacgagggctccagggtcctatttcagctgactttagggatgctgcacctgaaagaagaagagcttattcagtccgaaaacagtgcatccatatttaacaccctgtccgacataccgtcccagatggaagatgcagaactgctgctcggcgtggccatgaggcttgcaggcagccttaccgacgtggctgtcgagactcagcgaagaaagcatctcgcctacctgattgcagaccaaggtcagcttctcggtgcaggtaccttaactaacctaagccaggtggcccaggatggcggcccccatctggaccctcagcatactggcagacgaggtcatcttgaggtccagtcagcaggggccgccgaaaacaaacctgccctcccggctctccccccgagcttggctcagagcgaccattcctgcggggtgattcaggcctcgtctggcttcgtgcatttacgcttttag

SEQ ID NO: 277521 - DNA, 762 bp, Artificial Sequence
  derived and/or modified sequence
atggaggatgccccacagaggcttcgatggcaggcccatctggagttcacgcataatcacgacgtgggggacctcacttgggataagattgcggtgagccttcctcggagtgagaaattgcggtccctggtgctggctggaataccccatggtatgagaccccagttatggatgaggctctccggcgctctgcagaagaagcgcaatagcgaattgtcatatcgcgaaattgttaagaattccagtaatgacgagactatagctgccaagcaaatagaaaaggatctcctgcgaacaatgcccagcaatgcctgttttgcttccatgggctctatcggtgttccacgcctgagacgggtgctgagggctcttgcctggctctatcctgagatcgggtactgccagggaaccgggatggtcgcagcatgtctgctcctctttttagaggaagaagacgcgttttggatgatgagtgccatcattgaagacctgctaccagcctcctacttctcaacaaccttgctgggagtccagacagaccaacgggtcttacgacacttgatcgtacagtacttgccaaggctggacaaactcctgcaggaacatgacattgagcttagcctaatcacattgcactggttcctgacggcctttgcctccgtggtggacatcaagctactgctgcggatttgggacctctttttctacgaagggagtcgcgtgttgttccagctaaccctaggaatgttgcatttgaagtag

SEQ ID NO: 277522 - DNA, 1203 bp, Artificial Sequence
  derived and/or modified sequence
gcatggctgcaaagtgccggtgaactgcctagtgacggcggatgttccaggctgagatggcaggcccacctcgaatttacccataatcatgatgtcggcgatctgacatgggataagattgctgtgagcctccccagaagcgaaaagcttagatctcttgttctggcaggtattccacatggcatgagacctcagctctggatgcggttgtccggggcactccaaaagaaaagaaattcagagctgagttatcgagaaatcgttaaaaacagttcaaacgatgagacgatcgctgccaagcagatcgagaaagaccttttaagaaccatgccatcaaacgcttgttttgctagcatggggagcatcggggtgcccaggctcaggagagtgctccgcgcattagcctggctctatccggagattggatactgtcagggaacgggtatggtagccgcttgtctgctcctgttcctcgaagaggaagacgccttttggatgatgtccgcgattattgaggacctgcttcctgcatcttatttcagcactaccctcctgggcgttcagacagaccagcgcgtgctccggcaccttattgtacagtacctgccaagactagataaattgctgcaggaacacgatatagaactgagtctgatcacgctgcactggtttctcaccgcctttgcttctgttgtggatatcaagctgctgcttagaatttgggacctgtttttttatgaaggtagccgagtgctgttccagctaacactaggcatgttgcatcttaaagaagaggaacttattcagagcgagaattctgcaagcatctttaatactctcagcgacatcccttcgcaaatggaagacgcagaactgcttttgggtgttgcgatgagactggctgggagcctgactgatgtcgccgtcgagacacagcggaggaagcatctcgcttacttgatcgccgatcagggccagctgcttggcgcaggcaccttgacgaacttgagtcaagtggcccaggatggcggacctcatcttgacccccaacacaccgggaggcggggacacctcgaggtgcagagcgcaggagctgctgagaacaagcccgcattgccagccttgccaccgagccttgcccagagtgaccactcttgtggtgtcatccaggcttctagcgggtttgtccatctgaggttctag

SEQ ID NO: 277523 - DNA, 1086 bp, Artificial Sequence
  derived and/or modified sequence
gccacgcgtgcgcttaggcgccgctgagcgctgactgggtgcgagtggggaagctgctaacccgacccggattggcgctgaggtggcccgtggggcagggcagatgattctggaccagatgaagcctgaggagccttccagctctaagatagcaggataggagacttctaagattggagctgcagaagacttgccagcccaccagcacaatgtcagaaggaagagtcagcagagcaaccagagttctactacgatgagtttggtttccgtgtgtacaaggaagaaggtgatgagcctggctccagtctgctggcgaactcccctctgatggaggatgctccacagaggctgcggtggcaggcccacctggagttcacccataaccacgatgtgggggatctcacctgggacaagattgccgtctccctaccccgctctgagaagctccgctccctggtgctggccggcatcccacatggcatgaggccacagctgtggatgcggctctctggggccctgcagaagaagaggaactctgagctgtcctaccgcgagattgtgaagaacagctccaacgatgagaccatcgctgccaagcagatcgagaaggacctgctccgcaccatgcccagcaacgcctgcttcgccagcatgggtagcatcggggtgccccgcctgcgcagggtgctccgggccctggcctggctctacccagagatcggctactgccagggcaccggcatggtggccgcctgcctcctgctgttcctggaggaggaggacgccttctggatgatgtctgccatcatcgaggacctgctccccgcctcctacttcagcaccaccctgctgggtgtccagactgaccagcgggtcctgcgccacctcattgtccagtacctgcctcgcctggacaagctgctccaggagcatgacattgagctgtccctgatcacactgcactggttcctcacggccttcgccagcgtggtggacatcaagctgctcctgcgcatctgggacctgtttttctacgagggctcccgggtgctgttccagctcacgctgggcatgctgcacctcaag

SEQ ID NO: 277524 - DNA, 1542 bp, Artificial Sequence
  derived and/or modified sequence
ggtgcgagtggggaagctgctaacccgacccggattggcgctgaggtggcccgtggggcagggcagatgattctggaccagatgaagcctgaggagccttccagctctaagatagcaggataggagacttctaagattggagctgcagaagacttgccagcccaccagcacaatgtcaggaagccatacacctgcctgtggccctttctcagccctgactccgagcatatggccccaggagatcttggccaagtacacgcagaaggaagagtcagcagagcaaccagagttctactacgatgagtttggtttccgtgtgtacaaggaagaaggtgatgagcctggctccagtctgctggcgaactcccctctgatggaggatgctccaggctgcggtggcaggcccacctggagttcacccataaccacgatgtgggggatctcacctgggacaagattgccgtctccctaccccgctctgagaagctccgctccctggtgctggccggcatcccacatggcatgaggccacagctgtggatgcggctctctggggccctgcagaagaagaggaactctgagctgtcctaccgcgagattgtgaagaacagctccaacgatgagaccatcgctgccaagcagatcgagaaggacctgctccgcaccatgcccagcaacgcctgcttcgccagcatgggtagcatcggggtgccccgcctgcgcagggtgctccgggccctggcctggctctacccagagatcggctactgccagggcaccggcatggtggccgcctgcctcctgctgttcctggaggaggaggacgccttctggatgatgtctgccatcatcgaggacctgctccccgcctcctacttcagcaccaccctgctgggtgtccagactgaccagcgggtcctgcgccacctcattgtccagtacctgcctcgcctggacaagctgctccaggagcatgacattgagctgtccctgatcacactgcactggttcctcacggccttcgccagcgtggtggacatcaagctgctcctgcgcatctgggacctgtttttctacgagggctcccgggtgctgttccagctcacgctgggcatgctgcacctcaaggaggaagagctgatccagtcagagaactcggcctccatcttcaacacgctatcggatatcccgtcgcagatggaggacgcggagctgcttctgggggtggccatgcggctggccggctccctcaccgatgtggccgtggagactcagcgccgcaagcacctggcctatctcattgcagaccagggccagctcctgggggccggcaccctcaccaacctctctcaggtggcccaggatggggggccgcaccttgacccacagcacacggggaggaggggtcaccttgaagttcagagcgcgggggctgcggaaaacaaaccagcccttcctgctctgccccccagcctggcccagtcagaccacagctgtggggtgatccaggcctcctcaggctttgtgcacctcaggttctga

SEQ ID NO: 277525 - protein, 154 aa, Artificial Sequence
  derived and/or modified sequence
MGLSDGEWQLVLNVWGKVEADIPGHGQEVLIRLFKGHPETLEKFDKFKHLKSEDEMKASEDLKKHGATVLTALGGILKKKGHHEAEIKPLAQSHATKHKIPVKYLEFISECIIQVLQSKHPGDFGADAQGAMNKALELFRKDMASNYKELGFQG

SEQ ID NO: 277526 - protein, 77 aa, Artificial Sequence
  derived and/or modified sequence
MGLSDGEWQLVLNVWGKVEADIPGHGQEVLIRLFKGHPETLEKFDKFKHLKSEDEMKASEDLKKHGATVLTALGGIL

SEQ ID NO: 277527 - protein, 143 aa, Artificial Sequence
  derived and/or modified sequence
MGLSDGEWQLVLNVWGKVEADIPGHGQEVLIRLFKGHPETLEKFDKFKHLKSEDEMKASEDLKKHGATVLTALGGILKKKGHHEAEIKPLAQSHATKHKIPVKYLEFISECIIQVLQSKHPGDFGADAQGAMNKALELFRKDM

SEQ ID NO: 277528 - protein, 106 aa, Artificial Sequence
  derived and/or modified sequence
MGLSDGEWQLVLNVWGKVEADIPGHGQEVLIRLFKGHPETLEKFDKFKHLKSEDEMKASEDLKKHGATVLTALGGILKKKGHHEAEIKPLAQSHATKHKIPVKYLE

SEQ ID NO: 277529 - protein, 136 aa, Artificial Sequence [sequence omitted]

SEQ ID NO: 277530 - DNA, 465 bp, Artificial Sequence
  derived and/or modified sequence
atggggctgtccgacggggagtggcagctagtgcttaatgtgtggggaaaagtcgaggctgatatccccggacacgggcaagaagtcctcattcgactattcaaagggcatcccgaaacacttgagaaatttgacaagtttaaacacctcaagagcgaagatgaaatgaaagccagcgaggacctcaagaaacatggagcaacggtgctgactgcattgggtggcattttaaaaaagaagggccaccatgaagcggagataaaaccactcgctcagtcgcacgcaaccaagcataaaatccctgtcaaatacttagaattcatttctgagtgtatcatacaggtgcttcagtccaaacaccctggagatttcggcgcagatgctcaaggggcgatgaacaaagcactggagttattccgcaaagatatggcctccaactataaggagctggggtttcagggttag

SEQ ID NO: 277531 - DNA, 465 bp, Artificial Sequence
  derived and/or modified sequence
atgggtttgagcgatggcgaatggcagctggtactgaatgtgtggggcaaagtagaagccgatatccctggtcacgggcaggaagtcctgataaggctgtttaaggggcacccggaaactctcgaaaagtttgacaaattcaagcacctgaagtcagaggacgagatgaaagcatccgaagaccttaagaaacatggcgccacagtcctgaccgctctgggtggtatactgaagaaaaaaggccaccacgaggccgagatcaagcccctggcacaaagccatgctacaaaacacaaaatcccggtgaaatacctggaattcatatctgagtgtattatccaggttctacaaagcaagcatcctggagatttcggggccgatgcccagggtgcgatgaacaaagcgttggagcttttcaggaaggacatggcttccaactacaaggagctggggtttcagggctag

SEQ ID NO: 277532 - DNA, 465 bp, Artificial Sequence
  derived and/or modified sequence
atggggctgtctgatggcgagtggcagctcgtcctgaacgtgtgggggaaagtggaagcggatatcccaggtcatggccaggaggtgctgattcggctgtttaagggccaccccgagactctagagaagtttgacaagttcaagcacctaaaaagcgaggacgagatgaaggcttcagaggatctgaagaaacatggagcaacagtattaactgcgctcgggggcatactgaaaaaaaaggggcatcatgaggccgaaataaaaccgctcgcacaatcccacgctacaaagcataagataccagtcaaatatcttgagttcatcagcgagtgtataattcaagtgttacagagcaagcaccccggcgattttggggcagacgcacagggagccatgaacaaagctctggagttgttcagaaaggacatggcctcaaattataaggagctggggtttcaggggtag

SEQ ID NO: 277533 - DNA, 465 bp, Artificial Sequence
  derived and/or modified sequence
atgggcctaagcgatggtgaatggcagctagtactgaatgtgtggggaaaggtcgaggctgatatcccgggccacggacaagaagttcttattcgtctgttcaaagggcaccccgaaactctagagaaattcgacaagttcaagcacctcaaaagcgaggatgagatgaaagcctcagaggatctgaaaaagcatggcgccactgttctaacagccttaggaggcatattgaagaagaaaggccaccatgaggcagaaataaaaccactggctcaatcacacgctactaaacacaagattccagtgaaatatttggagttcatttcagagtgcatcatccaggtgttacagagcaaacatcctggggattttggcgccgacgctcagggtgctatgaacaaagctttagagctgtttcgcaaagacatggcctctaactataaagagttgggtttccaggggtag

SEQ ID NO: 277534 - DNA, 234 bp, Artificial Sequence
  derived and/or modified sequence
atggggctctctgacggcgagtggcagctcgtgctgaatgtatgggggaaagtggaagctgatatacctgggcatggccaagaggtcctgattcggctttttaagggtcaccccgaaacacttgaaaagttcgacaagttcaaacacctgaagagtgaggatgagatgaaggcatctgaggacctgaaaaaacatggcgcaactgtcctcacagctctggggggtatcctgtag

SEQ ID NO: 277535 - DNA, 432 bp, Artificial Sequence
  derived and/or modified sequence
atgggactgtccgatggggagtggcaactggtcctgaatgtatggggcaaggtggaagccgatatccctggccatggccaggaggtactcattaggctcttcaagggtcatcctgaaactctggaaaaattcgacaaatttaaacatctgaaaagcgaagacgaaatgaaggcaagtgaagacctgaaaaagcacggagccacagtgctgaccgcactgggcgggatcctgaagaagaagggtcatcatgaggccgagattaaaccacttgcacagtctcatgccacgaagcacaaaattcccgtgaaatatctagaatttatttccgagtgcatcattcaggtcctgcaaagtaaacatccgggcgacttcggagctgatgcccagggcgccatgaataaagctctagagttatttcggaaagacatgtag

SEQ ID NO: 277536 - DNA, 321 bp, Artificial Sequence
  derived and/or modified sequence
atgggccttagcgatggagagtggcaacttgtattgaacgtgtggggaaaggtcgaggcggacattcccggccacggccaggaagtccttatcagactgtttaaggggcaccctgaaacactcgaaaaattcgacaagtttaagcacttaaaatcagaagacgaaatgaaggcatccgaggatctcaagaagcacggtgcaaccgttcttacggctcttggaggtatccttaaaaagaaaggccatcacgaggccgaaattaagcccttagcacagagccacgccacaaagcacaaaatcccggtaaaatatctggaatag

SEQ ID NO: 277537 - DNA, 321 bp, Artificial Sequence
  derived and/or modified sequence
atgggcctctctgacggggagtggcagctcgtgctcaatgtgtggggcaaggtcgaggcagatatcccgggccatggccaggaagtcctaatacgcctctttaagggtcacccagaaaccctagagaaatttgataagtttaaacatcttaaatcagaggatgagatgaaagcttctgaagatcttaaaaagcatggggctaccgtactcactgccctgggaggtattctcaaaaagaagggacaccatgaggctgaaattaaacctctcgctcagtcgcatgcgaccaagcacaaaatccccgtgaaatatttggaatag

SEQ ID NO: 277538 - DNA, 411 bp, Artificial Sequence
  derived and/or modified sequence
atggccgtgggagctgagaggttgggggaagtcctcattcgactgtttaaagggcaccctgagaccctcgaaaaattcgataagttcaaacatctgaagagtgaggatgaaatgaaggccagcgaagacttaaaaaaacacggagccactgttttgaccgctctggggggaatactcaaaaagaagggccatcacgaggctgaaataaagccgctggctcagtcacatgctactaagcacaagatacccgtgaaatacctagaatttatcagtgagtgcatcatccaagtccttcagagcaagcaccccggtgattttggcgcggatgcccagggcgcaatgaataaggccctcgagctgtttaggaaagacatggctagcaactataaggagctcggcttccagggttag

SEQ ID NO: 277539 - DNA, 465 bp, Artificial Sequence
  derived and/or modified sequence
atgggcctgagtgatggagagtggcagctggtgctgaatgtgtggggcaaggtggaggccgacatccctggccacggccaggaggtgctgatccgcctcttcaagggccaccctgagaccctggagaagtttgacaagttcaagcacctgaagtcagaagatgagatgaaggccagcgaggacctgaagaagcatggagccaccgtgctgacagccctgggcggcatcctgaagaagaagggccaccatgaagctgagatcaagcccctggcccagagccacgccaccaagcacaagatccctgtgaagtacctggagttcatcagcgagtgcatcatccaggtgctgcagagcaagcaccctggggactttggagcagatgcccagggcgccatgaacaaggccctggagctgttcaggaaggacatggccagcaactacaaggagctgggcttccagggctag

SEQ ID NO: 277540 - DNA, 234 bp, Artificial Sequence
  derived and/or modified sequence
atgggcctgagtgatggagagtggcagctggtgctgaatgtgtggggcaaggtggaggccgacatccctggccacggccaggaggtgctgatccgcctcttcaagggccaccctgagaccctggagaagtttgacaagttcaagcacctgaagtcagaagatgagatgaaggccagcgaggacctgaagaagcatggagccaccgtgctgacagccctgggcggcatcctgtag

SEQ ID NO: 277541 - DNA, 432 bp, Artificial Sequence
  derived and/or modified sequence
atgggcctgagtgatggagagtggcagctggtgctgaatgtgtggggcaaggtggaggccgacatccctggccacggccaggaggtgctgatccgcctcttcaagggccaccctgagaccctggagaagtttgacaagttcaagcacctgaagtcagaagatgagatgaaggccagcgaggacctgaagaagcatggagccaccgtgctgacagccctgggcggcatcctgaagaagaagggccaccatgaagctgagatcaagcccctggcccagagccacgccaccaagcacaagatccctgtgaagtacctggagttcatcagcgagtgcatcatccaggtgctgcagagcaagcaccctggggactttggagcagatgcccagggcgccatgaacaaggccctggagctgttcaggaaggacatgtag

SEQ ID NO: 277542 - DNA, 321 bp, Artificial Sequence
  derived and/or modified sequence
atgggcctgagtgatggagagtggcagctggtgctgaatgtgtggggcaaggtggaggccgacatccctggccacggccaggaggtgctgatccgcctcttcaagggccaccctgagaccctggagaagtttgacaagttcaagcacctgaagtcagaagatgagatgaaggccagcgaggacctgaagaagcatggagccaccgtgctgacagccctgggcggcatcctgaagaagaagggccaccatgaagctgagatcaagcccctggcccagagccacgccaccaagcacaagatccctgtgaagtacctggagtag

SEQ ID NO: 277543 - DNA, 411 bp, Artificial Sequence
  derived and/or modified sequence
atggctgtgggcgctgagcggctgggggaggtgctgatccgcctcttcaagggccaccctgagaccctggagaagtttgacaagttcaagcacctgaagtcagaagatgagatgaaggccagcgaggacctgaagaagcatggagccaccgtgctgacagccctgggcggcatcctgaagaagaagggccaccatgaagctgagatcaagcccctggcccagagccacgccaccaagcacaagatccctgtgaagtacctggagttcatcagcgagtgcatcatccaggtgctgcagagcaagcaccctggggactttggagcagatgcccagggcgccatgaacaaggccctggagctgttcaggaaggacatggccagcaactacaaggagctgggcttccagggctag

SEQ ID NO: 277544 - DNA, 1170 bp, Artificial Sequence
  derived and/or modified sequence
gagcatgttggcctggtcctttgctaggtactgtagagcaggtgagagagtgagggggaaggactccaaattagaccagttcttagccatgaagcagagactctgaagccagactacctgggtcccaatcttgggcttggtatttcctcgctgtgtgactctggactgcgccatggggctcagcgacggggaatggcagttggtgctgaacgtctgggggaaggtggaggctgacatcccaggccatgggcaggaagtcctcatcaggctctttaagggtcacccagagactctggagaagtttgacaagttcaagcacctgaagtcagaggacgagatgaaggcgtctgaggacttaaagaagcatggtgccaccgtgctcaccgccctgggtggcatccttaagaagaaggggcatcatgaggcagagattaagcccctggcacagtcgcatgccaccaagcacaagatccccgtgaagtacctggagttcatctcggaatgcatcatccaggttctgcagagcaagcatcccggggactttggtgctgatgcccagggggccatgaacaaggccctggagctgttccggaaggacatggcctccaactacaaggagctgggcttccagggctaggcccctgccgctcccacccccacccatctgggccccgggttcaagagagagcggggtctgatctcgtgtagccatatagagtttgcttctgagtgtctgctttgtttagtagaggtgggcaggaggagctgaggggctggggctggggtgttgaagttggctttgcatgcccagcgatgcgcctccctgtgggatgtcatcaccctgggaaccgggagtggcccttggctcactgtgttctgcatggtttggatctgaattaattgtcctttcttctaaatcccaaccgaacttcttccaacctccaaactggctgtaaccccaaatccaagccattaactacacctgacagtagcaattgtctgattaatcactggccccttgaagacagcagaatgtccctttgcaatgaggaggagatctgggctgggcgggccagctggggaagcatttgactatctggaacttgtgtgtgcctcctcaggtatggcagtgactcacctggttttaataaaacaacctgcaacatctca

SEQ ID NO: 277545 - DNA, 1197 bp, Artificial Sequence
  derived and/or modified sequence
gattagaccctccctggatgagagagagaaagtgaaggagggcaggggagggggacagcgagccattgagcgatctttgtcaagcatcccagaaggtataaaaacgcccttgggaccaggcagcctcaaaccccagctgttggggccaggacacccagtgagcccatacttgctctttttgtcttcttcagactgcgccatggggctcagcgacggggaatggcagttggtgctgaacgtctgggggaaggtggaggctgacatcccaggccatgggcaggaagtcctcatcaggctctttaagggtcacccagagactctggagaagtttgacaagttcaagcacctgaagtcagaggacgagatgaaggcgtctgaggacttaaagaagcatggtgccaccgtgctcaccgccctgggtggcatccttaagaagaaggggcatcatgaggcagagattaagcccctggcacagtcgcatgccaccaagcacaagatccccgtgaagtacctggagttcatctcggaatgcatcatccaggttctgcagagcaagcatcccggggactttggtgctgatgcccagggggccatgaacaaggccctggagctgttccggaaggacatggcctccaactacaaggagctgggcttccagggctaggcccctgccgctcccacccccacccatctgggccccgggttcaagagagagcggggtctgatctcgtgtagccatatagagtttgcttctgagtgtctgctttgtttagtagaggtgggcaggaggagctgaggggctggggctggggtgttgaagttggctttgcatgcccagcgatgcgcctccctgtgggatgtcatcaccctgggaaccgggagtggcccttggctcactgtgttctgcatggtttggatctgaattaattgtcctttcttctaaatcccaaccgaacttcttccaacctccaaactggctgtaaccccaaatccaagccattaactacacctgacagtagcaattgtctgattaatcactggccccttgaagacagcagaatgtccctttgcaatgaggaggagatctgggctgggcgggccagctggggaagcatttgactatctggaacttgtgtgtgcctcctcaggtatggcagtgactcacctggttttaataaaacaacctgcaacatctca

SEQ ID NO: 277546 - DNA, 1153 bp, Artificial Sequence
  derived and/or modified sequence
aatggcacctgccctaaaatagcttcccatgtgagggctagagaaaggaaaagattagaccctccctggatgagagagagaaagtgaaggagggcaggggagggggacagcgagccattgagcgatctttgtcaagcatcccagaagactgcgccatggggctcagcgacggggaatggcagttggtgctgaacgtctgggggaaggtggaggctgacatcccaggccatgggcaggaagtcctcatcaggctctttaagggtcacccagagactctggagaagtttgacaagttcaagcacctgaagtcagaggacgagatgaaggcgtctgaggacttaaagaagcatggtgccaccgtgctcaccgccctgggtggcatccttaagaagaaggggcatcatgaggcagagattaagcccctggcacagtcgcatgccaccaagcacaagatccccgtgaagtacctggagttcatctcggaatgcatcatccaggttctgcagagcaagcatcccggggactttggtgctgatgcccagggggccatgaacaaggccctggagctgttccggaaggacatggcctccaactacaaggagctgggcttccagggctaggcccctgccgctcccacccccacccatctgggccccgggttcaagagagagcggggtctgatctcgtgtagccatatagagtttgcttctgagtgtctgctttgtttagtagaggtgggcaggaggagctgaggggctggggctggggtgttgaagttggctttgcatgcccagcgatgcgcctccctgtgggatgtcatcaccctgggaaccgggagtggcccttggctcactgtgttctgcatggtttggatctgaattaattgtcctttcttctaaatcccaaccgaacttcttccaacctccaaactggctgtaaccccaaatccaagccattaactacacctgacagtagcaattgtctgattaatcactggccccttgaagacagcagaatgtccctttgcaatgaggaggagatctgggctgggcgggccagctggggaagcatttgactatctggaacttgtgtgtgcctcctcaggtatggcagtgactcacctggttttaataaaacaacctgcaacatctca

SEQ ID NO: 277547 - DNA, 582 bp, Artificial Sequence
  derived and/or modified sequence
gctataagacacctctccccacccccagccctggccgcttggctggaggctctgcgaggacagctggggagaaggggagctgtgactgcgccatggggctcagcgacggggaatggcagttggtgctgaacgtctgggggaaggtggaggctgacatcccaggccatgggcaggaagtcctcatcaggctctttaagggtcacccagagactctggagaagtttgacaagttcaagcacctgaagtcagaggacgagatgaaggcgtctgaggacttaaagaagcatggtgccaccgtgctcaccgccctgggtggcatccttaagaagaaggggcatcatgaggcagagattaagcccctggcacagtcgcatgccaccaagcacaagatccccgtgaagtacctggagttcatctcggaatgcatcatccaggttctgcagagcaagcatcccggggactttggtgctgatgcccagggggccatgaacaaggccctggagctgttccggaaggacatggcctccaactacaaggagctgggcttccagggctaggcccctgccgctcccacccccaccc

SEQ ID NO: 277548 - DNA, 418 bp, Artificial Sequence
  derived and/or modified sequence
cttggctggaggctctgcgaggacagctggggagaaggggagctgtgcccagatttaccaaagggaattgtcagctgtccaagggctagcaaattcctaggtcacctagattggattttctgaccataaaaactgtgggccaggtgcacagctgcctgaggggctcaaacctgtgcagactgcgccatggggctcagcgacggggaatggcagttggtgctgaacgtctgggggaaggtggaggctgacatcccaggccatgggcaggaagtcctcatcaggctctttaagggtcacccagagactctggagaagtttgacaagttcaagcacctgaagtcagaggacgagatgaaggcgtctgaggacttaaagaagcatggtgccaccgtgctcaccgccctgggtggcatcctta

SEQ ID NO: 277549 - DNA, 648 bp, Artificial Sequence
  derived and/or modified sequence
gcaagccaaaaccctgggcagactcaatccaaaaataaacaatcaaagagcatgttggcctggtcctttgctaggtactgtagagcaggtgagagagtgagggggaaggactccaaattagaccagttcttagccatgaagcagagactctgaagccagactacctgggtcccaatcttgggcttggtatttcctcgctgtgtgactctggactgcgccatggggctcagcgacggggaatggcagttggtgctgaacgtctgggggaaggtggaggctgacatcccaggccatgggcaggaagtcctcatcaggctctttaagggtcacccagagactctggagaagtttgacaagttcaagcacctgaagtcagaggacgagatgaaggcgtctgaggacttaaagaagcatggtgccaccgtgctcaccgccctgggtggcatccttaagaagaaggggcatcatgaggcagagattaagcccctggcacagtcgcatgccaccaagcacaagatccccgtgaagtacctggagttcatctcggaatgcatcatccaggttctgcagagcaagcatcccggggactttggtgctgatgcccagggggccatgaacaaggccctggagctgttccggaaggacatg

SEQ ID NO: 277550 - DNA, 515 bp, Artificial Sequence
  derived and/or modified sequence
gagagcattgatgaggtcaggaagcctcctgttgggtagaggagcaactaagagactgaacttggcccccaccctgaggctcacaagcttgaattgcacctgagttccaaaggagaagttgacattcttccagaacatatgcccagtgtcttcaacttgagatggagctgggatgccaagtctgcaaatactgcgccatggggctcagcgacggggaatggcagttggtgctgaacgtctgggggaaggtggaggctgacatcccaggccatgggcaggaagtcctcatcaggctctttaagggtcacccagagactctggagaagtttgacaagttcaagcacctgaagtcagaggacgagatgaaggcgtctgaggacttaaagaagcatggtgccaccgtgctcaccgccctgggtggcatccttaagaagaaggggcatcatgaggcagagattaagcccctggcacagtcgcatgccaccaagcacaagatccccgtgaagtacctggag

SEQ ID NO: 277551 - DNA, 551 bp, Artificial Sequence
  derived and/or modified sequence
agtgcccaacctcctccccttctttccacacgcacaaccaccccaccccctgtggcctgagctgtcctgcctcgccacaatggcacctgccctaaaatagcttcccatgtgagggctagagaaaggaaaagattagaccctccctggatgagagagagaaagtgaaggagggcaggggagggggacagcgagccattgagcgatctttgtcaagcatcccagaagactgcgccatggggctcagcgacggggaatggcagttggtgctgaacgtctgggggaaggtggaggctgacatcccaggccatgggcaggaagtcctcatcaggctctttaagggtcacccagagactctggagaagtttgacaagttcaagcacctgaagtcagaggacgagatgaaggcgtctgaggacttaaagaagcatggtgccaccgtgctcaccgccctgggtggcatccttaagaagaaggggcatcatgaggcagagattaagcccctggcacagtcgcatgccaccaagcacaagatccccgtgaagtacctggag

SEQ ID NO: 277552 - DNA, 1030 bp, Artificial Sequence
  derived and/or modified sequence
aaaccccagctgttggggccaggacacccagtgagcccatacttgctctttttgtcttcttcagactgcgccatggggctcagcgacggggaatggcagttggtgctgaacgtctgggggaagtcctcatcaggctctttaagggtcacccagagactctggagaagtttgacaagttcaagcacctgaagtcagaggacgagatgaaggcgtctgaggacttaaagaagcatggtgccaccgtgctcaccgccctgggtggcatccttaagaagaaggggcatcatgaggcagagattaagcccctggcacagtcgcatgccaccaagcacaagatccccgtgaagtacctggagttcatctcggaatgcatcatccaggttctgcagagcaagcatcccggggactttggtgctgatgcccagggggccatgaacaaggccctggagctgttccggaaggacatggcctccaactacaaggagctgggcttccagggctaggcccctgccgctcccacccccacccatctgggccccgggttcaagagagagcggggtctgatctcgtgtagccatatagagtttgcttctgagtgtctgctttgtttagtagaggtgggcaggaggagctgaggggctggggctggggtgttgaagttggctttgcatgcccagcgatgcgcctccctgtgggatgtcatcaccctgggaaccgggagtggcccttggctcactgtgttctgcatggtttggatctgaattaattgtcctttcttctaaatcccaaccgaacttcttccaacctccaaactggctgtaaccccaaatccaagccattaactacacctgacagtagcaattgtctgattaatcactggccccttgaagacagcagaatgtccctttgcaatgaggaggagatctgggctgggcgggccagctggggaagcatttgactatctggaacttgtgtgtgcctcctcaggtatggcagtgactcacctggttttaataaaacaacctgcaac

SEQ ID NO: 277553 - DNA, 465 bp, Artificial Sequence
  derived and/or modified sequence
atgggcctgagcgacggcgagtggcagctggtgctgaacgtgtggggcaaggtggaagcggatatcccgggacatggccaggaggtgcttatcagactttttaagggtcaccctgagaccctggaaaaatttgataagttcaaacatctcaaatctgaggatgagatgaaagcgtccgaggacctgaaaaaacacggagctaccgtgctaaccgctctcggcggcattttgaagaagaagggccaccacgaggctgaaattaaaccgctggctcagtcacatgctacaaagcataagatccctgtaaagtatctagagttcatctccgagtgtataatccaggtgttgcagtcaaaacatcctggcgactttggtgccgacgctcaaggcgcaatgaataaagcattggagctgtttcggaaagacatggcatccaactacaaggaactaggctttcagggctag

SEQ ID NO: 277554 - DNA, 465 bp, Artificial Sequence
  derived and/or modified sequence
atgggcctgagcgacggcgagtggcagctggtgctgaacgtgtgggggaaagtcgaagccgatatccccggacatggacaggaagtactgattaggctgtttaaaggccacccagagacactcgaaaaatttgacaagtttaagcacttgaagtctgaggacgaaatgaaggccagcgaggatctcaagaaacacggagctaccgtgctaacagcattgggggggattctcaaaaaaaaaggacatcatgaagctgagattaagcccctggcacagtctcacgccaccaagcataaaatacctgtcaagtacctggaatttatcagcgaatgtataatccaggtgctgcagtcaaagcaccctggagactttggcgccgatgcacagggcgccatgaacaaggctctcgagctctttcgaaaggacatggccagcaactataaagagctggggtttcagggttag

SEQ ID NO: 277555 - DNA, 465 bp, Artificial Sequence
  derived and/or modified sequence
atgggcctgagcgacggcgagtggcagctggtgctgaacgtgtggggcaaagtcgaagccgatattccgggtcatggtcaggaggtgctgatcagactctttaagggacacccggaaaccctggaaaagtttgataaatttaaacatttgaagagtgaggatgagatgaaggctagtgaagacctcaagaaacatggtgcgacggtgctcactgccctgggggggattctcaagaagaaggggcatcacgaggctgaaattaaaccactagctcaaagtcacgcaacaaagcataagatccctgtgaagtatctggagttcatttctgagtgcatcatacaggtgctccagtccaagcatccaggagatttcggcgccgatgcgcaaggcgcaatgaataaggcgctagaactgttcagaaaagatatggcctcaaattataaagaattagggtttcagggctag

SEQ ID NO: 277556 - DNA, 465 bp, Artificial Sequence
  derived and/or modified sequence
atgggcctgagcgacggcgagtggcagctggtgctgaacgtgtggggcaaagtggaggcagacattcccggccatggtcaagaggtactgattcgactgtttaaggggcaccctgagacactcgaaaagttcgataagtttaagcacctgaagtcagaggatgagatgaaggcttccgaggatctcaagaagcacggggctaccgtgctgaccgctcttggagggatcctgaagaaaaagggccaccatgaagccgaaatcaaaccactcgctcagtcccacgccaccaagcataagatcccagtcaagtacctcgagtttatttccgaatgtattattcaagttctccaaagcaaacatcccggtgattttggcgcagatgcccagggagcaatgaacaaggcgctggaactgtttcggaaagatatggcaagcaactataaggagcttggctttcaggggtag

SEQ ID NO: 277557 - DNA, 234 bp, Artificial Sequence
  derived and/or modified sequence
atgggcctgagcgacggcgagtggcagctggtgctgaacgtgtggggcaaggtagaagccgatattcctggtcacggacaggaggttctaattcgcctttttaagggtcaccccgaaaccctcgagaaatttgataagtttaagcacctgaagtcagaagacgaaatgaaggctagcgaggacctaaagaagcacggcgccactgtactcaccgccctggggggcatactctag

SEQ ID NO: 277558 - DNA, 432 bp, Artificial Sequence
  derived and/or modified sequence
atgggcctgagcgacggcgagtggcagctggtgctgaacgtgtggggcaaagtggaagctgacatcccaggtcacggacaggaagtgctcatacgactgttcaagggccatccagagaccttagaaaagtttgacaagtttaagcacctaaagtctgaggacgaaatgaaggcttcagaggacctcaaaaagcacggtgccacagtgctaaccgctctcggtggaatattgaaaaagaaggggcatcacgaggccgaaattaagcccctggctcaatcccatgcgacaaaacacaagatcccggtcaagtatctggaattcatttcagagtgtattattcaagtgctgcagtccaaacatcctggggattttggggcagacgcccagggggccatgaacaaagctctcgagttgtttcgaaaggatatgtag

SEQ ID NO: 277559 - DNA, 321 bp, Artificial Sequence
  derived and/or modified sequence
atgggcctgagcgacggcgagtggcagctggtgctgaacgtgtgggggaaagtcgaggccgacatccccggccacggccaggaagtgttgataaggctcttcaagggacatcctgaaacgctagaaaagtttgataagttcaagcacctgaagtcagaggacgagatgaaggcctccgaggatctcaagaagcacggggccacagtgctcaccgctctcggaggaattctcaagaagaagggtcaccatgaggccgaaatcaagcccctggcccaatctcacgcaacaaaacacaagattcctgtgaagtatcttgaatag

SEQ ID NO: 277560 - DNA, 321 bp, Artificial Sequence
  derived and/or modified sequence
atgggcctgagcgacggcgagtggcagctggtgctgaacgtgtggggcaaagtggaggccgacatccctggccacgggcaggaagtgctgatccggctcttcaagggccacccagaaacactggaaaagttcgacaagtttaagcaccttaagagtgaggacgaaatgaaggccagcgaggatctgaaaaaacatggcgcaaccgttctaacagccctgggggggattctgaaaaagaaagggcatcacgaagcagagatcaagccactcgcgcagtcacatgccaccaaacataaaatcccggttaagtatcttgaatag

SEQ ID NO: 277561 - DNA, 411 bp, Artificial Sequence
  derived and/or modified sequence
atggccgtgggcgccgagcggctgggcgaggtgctgatccggctgttcaaaggtcaccctgagactttggagaagttcgacaagttcaagcatctcaagtccgaggacgagatgaaggcaagtgaggacctgaagaaacacggagccactgttctcactgcgcttggggggattctgaagaagaaaggacaccacgaagccgaaatcaaacctttagcacaatctcatgctaccaaacacaagattcctgtcaaatacctcgagttcatctccgaatgcataatccaggttctgcagagcaagcatcccggggatttcggagctgacgcccaaggcgccatgaataaagctctggaactctttagaaaggatatggcgtccaactacaaagaactcggtttccaggggtag

SEQ ID NO: 277562 - DNA, 465 bp, Artificial Sequence
  derived and/or modified sequence
atgggcctgtcagacggtgagtggcagctagtgctcaatgtctggggtaaggtggaggccgatattccagggcatggtcaggaagttcttatccgcctcttcaaaggacatcctgagactctagagaaatttgataagtttaagcatttaaagtccgaggatgaaatgaaggcatcggaggatctgaagaaacacggggcaaccgtcttaaccgctcttggcggaatcctgaaaaaaaagggccaccacgaagcagaaatcaagccactagcgcagtctcacgcgacaaagcacaagatacctgtgaagtatctggaatttatctcggagtgtataatccaggtgttgcagtccaagcaccccggtgacttcggagctgatgcccagggggctatgaataaagccctggagttatttaggaaggacatggcctctaactacaaagaactgggcttccaaggatag

SEQ ID NO: 277563 - DNA, 465 bp, Artificial Sequence
  derived and/or modified sequence
atgggcctgtccgacggggagtggcaactggtgcttaacgtatggggaaaggtggaggctgatatccctgggcatggacaggaggtgctgatcaggttatttaaaggacatccggagactttggaaaagttcgacaagtttaaacatttgaagagcgaggacgaaatgaaagcctctgaggacctcaaaaagcatggcgctaccgtgctcacggctttgggtggtattctgaaaaagaaaggccaccacgaggccgaaatcaaacctctggctcagtcacacgccacaaagcacaagattcctgttaaatatcttgaattcatatccgagtgtataatacaggttttgcagagcaagcatcccggagactttggggctgacgcacagggtgcaatgaacaaggctcttgagctgtttcggaaggacatggcttcaaattataaagagctcggatttcagggatag

SEQ ID NO: 277564 - DNA, 465 bp, Artificial Sequence
  derived and/or modified sequence
atgggcctgtccgatggtgagtggcaacttgtcctaaacgtctggggaaaggtggaagcggacatccccggacacggccaggaagtattaatccgcctcttcaagggacaccccgagaccttggaaaagtttgataagttcaaacaccttaaaagcgaggacgagatgaaagcaagcgaagatctgaaaaaacatggcgcaacggttctgactgctttaggcggaattttgaagaaaaagggtcaccatgaggctgagatcaagcccctggcgcagagccatgctacgaaacacaagatcccagtaaagtacttggagttcatttcggaatgtattatacaggtgttgcagtccaagcacccaggtgactttggcgctgacgcccagggcgctatgaacaaggctctggagcttttccgcaaagacatggcaagtaattacaaggagctcggattccaaggatag

SEQ ID NO: 277565 - DNA, 465 bp, Artificial Sequence
  derived and/or modified sequence
atggggttatcagacggagaatggcagctggtcctgaatgtctggggcaaggttgaagccgacatcccaggacatggacaggaagtgttaatcaggcttttcaaaggacatccagaaaccctggaaaaattcgacaagtttaaacacctgaaatcggaagatgaaatgaaggcctctgaagatttgaaaaagcacggcgcaaccgtcttgacagcactgggcggaatcctgaaaaagaagggccaccacgaggcagaaatcaagcccctggcgcagagtcacgccactaagcataaaataccagtcaagtatctcgagttcatctcggaatgtattatacaggttctccaatctaagcaccctggagattttggagctgacgcacagggagcgatgaataaggcactggaactctttcggaaagatatggcaagcaattacaaggaacttggattccaagggtag

SEQ ID NO: 277566 - DNA, 234 bp, Artificial Sequence
  derived and/or modified sequence
atggggttgtcagatggcgagtggcagctcgttttgaacgtatgggggaaggtggaagcggacataccagggcacggccaggaagtgcttatccgcctctttaaggggcatccagaaactctggagaaatttgataaattcaagcacttaaaaagcgaggacgagatgaaggcctctgaagatctgaagaagcacggcgctaccgttctgacagccctaggcggaatcctatag

SEQ ID NO: 277567 - DNA, 432 bp, Artificial Sequence
  derived and/or modified sequence
atggggctctcagacggggagtggcagctcgtactcaacgtatggggaaaggttgaggctgatatccccggacacgggcaggaggtgctgatcaggctctttaaagggcacccggaaacactggagaagttcgataaattcaaacacctcaagtcagaggatgagatgaaagcgtccgaggatctgaagaaacacggtgcaaccgtgctgactgcccttggcggtattctcaagaagaaaggccaccacgaagcagaaatcaagccattagcccagtcacacgccactaagcacaaaattcccgtcaaatatctggaatttatcagtgaatgtatcattcaagtgctccagtcaaagcatccgggagactttggggctgacgcccagggagccatgaataaggcactggaactcttcagaaaagacatgtag

SEQ ID NO: 277568 - DNA, 321 bp, Artificial Sequence
  derived and/or modified sequence
atgggcctttcagacggcgaatggcagctggtgttgaacgtgtgggggaaagtggaagccgacatccccggacacgggcaggaagtgcttatacggctctttaagggacacccagagacactggaaaagtttgacaaatttaagcacctgaaaagcgaggatgagatgaaggccagcgaggatctcaaaaaacacggcgcaacagtgttgacagccctgggcggaatacttaagaaaaagggtcaccacgaagctgagatcaagcccttggcccagagtcacgccacaaagcacaaaatcccagtcaagtatctggagtag

SEQ ID NO: 277569 - DNA, 321 bp, Artificial Sequence
  derived and/or modified sequence
atgggtctgtcagatggagagtggcagttggtgttgaacgtctggggcaaagtggaagctgatattcctggtcatggccaggaggtcttgatccggctcttcaaaggacaccctgaaactcttgaaaagtttgacaagtttaagcacttaaagtctgaggatgagatgaaagcatcggaggacctgaaaaaacatggggcaactgtgctgaccgccctcgggggaatcctgaaaaaaaaaggacaccatgaggctgagatcaagccactggcccagtctcacgccaccaagcataagattcctgtaaagtatctcgaatag

SEQ ID NO: 277570 - DNA, 411 bp, Artificial Sequence
  derived and/or modified sequence
atggctgtaggggctgaaaggctcggtgaagttttgatccggctattcaagggtcaccctgagaccctagaaaagttcgataagtttaaacatctgaaatcagaggacgaaatgaaagcatctgaagatctcaagaagcacggtgccaccgttctgaccgccctgggcggaatcctaaaaaaaaaaggccatcacgaggcagagatcaagccgcttgcccagtctcacgcaaccaagcacaagataccagtgaagtacctcgagttcatttctgagtgcattatccaggtgctacagtcgaaacatccaggcgatttcggcgctgatgctcagggcgctatgaataaggcccttgagctattccgaaaggacatggccagcaattataaggagctgggatttcaggggtag

SEQ ID NO: 277571 - DNA, 465 bp, Artificial Sequence
  derived and/or modified sequence
atgggcctgagcgacggcgagtggcagctggtgctgaacgtgtggggcaaggtggaggccgacatccccggccacggccaggaggtgctgatcagactgttcaagggccaccccgagaccctggagaagttcgacaagttcaagcacctgaagagcgaggacgagatgaaggccagcgaggacctgaagaagcacggcgccaccgtgctgaccgccctgggcggcatcctgaagaagaagggccaccacgaggccgagatcaagcccctggcccagagccacgccaccaagcacaagatccccgtgaagtacctggagttcatcagcgagtgcatcatccaggtgctgcagagcaagcaccccggcgacttcggcgccgacgcccagggcgccatgaacaaggccctggagctgttcagaaaggacatggccagcaactacaaggagctgggcttccagggctag

SEQ ID NO: 277572 - DNA, 234 bp, Artificial Sequence
  derived and/or modified sequence
atgggcctgagcgacggcgagtggcagctggtgctgaacgtgtggggcaaggtggaggccgacatccccggccacggccaggaggtgctgatcagactgttcaagggccaccccgagaccctggagaagttcgacaagttcaagcacctgaagagcgaggacgagatgaaggccagcgaggacctgaagaagcacggcgccaccgtgctgaccgccctgggcggcatcctgtag

SEQ ID NO: 277573 - DNA, 432 bp, Artificial Sequence
  derived and/or modified sequence
atgggcctgagcgacggcgagtggcagctggtgctgaacgtgtggggcaaggtggaggccgacatccccggccacggccaggaggtgctgatcagactgttcaagggccaccccgagaccctggagaagttcgacaagttcaagcacctgaagagcgaggacgagatgaaggccagcgaggacctgaagaagcacggcgccaccgtgctgaccgccctgggcggcatcctgaagaagaagggccaccacgaggccgagatcaagcccctggcccagagccacgccaccaagcacaagatccccgtgaagtacctggagttcatcagcgagtgcatcatccaggtgctgcagagcaagcaccccggcgacttcggcgccgacgcccagggcgccatgaacaaggccctggagctgttcagaaaggacatgtag

SEQ ID NO: 277574 - DNA, 321 bp, Artificial Sequence
  derived and/or modified sequence
atgggcctgagcgacggcgagtggcagctggtgctgaacgtgtggggcaaggtggaggccgacatccccggccacggccaggaggtgctgatcagactgttcaagggccaccccgagaccctggagaagttcgacaagttcaagcacctgaagagcgaggacgagatgaaggccagcgaggacctgaagaagcacggcgccaccgtgctgaccgccctgggcggcatcctgaagaagaagggccaccacgaggccgagatcaagcccctggcccagagccacgccaccaagcacaagatccccgtgaagtacctggagtag

SEQ ID NO: 277575 - DNA, 411 bp, Artificial Sequence
  derived and/or modified sequence
atggccgtgggcgccgagagactgggcgaggtgctgatcagactgttcaagggccaccccgagaccctggagaagttcgacaagttcaagcacctgaagagcgaggacgagatgaaggccagcgaggacctgaagaagcacggcgccaccgtgctgaccgccctgggcggcatcctgaagaagaagggccaccacgaggccgagatcaagcccctggcccagagccacgccaccaagcacaagatccccgtgaagtacctggagttcatcagcgagtgcatcatccaggtgctgcagagcaagcaccccggcgacttcggcgccgacgcccagggcgccatgaacaaggccctggagctgttcagaaaggacatggccagcaactacaaggagctgggcttccagggctag

SEQ ID NO: 277576 - protein, 533 aa, Artificial Sequence
  derived and/or modified sequence
MKMRRYKLFLMFCMAGLCLISFLHFFKTLSYVTFPRELASLSPNLVSSFFWNNAPVTPQASPEPGGPDLLRTPLYSHSPLLQPLPPSKAAEELHRVDLVLPEDTTEYFVRTKAGGVCFKPGTKMLERPPPGRPEEKPEGANGSSARRPPRYLLSARERTGGRGARRKWVECVCLPGWHGPSCGVPTVVQYSNLPTKERLVPREVPRRVINAINVNHEFDLLDVRFHELGDVVDAFVVCESNFTAYGEPRPLKFREMLTNGTFEYIRHKVLYVFLDHFPPGGRQDGWIADDYLRTFLTQDGVSRLRNLRPDDVFIIDDADEIPARDGVLFLKLYDGWTEPFAFHMRKSLYGFFWKQPGTLEVVSGCTVDMLQAVYGLDGIRLRRRQYYTMPNFRQYENRTGHILVQWSLGSPLHFAGWHCSWCFTPEGIYFKLVSAQNGDFPRWGDYEDKRDLNYIRGLIRTGGWFDGTQQEYPPADPSEHMYAPKYLLKNYDRFHYLLDNPYQEPRSTAAGGWRHRGPEGRPPARGKLDEAEV

SEQ ID NO: 277577 - DNA, 569 bp, Artificial Sequence
  derived and/or modified sequence
acacctgggctcagcctctagggaggaaactgctgccatagagccttgaaagccaggcagaggggactagacactgtgcctcaaggatgaagatgagacgctacaagctctttctcatgttctgtatggccggcctgtgcctcatctccttcctgcacttcttcaagaccctgtcctatgtcaccttcccccgagaactggcctccctcagccctaacctggtgtccagctttttctggaacaatgccccggtcacgccccaggccagccccgagccaggaggccctgacctgctgcgtaccccactctactcccactcgcccctgctgcagccgctgccgcccagcaaggcggccgaggagctccaccgggtggacttggtgctgcccgaggacaccaccgagtatttcgtgcgcaccaaggccggcggcgtctgcttcaaacccggcaccaagatgctggagaggccgcccccgggacggccggaggagaagcctgagggggccaacggctcctcggcccggcggccaccccggtacctcctgagcgcccgggagcgcacggggggc

SEQ ID NO: 277578 - protein, 411 aa, Artificial Sequence
  derived and/or modified sequence
MLLKTVLLLGHVAQVLMLDNGLLQTPPMGWLAWERFRCNINCDEDPKNCISEQLFMEMADRMAQDGWRDMGYTYLNIDDCWIGGRDASGRLMPDPKRFPHGIPFLADYVHSLGLKLGIYADMGNFTCMGYPGTTLDKVVQDAQTFAEWKVDMLKLDGCFSTPEERAQGYPKMAAALNATGRPIAFSCSWPAYEGGLPPRVNYSLLADICNLWRNYDDIQDSWWSVLSILNWFVEHQDILQPVAGPGHWNDPDMLLIGNFGLSLEQSRAQMALWTVLAAPLLMSTDLRTISAQNMDILQNPLMIKINQDPLGIQGRRIHKEKSLIEVYMRPLSNKASALVFFSCRTDMPYRYHSSLGQLNFTGSVIYEAQDVYSGDIISGLRDETNFTVIINPSGVVMWYLYPIKNLEMSQQ

SEQ ID NO: 277579 - DNA, 1236 bp, Artificial Sequence
  derived and/or modified sequence
atgctgttaaagacagtcctactgctcgggcacgtggctcaggtgcttatgctggataatggccttctgcagaccccacccatgggctggctagcctgggaaagattccgctgtaacatcaattgcgacgaggatcccaagaattgtatctccgagcaactgttcatggagatggctgataggatggctcaggatggttggagggatatggggtacacctacctgaacatcgacgactgttggatcggaggccgcgacgcatctggccgccttatgccggatcctaagcgttttccacatggaattcctttcctggccgactatgtgcatagtcttgggttgaagctcgggatatatgcagatatgggcaactttacgtgtatgggctaccctgggaccacactagacaaagtcgtgcaagacgcccaaacatttgcagagtggaaagtggatatgctgaaattagacggctgtttctccacccccgaagagagagctcagggttatcccaagatggccgctgccctgaacgccacaggcaggcctatcgccttttcctgtagctggccagcttatgagggagggcttcctccgcgcgtcaattacagtctacttgcagacatttgcaatctctggcggaactacgacgacatacaagactcatggtggagtgttctctctatcttgaattggtttgtggagcatcaagacattctgcaacctgttgcaggccctggtcattggaacgacccagatatgttactcattggcaatttcggcctatccctggagcagtcacgggctcagatggccctctggaccgttctggccgcacctctgcttatgagcacagacctcaggacaatctctgctcagaatatggacatcctgcagaaccctctgatgattaaaatcaatcaggatcccctgggaatccagggaagaaggattcacaaggagaaatcattgatagaggtttatatgagacctttgtccaataaagcctcagctctggtttttttctcgtgtagaaccgatatgccttataggtaccactcgtctcttggtcagctgaatttcaccggctctgtcatctatgaagcccaagatgtttattctggagacattatctctggacttagggacgagacgaactttactgtaattataaatccctccggcgtggtaatgtggtacctttatccaatcaagaatcttgaaatgagtcagcagtag

SEQ ID NO: 277580 - DNA, 1236 bp, Artificial Sequence
  derived and/or modified sequence
atgctcctcaaaacagtcctgctgctcgggcacgtggcccaggtgttgatgctggataatgggctccttcagacaccgcccatgggatggttagcatgggagcgcttccgctgcaatatcaactgcgatgaagatccgaagaattgcattagtgaacagctgttcatggaaatggccgatcggatggcccaggacgggtggcgagacatggggtacacttatctgaacatcgatgactgttggatcgggggccgcgacgcgtccgggagactcatgcctgatccgaagcggtttccacacggaatacccttcctggccgactacgtccactccctcggacttaaacttgggatatatgcagatatggggaattttacctgtatggggtatccaggtactacattggataaggtggtacaggacgcacagaccttcgcggagtggaaagttgacatgcttaagcttgatggctgtttctctaccccagaggagagagctcagggttatccaaagatggcagccgctctaaacgcgaccggcaggcctattgcgttttcgtgtagctggcccgcctacgaaggcggattgccgcccagagtgaactattctctgcttgccgacatatgcaacctctggcggaattatgatgacattcaggacagctggtggagcgttctgtctattcttaattggtttgtggagcaccaggatattctacaacccgtggctgggcccggccactggaatgatcccgacatgctccttatcggtaacttcggtctgtccttagaacaatccagggcacaaatggccttgtggactgtcctggctgctccgctcctaatgagcactgacttgaggacaataagcgcccagaatatggatattctgcagaatcctctcatgattaagataaaccaggaccctcttggcatccagggtcggcgcattcacaaggaaaagagcctaattgaggtctacatgcgtcctctgtcaaataaggcaagcgctctggtattcttcagctgtaggactgatatgccatataggtaccactcctctctcgggcagctgaactttactggcagtgtgatatacgaggcgcaggatgtctacagcggggacattattagtggtctgcgggacgagaccaactttacagtgattatcaacccctcgggagtggtgatgtggtatctgtatcctattaagaatctggaaatgtctcagcagtag

SEQ ID NO: 277581 - DNA, 1236 bp, Artificial Sequence
  derived and/or modified sequence
atgctgctaaaaacggttttgctgctcgggcatgtggcccaggtgctcatgttggacaatggcctactgcagactcccccaatggggtggttagcatgggaacgcttcagatgcaacattaactgcgacgaggatccaaagaattgcatcagcgaacagctgtttatggagatggccgatcgcatggcccaggacgggtggcgcgacatgggatacacgtacttgaacatagatgattgttggatcggaggcagagatgctagtggcagactgatgcctgaccccaaacgctttccacacggcatacccttcttggccgactatgtccactccctgggattgaaattgggaatttatgcagacatggggaacttcacttgcatgggctatcccgggacaaccctggacaaagtcgtccaggacgcacagacatttgcagagtggaaagtcgacatgttgaaacttgacggatgcttttcaacgcccgaagagcgggcccaagggtatcccaagatggcggcagctttgaacgcaaccggccggcccatagccttctcctgctcttggcccgcctatgaggggggtctgccgccaagagtgaactacagtctcctggccgatatatgtaatctctggagaaactatgatgatattcaagactcttggtggagtgtgctctctatccttaattggttcgtggaacaccaggatatactccagcctgtggccgggcctggccattggaacgaccccgatatgcttctgatcgggaattttggcctgagtctggagcagtcacgagcccaaatggccttgtggaccgtgctggccgcacctctgctgatgtccaccgacctcagaactatttctgcgcagaatatggacatcctgcagaatcctctcatgatcaaaattaaccaggaccccctgggtatccagggaagaaggatccataaagaaaagagtctaatagaggtgtatatgagaccgttgtccaataaagcaagcgctctggtcttttttagctgccggacagatatgccatatagatatcattccagtcttggacaactgaatttcaccggatcagtgatctacgaagcccaagacgtgtactccggggatataattagcggactccgtgacgagacgaattttactgtgataatcaacccgagcggcgtggtgatgtggtacctgtatcccatcaaaaatttggagatgagtcagcaatag

SEQ ID NO: 277582 - DNA, 1236 bp, Artificial Sequence
  derived and/or modified sequence
atgctgctgaagacagtgctgctgctgggccacgtggcccaggtgctgatgctggacaatggcctgctgcagaccccacccatgggctggctggcctgggagcgcttccgctgcaacatcaactgtgatgaggaccccaagaactgcatcagcgagcagctgttcatggagatggctgacaggatggcccaggacggctggagggacatgggctacacctacctgaacattgatgactgctggattggaggaagagatgccagcggccgcctgatgccagaccccaagcgcttcccccacggcatccccttcctggccgactatgtgcacagcctgggcctgaagctgggcatctatgctgacatgggcaacttcacctgcatgggctacccaggcaccaccctggacaaggtggtgcaggatgcccagacctttgctgagtggaaggtggacatgctgaagctggatggctgcttcagcaccccagaggagcgggcccagggctaccccaagatggccgccgccctgaatgccaccggccggcccatcgccttcagctgctcctggccagcctatgagggcggcctgcccccccgggtgaactacagcctgctggccgacatctgcaacctgtggagaaattatgatgacatccaggacagctggtggagcgtgctgagcatcctgaactggtttgtggagcaccaggacatcctgcagcctgtggccggccctggccactggaatgaccctgacatgctgctgattggcaactttggcctgagcctggagcagagccgggcccagatggccctgtggacagtgctggccgcccccctgctgatgagcacagacctgcggaccatcagcgcccagaacatggacatcctgcagaaccccctgatgatcaagatcaaccaggaccccctgggcatccagggccgccgcatccacaaggagaagagcctcatcgaggtgtacatgaggcccctgagcaacaaggccagcgccctggtgttcttcagctgcaggacagacatgccctaccgctaccacagcagcctgggccagctgaacttcaccggcagcgtcatctatgaggcccaggatgtgtacagcggggacatcatcagcggcctgagagatgagaccaacttcaccgtcatcatcaaccccagcggcgtggtgatgtggtacctgtaccccatcaagaacctggagatgagccagcagtag

SEQ ID NO: 277583 - DNA, 3694 bp, Artificial Sequence
  derived and/or modified sequence
ctggaacgcttcggacttatcaggttaccggattcgagtcagaagcggcggcaggtctgaacgcttcggtaggataagtgcggtgggagggggctctgcggttttggggagcccagggcgggaacccggacccggctggaagtccggagcctggccgcagccccgcccctccgctctttcttggtgaccttaagccagtggctgcctttttctgagcccgggcggggccgaaggcggcccgtaggccctcgggactcccagcactgcagagggtgtgaggtctgacatccaagacacgttgtttcgtatttctgaaggaagaactgaagctccgggaagtgatggctggggatggggcgggcaacttggggaccgagtgtacgatccacgcctaaggttgagggcggccgagctagccaggcagccgtgaccccagtgcttttcagacgtttcttagcttccagagcccaacacatacagctgatacacgcagaccagatctggtcaggtcctcggaagctgagtccagagcgatgctgctgaagacagtgctcttgctgggacatgtggcccaggtgctgatgctggacaatgggctcctgcagacaccacccatgggctggctggcctgggaacgcttccgctgcaacattaactgtgatgaggacccaaagaactgcataagtgaacagctcttcatggagatggctgaccggatggcacaggatggatggcgggacatgggctacacatacctcaacattgatgactgctggatcggtggtcgcgatgccagtggccgcctgatgccggatcccaagcgcttccctcatggcattcctttcctggctgactacgttcactccctgggcctgaagttgggtatctacgcggacatgggcaacttcacctgcatgggttacccaggcaccacactggacaaggtggtccaggatgctcagaccttcgccgagtggaaggtagacatgctcaagctggatggctgcttctccacccccgaggagcgggcccaggggtaccccaagatggctgctgccctgaatgccacaggccgccccatcgccttctcctgcagctggccagcctatgaaggcggcctccccccaagggtgaactacagtctgctggcggacatctgcaacctctggcgtaactatgatgacatccaggactcctggtggagcgtgctctccatcctgaattggttcgtggagcaccaggacatactgcagccagtggccggccctgggcactggaatgaccctgacatgctgctcattgggaactttggtctcagcttagagcaatcccgggcccagatggccctgtggacggtgctggcagcccccctcttgatgtccacagacctgcgtaccatctccgcccagaacatggacattctgcagaatccactcatgatcaaaatcaaccaggatcccttaggcatccagggacgcaggattcacaaggaaaaatctctcatcgaagtgtacatgcggcctctgtccaacaaggctagcgccttagtcttcttcagctgcaggaccgatatgccttatcgctaccactcctcccttggccagctgaacttcaccgggtctgtgatatatgaggcccaggacgtctactcaggtgacatcatcagtggcctccgagatgaaaccaacttcacagtgatcatcaacccttcaggggtagtgatgtggtacctgtatcccatcaagaacctggagatgtcccagcagtgaggagctgggacatgtgacaggctgtggtggcaccactgagcctagaccatggagccttggcatgcccagggcaagtggggaggttctctgctccccaggcctgctcggtgactgaccccatcatacccaaagtgcaatctcacggccaggttctatgccctgtccaagcgtaaaccctcttggaaacttcttttggggcaattttcctgtggccttcctggcctctacttccatgtgcgcagccccacagacgttgctgagcaactcgccagcctcctgagctccatgcccatcaggactctagcctctgaccttgctgttgactctgaaatcaggatttggaagttttcgaattaggagtagagagatctgacctcttgccaggaatgcccatggatcatgtgattggcttttctacccatagagggccttgcagcctgataccacctgggagtgagggtcacaaaggagaccttggctccctcaggtcaccaataaacctgttctttaatcaagtagttgtaatatggacctggggtacctttagttagggactctggtggcactacacggggtgctggattcaaatctcacctctatggatgatgtctggcatcgtctggcccctccttttccaaagtgaccagaagattgtacttcctagagatgccagacttgcctcacacccaggagctgcccctgctgtgcctggtatgctggcagtggtgatggtgacaacacaatgaggccaagtagcaatgctcccaggtcctgcagcttgtgctctgcccagcagtgcccctggcccagcacctcagcctgctcttctctctggtggctccaccccaacccctacttcttttcctttatttctctcccaacctggctgcaaaggaggttcatattccccagatgtgtccacaaacctgtccaggagttgtgtcttaaaattgatttcctgtccctcttcctaaggacaggggtaacagtcaaagtgaaggaatgatgggttcttgcctgtcttgctttggtccgtatttcccaagccctcctcttttagccaaggctacagggcacttgtcttccctggtggctctcccctttggagagagctagtggcagagcaacctagctaggtcctccttgggctttgaatgcaggagcacccagtgccccaggccttgcactgtgctgcccaaggagtattttctgggtggatctcccatactcctcagggttctgaggtccttgtatttagggtatggtgtaaaaacttacatatgcacattttgttacatcatttaagatgattgaagctttactggttaagtatagggtcaccagagaaagttcctttccccagttgatgtcttgaggctgttgagaaacttaggacagaagcctacctcatcccaggcctgcccctccgtgcatagctctgcctttgggtcttgttcatagtgctgttcaggcaaaatggaatagtctcaggtgggaacaccttctcttgctagctccaggaaggctttgtgggaaatgagttgagaccatggacttgggagttgggggccagagttgagcctggacttgaccaattaattcccttacctttcagcccaagatagctacatgtctttacttgctgtataagttttccttttgtcctgggggtgcctgattgatcctatctcttcacccttcattctttcaacaaacatgccatctatctcccaggacatttattcccttctattcaaggccagttaggaatgcaattatttttttttttcagttaaatacagacttgtttggacgcaaggtaccctttctctttttaaaaactttttatcatgaaaactttcaaatacaaaaataaaatggtagagtgaacctccatgtacccagcatccagctccagtaaccat

SEQ ID NO: 277584 - DNA, 1869 bp, Artificial Sequence
  derived and/or modified sequence
gccccgccctcactggaacgcttcggacttatcaggttaccggattcgagtcagaagcggcggcaggtctgaacgcttcgcttccagagcccaacacatacagctgatacacgcagaccagatctggtcaggtcctcggaagctgagtccagagcgatgctgctgaagacagtgctcttgctgggacatgtggcccaggtgctgatgctggacaatgggctcctgcagacaccacccatgggctggctggcctgggaacgcttccgctgcaacattaactgtgatgaggacccaaagaactgcataagtgaacagctcttcatggagatggctgaccggatggcacaggatggatggcgggacatgggctacacatacctcaacattgatgactgctggatcggtggtcgcgatgccagtggccgcctgatgccggatcccaagcgcttccctcatggcattcctttcctggctgactacgttcactccctgggcctgaagttgggtatctacgcggacatgggcaacttcacctgcatgggttacccaggcaccacactggacaaggtggtccaggatgctcagaccttcgccgagtggaaggtagacatgctcaagctggatggctgcttctccacccccgaggagcgggcccaggggtaccccaagatggctgctgccctgaatgccacaggccgccccatcgccttctcctgcagctggccagcctatgaaggcggcctccccccaagggtgaactacagtctgctggcggacatctgcaacctctggcgtaactatgatgacatccaggactcctggtggagcgtgctctccatcctgaattggttcgtggagcaccaggacatactgcagccagtggccggccctgggcactggaatgaccctgacatgctgctcattgggaactttggtctcagcttagagcaatcccgggcccagatggccctgtggacggtgctggcagcccccctcttgatgtccacagacctgcgtaccatctccgcccagaacatggacattctgcagaatccactcatgatcaaaatcaaccaggatcccttaggcatccagggacgcaggattcacaaggaaaaatctctcatcgaagtgtacatgcggcctctgtccaacaaggctagcgccttagtcttcttcagctgcaggaccgatatgccttatcgctaccactcctcccttggccagctgaacttcaccgggtctgtgatatatgaggcccaggacgtctactcaggtgacatcatcagtggcctccgagatgaaaccaacttcacagtgatcatcaacccttcaggggtagtgatgtggtacctgtatcccatcaagaacctggagatgtcccagcagtgaggagctgggacatgtgacaggctgtggtggcaccactgagcctagaccatggagccttggcatgcccagggcaagtggggaggttctctgctccccaggcctgctcggtgactgaccccatcatacccaaagtgcaatctcacggccaggttctatgccctgtccaagcgtaaaccctcttggaaacttcttttggggcaattttcctgtggccttcctggcctctacttccatgtgcgcagccccacagacgttgctgagcaactcgccagcctcctgagctccatgcccatcaggactctagcctctgaccttgctgttgactctgaaatcaggatttggaagttttcgaattaggagtagagagatctgacctcttgccaggaatgcccatggatcatgtgattggcttttctacccatagagggccttgcagcctgataccacctgggagtgagggtcacaaaggagaccttg

SEQ ID NO: 277585 - DNA, 1856 bp, Artificial Sequence
  derived and/or modified sequence
ctggaacgcttcggacttatcaggttaccggattcgagtcagaagcggcggcaggtctgaacgcttcgagcccaacacatacagctgatacacgcagaccagatctggtcaggtcctcggaagctgagtccagagcgatgctgctgaagacagtgctcttgctgggacatgtggcccaggtgctgatgctggacaatgggctcctgcagacaccacccatgggctggctggcctgggaacgcttccgctgcaacattaactgtgatgaggacccaaagaactgcataagtgaacagctcttcatggagatggctgaccggatggcacaggatggatggcgggacatgggctacacatacctcaacattgatgactgctggatcggtggtcgcgatgccagtggccgcctgatgccggatcccaagcgcttccctcatggcattcctttcctggctgactacgttcactccctgggcctgaagttgggtatctacgcggacatgggcaacttcacctgcatgggttacccaggcaccacactggacaaggtggtccaggatgctcagaccttcgccgagtggaaggtagacatgctcaagctggatggctgcttctccacccccgaggagcgggcccaggggtaccccaagatggctgctgccctgaatgccacaggccgccccatcgccttctcctgcagctggccagcctatgaaggcggcctccccccaagggtgaactacagtctgctggcggacatctgcaacctctggcgtaactatgatgacatccaggactcctggtggagcgtgctctccatcctgaattggttcgtggagcaccaggacatactgcagccagtggccggccctgggcactggaatgaccctgacatgctgctcattgggaactttggtctcagcttagagcaatcccgggcccagatggccctgtggacggtgctggcagcccccctcttgatgtccacagacctgcgtaccatctccgcccagaacatggacattctgcagaatccactcatgatcaaaatcaaccaggatcccttaggcatccagggacgcaggattcacaaggaaaaatctctcatcgaagtgtacatgcggcctctgtccaacaaggctagcgccttagtcttcttcagctgcaggaccgatatgccttatcgctaccactcctcccttggccagctgaacttcaccgggtctgtgatatatgaggcccaggacgtctactcaggtgacatcatcagtggcctccgagatgaaaccaacttcacagtgatcatcaacccttcaggggtagtgatgtggtacctgtatcccatcaagaacctggagatgtcccagcagtgaggagctgggacatgtgacaggctgtggtggcaccactgagcctagaccatggagccttggcatgcccagggcaagtggggaggttctctgctccccaggcctgctcggtgactgaccccatcatacccaaagtgcaatctcacggccaggttctatgccctgtccaagcgtaaaccctcttggaaacttcttttggggcaattttcctgtggccttcctggcctctacttccatgtgcgcagccccacagacgttgctgagcaactcgccagcctcctgagctccatgcccatcaggactctagcctctgaccttgctgttgactctgaaatcaggatttggaagttttcgaattaggagtagagagatctgacctcttgccaggaatgcccatggatcatgtgattggcttttctacccatagagggccttgcagcctgataccacctgggagtgagggtcacaaaggagaccttggctccc

SEQ ID NO: 277586 - DNA, 1236 bp, Artificial Sequence
  derived and/or modified sequence
atgctgctgaagaccgtgctgctgctgggccacgtggcccaggtgctgatgctcgacaatgggcttctgcagaccccacccatgggatggctggcctgggaacgtttcaggtgtaatatcaactgcgatgaggaccccaaaaattgcatcagtgaacagctgtttatggagatggcagatcggatggcccaggatgggtggcgggacatgggctacacctacctgaatatcgatgactgttggataggaggaagagatgccagcggccgcctaatgccagacccaaagcgattcccacacggaattcctttcctggccgactatgtgcactcattgggtctgaagttgggaatctacgctgatatggggaattttacttgcatggggtacccaggcactaccctggacaaggtggtccaggacgctcaaacctttgcagagtggaaggtggatatgctcaaactggacgggtgttttagtaccccggaggaaagagctcagggataccctaagatggctgccgcactcaacgccaccggacgccctatcgctttttcttgtagttggcccgcatacgaagggggactgccgccacgggtgaactatagcctgctagcggacatatgtaatctatggcggaattacgacgatattcaagattcatggtggtcagtactctctatacttaactggttcgttgagcatcaagatattctccagcctgtagccggacccggacattggaatgaccccgacatgcttctcattggcaattttggactctccctggagcagagccgcgctcagatggctctgtggactgtgttggctgcgccactgcttatgtccaccgacctacggacaatcagcgcacagaacatggacattcttcagaatcctcttatgattaagattaaccaggatcccctggggattcaggggcgcaggatccacaaagagaagtcactgatcgaggtgtacatgcgcccactgtccaataaggctagtgcattggtttttttctcctgtaggacagatatgccataccgctaccactcaagcttgggacagctgaacttcacggggagcgtgatatatgaggcccaggacgtgtacagcggcgacattataagcggcctgagggacgagacgaatttcaccgtgattatcaacccgagtggagtcgtcatgtggtatctgtaccctatcaagaatttagagatgtcacagcaatag

SEQ ID NO: 277587 - DNA, 1236 bp, Artificial Sequence
  derived and/or modified sequence
atgctgctgaagaccgtgctgctgctgggccacgtggcccaggtgctgatgctggacaatgggcttctacagaccccccctatgggctggcttgcttgggagaggttcagatgcaacataaactgcgacgaagatcccaagaattgcatttccgaacagctcttcatggagatggctgatcgaatggcgcaggatggttggagagacatggggtacacatatttaaatatcgatgattgctggatcggtggtcgcgacgcgtctggccggctgatgccagaccccaaacgatttccccatggcattccattcttagcagactatgttcactccctgggactgaaactgggtatttacgcagatatgggcaactttacatgcatgggataccctggaacaacgttagataaggtggttcaggacgcccagacctttgccgagtggaaggtggacatgctgaagctggatggctgcttctctacgccagaggaacgcgcccaggggtatcccaagatggccgccgccctgaacgcaaccgggcggcctatagccttctcttgtagctggcccgcttacgagggaggattgccccccagagtcaactactctttactcgccgacatctgtaatctgtggagaaattatgacgacattcaagacagctggtggagtgtcctgagtattttaaactggttcgtcgagcatcaggatattctgcagccagtcgccggcccgggccactggaatgacccagacatgttacttatcggtaacttcggtttatctttggagcaatcacgcgctcagatggcactgtggacagtgttggcagctcccttgctgatgagcaccgatttgcgcacaataagcgcgcagaacatggacatcctccagaaccctctgatgataaagatcaaccaggatccactgggcatacaggggaggcgcatacataaggaaaagtcactgatagaggtgtacatgcgccccctgtcgaacaaagcttcagctctggttttttttagttgtaggacagacatgccctatagatatcattcgtcccttggccagctaaatttcacaggaagcgttatttatgaggctcaagacgtgtactcaggcgatatcatatctggactgcgtgatgaaaccaacttcacagtcataataaacccctctggcgtggttatgtggtacctgtaccctataaagaatctggagatgtcgcaacagtag

SEQ ID NO: 277588 - DNA, 1236 bp, Artificial Sequence
  derived and/or modified sequence
atgctgctgaagaccgtgctgctgctgggccacgtggcccaggtgctgatgctcgataacggactcctccagactcctcctatgggctggttagcgtgggagcggtttcggtgcaacattaactgtgatgaagaccctaaaaactgtatatccgagcaactgtttatggaaatggccgatcgaatggcccaagacggatggcgtgatatgggctatacatatctgaatatcgatgactgttggattggcgggcgagatgcatctggtagactaatgccagatcctaagaggttccctcacggaatccccttcttggctgactatgttcattccttgggattaaagctgggcatttacgcagatatgggaaactttacttgcatgggctaccccgggaccactttggataaggttgtgcaggacgcacaaacctttgccgaatggaaagtggacatgctgaagctcgacggatgtttcagcacccccgaggagcgggctcaggggtatcctaaaatggcggccgcccttaacgccaccggcagacccatcgcgttcagttgctcttggcccgcatatgaaggcggcctgccgccccgagtgaactactccctgctcgcagacatttgcaacctctggcgcaactacgatgatatccaggatagctggtggagcgtcctctcgatcctgaattggttcgtggagcaccaggatattttgcagccagtggcaggaccaggacactggaacgatccagatatgctgctgatcgggaattttggtctgtccctggagcagagcagagcacagatggctctgtggaccgtcctggccgccccgcttctaatgtctacggatctccgcaccattagtgctcagaatatggatattctgcagaaccccttgatgattaagatcaaccaagatcccctagggattcaaggccggagaattcacaaggaaaaaagtctgattgaagtctatatgagaccgttatcaaacaaggcttccgcccttgtgtttttctcttgccggacagacatgccttacagatatcattcgagccttggccagctaaacttcaccggtagcgtcatctatgaagcccaggacgtatattcaggcgatatcatctcaggcctgcgggacgagacgaactttacagtgatcatcaatccgtccggagtggttatgtggtatctgtacccaattaaaaacttggagatgagccagcagtag

SEQ ID NO: 277589 - DNA, 1236 bp, Artificial Sequence
  derived and/or modified sequence
atgctcctcaagacagtccttctgctcggccatgttgcacaggtgttgatgcttgacaatgggctgctgcagactccgccaatgggatggctggcttgggagcgatttcggtgtaacatcaactgtgacgaagacccgaaaaattgcataagcgaacagttatttatggaaatggccgatagaatggctcaagatggctggagagatatgggatacacctacctgaatatcgatgactgttggataggcggaagggacgcatctggcagactcatgcctgatcctaagcggtttccgcacggcatccctttcctggctgactacgtccattcgctagggttaaaacttggtatttatgccgatatgggcaattttacttgcatgggctatccagggaccacgctggacaaagtcgttcaggacgcgcagaccttcgcagagtggaaggttgacatgctgaaattggacggctgcttctctactcccgaggaaagagctcaggggtatcccaaaatggccgctgcactcaacgcgacagggcgtccaatcgcgttttcatgctcctggcctgcatacgagggcggtttgcctcctcgggtgaattactctctccttgctgatatctgcaacctctggcgaaattatgacgatattcaggacagttggtggagcgtgcttagcatcttaaattggttcgtggagcaccaggacatcctgcaaccggtggcgggacctggccattggaacgaccctgatatgctgcttatcggaaatttcggcctttccctggaacaaagtcgggcacagatggcactgtggacagtgctggctgcaccactgctcatgtccaccgatctcagaacgatttctgcacagaacatggacattctgcagaacccactcatgatcaagattaatcaggatcccctaggaatccagggccgtaggatacacaaagaaaaaagcttaattgaagtttacatgagacccttatccaacaaggcctctgcacttgtgttcttctcctgcaggacagatatgccataccgataccactcttctctcggacagctgaattttactggtagcgtgatctacgaagcccaggatgtgtacagtggagatattatctccggactccgagacgagaccaacttcaccgtaatcatcaacccttccggagtggtgatgtggtatctgtaccccataaaaaaccttgagatgtctcagcagtag

SEQ ID NO: 277590 - DNA, 1236 bp, Artificial Sequence
  derived and/or modified sequence
atgctgcttaagacagtcctcttgttgggccacgtagcacaggtgctgatgctggataacggcctcttacagaccccccctatgggatggctcgcttgggagagattcagatgcaatatcaactgcgatgaagaccctaagaattgcatttcagagcagttattcatggagatggccgaccggatggctcaagatggctggagagacatgggctatacgtatctgaatatagatgactgctggatcgggggtagagacgcatcaggtcgcttgatgccggacccgaagcggttccctcatggaatcccgtttctggcagattatgttcactcactgggcttgaagctcggtatctatgctgacatggggaattttacttgcatgggctatcccggtaccactttggataaggtggtgcaggatgcgcagacctttgctgagtggaaagtcgacatgttgaaacttgatggatgcttctcgactccagaagagcgggcacagggctacccaaagatggctgccgcactaaacgcaacaggtcgaccgattgccttctcttgtagttggccagcatacgaaggagggctgcctccacgggtcaactacagcctgctggctgacatttgcaatctttggcgaaactacgacgatatccaagatagctggtggtcagtactgtcaatcctcaactggttcgtcgagcatcaggacatcctccagcctgtggcaggtcccggtcactggaacgacccggacatgctactgatcgggaattttggccttagcctcgagcaaagccgggcacaaatggccctgtggaccgtgctggctgctcctctcctgatgtctactgatctacgcacaatcagcgctcagaacatggacattctgcagaacccactgatgattaaaattaaccaggatccactgggcattcagggaaggcgtatccataaggagaagtcattgattgaggtgtacatgaggccattgagcaacaaagccagcgcacttgttttcttttcctgtagaaccgacatgccttatcgctatcacagttcactcggtcagctgaattttactggaagcgtgatttacgaagctcaagacgtgtactccggggacataatttccggccttagagatgagaccaatttcactgttattatcaacccctctggcgtggtgatgtggtatctttaccccataaagaatctggagatgtcccaacagtag

SEQ ID NO: 277591 - DNA, 1236 bp, Artificial Sequence
  derived and/or modified sequence
atgttgctgaaaaccgtgctactgctcggacacgttgctcaagtactgatgctcgataacggcctcctacagacacctcctatggggtggctagcctgggagcgtttcaggtgcaacattaattgtgacgaagatccaaagaattgcatctccgaacagctgttcatggaaatggccgacaggatggctcaagatggttggcgcgatatgggttacacttatcttaacatagatgactgctggattggcggacgtgacgcttctggtcgtctcatgccagatccaaagaggttcccgcatgggatcccctttctcgcagactatgtgcacagtctgggtcttaagctggggatctatgcagacatgggaaatttcacatgcatgggatacccgggaactaccctcgataaagtggtgcaagacgcgcagaccttcgctgaatggaaagtggatatgctgaaactggacgggtgtttctccacccctgaagagagggcccaagggtacccaaaaatggccgctgcactgaacgcaactggacggccaatcgcatttagctgcagttggccggcttatgagggtggacttccacctcgcgtgaattactcactgcttgcagacatctgcaatctgtggagaaactacgatgacattcaggacagctggtggagtgtgctgagcattttgaattggttcgtggaacaccaggatatactgcagccagtggcgggtcccggtcattggaacgacccagacatgctgctaataggaaatttcgggctgagtctcgagcaaagtcgcgctcagatggctttgtggacagtgctagccgctcctctgttgatgtctaccgacctccggacgatctctgctcagaacatggatatacttcaaaaccccttgatgatcaagatcaaccaagaccccttggggattcagggaagaagaatccacaaggaaaaaagtttgatcgaagtgtacatgcgaccactttcgaataaggcttctgccttggtgtttttttcttgtcggaccgatatgccataccgctatcactcttctctggggcagctgaactttaccggttctgtaatctacgaagcccaggacgtgtactccggcgacattatttctggccttcgggacgagactaatttcactgtgataatcaatccttctggagtggttatgtggtacctgtatccgatcaagaatcttgaaatgtcacagcagtag

SEQ ID NO: 277592 - DNA, 1236 bp, Artificial Sequence
  derived and/or modified sequence
atgctgctgaagaccgtgctgctgctgggccacgtggcccaggtgctgatgctggacaacggcctgctgcagaccccccccatgggctggctggcctgggagagattcagatgcaacatcaactgcgacgaggaccccaagaactgcatcagcgagcagctgttcatggagatggccgacagaatggcccaggacggctggagagacatgggctacacctacctgaacatcgacgactgctggatcggcggcagagacgccagcggcagactgatgcccgaccccaagagattcccccacggcatccccttcctggccgactacgtgcacagcctgggcctgaagctgggcatctacgccgacatgggcaacttcacctgcatgggctaccccggcaccaccctggacaaggtggtgcaggacgcccagaccttcgccgagtggaaggtggacatgctgaagctggacggctgcttcagcacccccgaggagagagcccagggctaccccaagatggccgccgccctgaacgccaccggcagacccatcgccttcagctgcagctggcccgcctacgagggcggcctgccccccagagtgaactacagcctgctggccgacatctgcaacctgtggagaaactacgacgacatccaggacagctggtggagcgtgctgagcatcctgaactggttcgtggagcaccaggacatcctgcagcccgtggccggccccggccactggaacgaccccgacatgctgctgatcggcaacttcggcctgagcctggagcagagcagagcccagatggccctgtggaccgtgctggccgcccccctgctgatgagcaccgacctgagaaccatcagcgcccagaacatggacatcctgcagaaccccctgatgatcaagatcaaccaggaccccctgggcatccagggcagaagaatccacaaggagaagagcctgatcgaggtgtacatgagacccctgagcaacaaggccagcgccctggtgttcttcagctgcagaaccgacatgccctacagataccacagcagcctgggccagctgaacttcaccggcagcgtgatctacgaggcccaggacgtgtacagcggcgacatcatcagcggcctgagagacgagaccaacttcaccgtgatcatcaaccccagcggcgtggtgatgtggtacctgtaccccatcaagaacctggagatgagccagcagtag

SEQ ID NO: 277593 - protein, 854 aa, Artificial Sequence
  derived and/or modified sequence
MREMAGAWHMTVEQKFGLFSAEIKEADPLAASEASQPKPCPPEVTPHYIWIDFLVQRFEIAKYCSSDQVEIFSSLLQRSMSLNIGGAKGSMNRHVAAIGPRFKLLTLGLSLLHADVVPNATIRNVLREKIYSTAFDYFSCPPKFPTQGEKRLREDISIMIKFWTAMFSDKKYLTASQLVPPDNQDTRSNLDITVGSRQQATQGWINTYPLSSGMSTISKKSGMSKKTNRGSQLHKYYMKRRTLLLSLLATEIERLITWYNPLSAPELELDQAGENSVANWRSKYISLSEKQWKDNVNLAWSISPYLAVQLPARFKNTEAIGNEVTRLVRLDPGAVSDVPEAIKFLVTWHTIDADAPELSHVLCWAPTDPPTGLSYFSSMYPPHPLTAQYGVKVLRSFPPDAILFYIPQIVQALRYDKMGYVREYILWAASKSQLLAHQFIWNMKTNIYLDEEGHQKDPDIGDLLDQLVEEITGSLSGPAKDFYQREFDFFNKITNVSAIIKPYPKGDERKKACLSALSEVKVQPGCYLPSNPEAIVLDIDYKSGTPMQSAAKAPYLAKFKVKRCGVSELEKEGLRCRSDSEDECSTQEADGQKISWQAAIFKVGDDCRQDMLALQIIDLFKNIFQLVGLDLFVFPYRVVATAPGCGVIECIPDCTSRDQLGRQTDFGMYDYFTRQYGDESTLAFQQARYNFIRSMAAYSLLLFLLQIKDRHNGNIMLDKKGHIIHIDFGFMFESSPGGNLGWEPDIKLTDEMVMIMGGKMEATPFKWFMEMCVRGYLAVRPYMDAVVSLVTLMLDTGLPCFRGQTIKLLKHRFSPNMTEREAANFIMKVIQSCFLSNRSRTYDMIQYYQNDIPY

SEQ ID NO: 277594 - DNA, 1688 bp, Artificial Sequence
  derived and/or modified sequence
ggctggggggcttagaattttatttttggtttacagcgcagaagaagagcagtgaggccggggcgcgggtggggagggcaaggcggcggctcaaaaaaaaagccagcccctcgcggcccgacagagtctcggcgccccgcgggtcggtggagcctcaggggtgagcgcaggccggagacaggggaacccgccgcgggacaggggaaggccggacggaacgcgggtaagctgccgcagcttccggccgggccactagcgcggaccctacggccggggcgggacttccggcaaggcgcggaagcggcggtagctgcagctggcgaagttgggcgactggcggatgcaggccttgcggcacgtcgtgtgcgccctgtccggcggcgtggacagcgccgtggccgcgctgctgctgaggcggagaggttaccaggtgacaggggtgtttatgaagaactgggactcactggatgaacatggggtctgtactgccgacaaagactgtgaagatgcttacagagtttgccagatcttagacatccctttccatcaagtgtcctacgtaaaggagtattggaatgatgtgttcaggggcagatgccattgccacaggtcactatgcaagaacttccctggaagatgaagaagtctttgagcagaagcacgttaagaagcccgaagggcttttcagaaatcggtttgaagttagaaatggtttcccaggatgccctgaggagaaccatcttccctctggggggattaacgaaagagtttgtaaagaaaatcgctgctgagaatagacttcatcatgtgcttcagaagaaagagagcatgggcatgtgtttcatcgggaagaggaattttgaacatttccttcttcagtatctgcagcctcgacctggtcactttatttccatagaagacaataaggttctgggaacacataaaggttggttcctgtataccttgggccagagagcaaacataggtggcctgagagagccctggtacgtggtggagaaggacagcgtcaagggtgacgtgtttgtggccccccggacagaccacccagccctgtacagggacctgctgaggaccagccgcgtgcactggattgcggaggagcctcccgcagcactggtccgggacaagatgatggagtgccacttccgattccgccaccagatggcactagtttgctgtgttctacaagggggacgagtgcctgggcagcgggaagatcctgcggctggggccgtctgcctacacgctccagaagggccagcgcagagctgggatggccactgagagccccagtgacagcccagaagatggtccaggcctgagtcccttgctctgacagagatggatctgctagaaggaacctggagagcaggacccatggctgggcggctggtgagcagtccaggtgcccaagggccagcttgctgctgcccaaagcagaggaagccgggctggctgagggtccgaaaagcctgcaggggcccggcgagccccaggaagagcctcagctccaggctggggctctggctgctggagcatctgctggctggtggggtggcccgagttccccttcaccgcccccagggagggtttcccacctcagagtacaccgaggggacctgcagagggggctgtcgggacagcgtggaataaacattatttcaagg

SEQ ID NO: 277595 - protein, 85 aa, Artificial Sequence
  derived and/or modified sequence
MLSSTAILDHPPSPMDTSELHFVPEPSSTMGLDLADGHLDSMDWLELSSGGPVLSLAPLSTTAPSLFSTDFLDGHDLQLHWDSCL

SEQ ID NO: 277596 - DNA, 4496 bp, Artificial Sequence
  derived and/or modified sequence
ggcggcagtgtctgtggtggccgcggcggcgagagcgacggtcccatctttcccaccctcttggttgccgctggccacacgccctccgctggcggcgacttctcagctccgtgcgcccgggctggacagtgagcctcgagaggagacgcgggcggctagagccggagtggggcgagccgcggaacccggccgggagccgcgcgaggcgtgatcggagggtatggttggcatggaattgaatttcatctgtctgtgggaattgtaagcaagattgccatcacgaaagccaaagtggatttctccagtgtggtgtgcctgcccccttccgtcattgctgtgaatgggctggacggaggaggggccggcgaaaatgatgatgaaccagtgctcgtgtccttatctgcggcacccagtccccagagtgaagctgttgccaatgaactgcaggagctctccttgcagcccgagctgaccctaggcctccaccctggcaggaatcccaatttgcctccacttagtgagcggaagaatgtgctacagttgaaactccagcagcgccggacccgggaagaactggtgagccaagggatcatgccgcctttgaaaagtccagccgcatttcatgagcagagaaggagcttggagcgggccaggacagaggactatctcaaacggaagattcgttcccggccggagagatcggagctggtcaggatgcacattttggaagagacctcggctgagccatccctccaggccaagcagctgaagctgaagagagccagactagccgatgacctcaatgagaagattgcacagaggcctggccccatggagctggtggagaagaacatccttcctgttgagtccagcctgaaggaagccatcattgtgggccaggtgaactatcccaaagtagcagacagctcttccttcgatgaggacagcagcgatgccttatcccccgagcagcctgccagccatgagtcccagggttctgtgccgtcacccctggaggcccgagtcagcgaaccactgctcagtgccacctctgcatcccccacccaggttgtgtctcaacttccgatgggccgggattccagagaaatgcttttcctggcagagcagcctcctctgcctcccccacctctgctgcctcccagcctcaccaatggaaccactatccccactgccaagtccacccccacactcattaagcaaagccaacccaagtctgccagtgagaagtcacagcgcagcaagaaggccaaggagctgaagccaaaggtgaagaagctcaagtaccaccagtacatccccccggaccagaagcaggacaggggggcaccccccatggactcatcctacgccaagatcctgcagcagcagcagctcttcctccagctgcagatcctcaaccagcagcagcagcagcaccacaactaccaggccatcctgcctgccccgccaaagtcagcaggcgaggccctgggaagcagcgggacccccccagtacgcagcctctccactaccaatagcagctccagctcgggcgcccctgggccctgtgggctggcacgtcagaacagcacctcactgactggcaagccgggagccctgccggccaacctggacgacatgaaggtggcagagctgaagcaggagctgaagttgcgatcactgcctgtctcgggcaccaaaactgagctgattgagcgccttcgagcctatcaagaccaaatcagccctgtgccaggagcccccaaggcccctgccgccacctctatcctgcacaaggctggcgaggtggtggtagccttcccagcggcccggctgagcacggggccagccctggtggcagcaggcctggctccagctgaggtggtggtggccacggtggccagcagtggggtggtgaagtttggcagcacgggctccacgccccccgtgtctcccaccccctcggagcgctcactgctcagcacgggcgatgaaaactccacccccggggacacctttggtgagatggtgacatcacctctgacgcagctgaccctgcaggcctcgccactgcagatcctcgtgaaggaggagggcccccgggccgggtcctgttgcctgagccctggggggcgggcggagctagaggggcgcgacaaggaccagatgctgcaggagaaagacaagcagatcgaggcgctgacgcgcatgctccggcagaagcagcagctggtggagcggctcaagctgcagctggagcaggagaagcgagcccagcagcccgcccccgcccccgcccccctcggcacccccgtgaagcaggagaacagcttctccagctgccagctgagccagcagcccctgggccccgctcacccattcaaccccagcctggcggccccagccaccaaccacatagacccttgtgctgtggccccggggcccccgtccgtggtggtgaagcaggaagccttgcagcctgagcccgagccggtccccgccccccagttgcttctggggcctcagggccccagcctcatcaagggggttgcacctcccaccctcatcaccgactccacagggacccaccttgtcctcaccgtgaccaataagaatgcagacagccctggcctgtccagtgggagcccccagcagccctcgtcccagcctggctctccagcgcctgccccctctgcccagatggacctggagcacccactgcagcccctctttgggacccccacttctctgctgaagaaggaaccacctggctatgaggaagccatgagccagcagcccaaacagcaggaaaatggttcctcaagccagcagatggacgacctgtttgacattctcattcagagcggagaaatttcagcagatttcaaggagccgccatccctgccagggaaggagaagccatccccgaagacagtctgtgggtcccccctggcagcacagccatcaccttctgctgagctcccccaggctgccccacctcctccaggctcaccctccctccctggacgcctggaggacttcctggagagcagcacggggctgcccctgctgaccagtgggcatgacgggccagagcccctttccctcattgacgacctccatagccagatgctgagcagcactgccatcctggaccaccccccgtcacccatggacacctcggaattgcactttgttcctgagcccagcagcaccatgggcctggacctggctgatggccacctggacagcatggactggctggagctgtcgtcaggtggtcccgtgctgagcctagcccccctcagcaccacagcccccagcctcttctccacagacttcctcgatggccatgatttgcagctgcactgggattcctgcttgtagctctctggctcaagacggggtggggaaggggctgggagccagggtactccaatgcgtggctctcctgcgtgattcggcctctccacatggttgtgagtcttgacaatcacagcccctgctttttcccttccctgggaggctagaacagagaagcccttactcctggttcagtgccacgcagggcagaggagagcagctgtcaagaagcagccctggctctcacgctggggttttggacacacggtcagggtcagggccatttcagcttgacctccttttttgaggtcagggggcactgtctgtctggctacaatttggctaaggtaggtgaagcctggccaggcgggaggcttctcttctgacccagggctgagacaggttaaggggtgaatctccttcctttctctccctgctttgctgtgaagggagaaattagcctgggcctctaccccctattccctgtgtctgccaaccccaggatcccagggctccctgccattttagtgtcttggtgtagtgtaaccatttagtggttggtggcaacaattttatgtacaggtgtatatacctctatattatatatcgacatacatatatatttttgggggggggcggacaggagatgggtgcaactccctcccatcctactctcacagaagggcctggatgcaaggttacccttgagctgtgtgccacagtctggtgcccagtctggcatgcagctacccaggcccacccatcacgtgtgattgacatgtaggtaccctgccacggcctatgccccacctgccctgcttcctggctccttatcagtgccatgagggcagaggtgctacctggccttcctgccaggagctctccacccactcacattccgtccccgccgcctcactgcagccagcgtggccctaggacaggaggagcttcgggcccagcttcaccctgcggtggggctgaggggtggccatctcctgccctggggccactggcttcacattctgggctgactcataggggagtaggggtggagtcaccaaaaccagtgctgggacaaagatggggaaggtgtgtgaactttttaaaataaacacaaaaacacaggcctgtta

SEQ ID NO: 277597 - protein, 37 aa, Artificial Sequence
  derived and/or modified sequence
MASEDIAKLAETLAKTQVAGGQLSFKGKSLKLNTAED

SEQ ID NO: 277598 - DNA, 3531 bp, Artificial Sequence
  derived and/or modified sequence
agatgctgaggaatatggcaagaagttggggttcaaagtctgatgccaaagctagcaacccgagaaataaaaccgctgatcaccagctccccactcaggcccagcccccttttagagcccccagactccccacgcagggccctagccccctagtcttccccgtcaatgccctgttggcaatacagccatcaggttctatcagagtgagctgtttttatatgattattttcccccctgggaagacggctttgtctgtgaaagtccccccaaccaggcgccttataaacgcctaaaacagacagagttgaggagaaaggaggggaaaggaggagggagcaaacccggaggggggccctgaggttcgcagcgggcaggatgggggtatgaggccggagtcggcggctcccaggcccccagccccgtcagggcgcccccgtccccaggcgccagagccggggtccgcagccccctagcactccctggacggccgcgggcctcccacaggcctcgaagtccagagactgatcctgcgaccggaaacgcccccctgcccagggggccctgccagcgacgcccctgccagcccccgagaccccctgcgcggggtcggcaaagcatctggacaccccagaagctccggacgccgaagagagaggccccacgaaaatttcaagacacctcctgggggctgcaggggcggccaagtctccccagcgccaggtgcccccggccacacgtctgcagatctccaggggagcccaccagcctagtcaacatggcctcggaagacattgccaagctggcagagacacttgccaagactcaggtggccgggggacagctgagtttcaaaggcaagagcctcaaactcaacactgcagaagatgctaaagatgtgattaaagagattgaagactttgacagcttggaggctctgcgtctggaaggcaacacagtgggcgtggaagcagccagggtcatcgccaaggccttagagaagaagtcggagttgaagcgctgccactggagtgacatgttcacgggaaggctgcggaccgagatcccaccagccctgatctcactaggggaaggactcatcacagctggggctcagctggtggagctggacttaagcgacaacgcattcgggcccgacggtgtgcaaggcttcgaggccctgctcaagagctcagcctgcttcaccctgcaggaactcaagctcaacaactgtggcatgggcattggcggcggcaagatcctggctgcagctctgaccgaatgtcaccggaaatccagtgcccaaggcaagcctctggccctgaaggtctttgtggctggcagaaaccgtctggagaatgatggcgccactgccttggcagaagcttttagggtcatcgggaccctggaggaggtccacatgccacagaatgggatcaaccaccctggcatcactgccctggcccaggctttcgctgtcaaccccctgctgcgggtcatcaacctgaatgacaacaccttcactgagaagggcgccgtggccatggccgagaccttgaagaccttgcggcaggtggaggtgattaattttggggactgcctggtgcgctccaagggtgcagttgccattgcagatgccatccgcggcggcctgcccaagctaaaggagctgaacttgtcattctgtgaaatcaagagggatgctgccctggctgttgctgaggccatggcagacaaagctgagctggagaagctggacctgaatggcaacaccctgggagaagaaggctgtgaacagcttcaggaggtgctggagggcttcaacatggccaaggtgctggcgtccctcagtgatgacgaggacgaggaggaggaggaggaaggagaagaggaagaagaggaagcagaagaagaggaggaggaagatgaggaagaggaggaagaagaggaggaggaggaggaagaagagcctcagcagcgagggcagggagagaagtcagccacgccctcacggaagattctggaccctaacactggggagccagctcccgtgctgtcctccccacctcctgcagacgtctccaccttcctggcttttccctctccagagaagctgctgcgcctagggcccaagagctccgtgctgatagcccagcagactgacacgtctgaccccgagaaggtggtctctgccttcctaaaggtgtcatctgtgttcaaggacgaagctactgtgaggatggcagtgcaggatgcagtagatgccctgatgcagaaggctttcaactcctcgtccttcaactccaacaccttcctcaccaggctgctcgtgcacatgggtctgctcaagagtgaagacaaggtcaaggccattgccaacctgtacggccccctgatggcgctgaaccacatggtgcagcaggactatttccccaaggcccttgcacccctgctgctggcgttcgtgaccaagcccaacagcgccctggaatcctgctccttcgcccgccacagtctgctgcagacgctgtacaaggtctagactcaaagcctctcccatcccttggcctggaccagtgagctggggagggactcggatgaactgaggcgcagcctacgccattgccttggacaggactctggccacaggcagggcgggtctgtgtcccatgtgtcctgtcagtcccctgagtatgtgtgtgggtgtggcgcatgtgcaggtctgtgcctcctgtcgggatttgggttttaacgtcttctgctggcccagccctgctctgttgtggggagttggcccccaggggaaagggctgtgagctgctccgccattaaactcacctccacctgagggcgctctgctgatctccgcctgggccctgatggccgtccccacccacctgccttccggcccggctccctggcggagccagaacccagggagttgcccgcgtgctgtccttcccctctgtgttgtgattgggttgtttcctgccctgcctggggctgcttctcgtcaccaagccctggtcctgcggcagctgtcacccctaccatccataccactgtgctgaccgctcagcctgaagagcagagaatgccatgggtgggactgtgggggtcggatcgtggggttgttggcagagggcaaccctgggccccacaccgtgtggacaggcagacaccagattgtccaggagcaggagctgctgggactgcgctggccccggacctagtgggccttctcctggctgctgagatgtcgtctgtgactggcctggctggagggggagtgttgacaacccaaagctgttctccagtctggggagggagaggcagggtccccaatgtccgagctgcatctggacgctgctcttaaaggacctcctggggcaggggagcggtagggtctggactgggcagatgctgtatgacctccctgagcacccgtgactgccccatgctttcccctttgtgctctgtgtgtgtctgggctgtgcccgggggcttcacaaataaagtcgtgtggcagcttca

SEQ ID NO: 277599 - DNA, 3060 bp, Artificial Sequence
  derived and/or modified sequence
gaacaaatcaaatcgaagcaaagaaactgccggctttcaaaatcctcctcctccgccatcatccgccgcggtgcggagagcaggtggtgctggaagcgcgtgaggccgggagctcgagagagctaacagactagccggctggacatctggaccgctggatccggaggtggcgaccccggcctgacccggaccctaaatccgtccccgccccagagggcggaggcgcgcgctcgattccccccacgcggcggcgccgcctgtttacgtctgcagatctccaggggagcccaccagcctagtcaacatggcctcggaagacattgccaagctggcagagacacttgccaagactcaggtggccgggggacagctgagtttcaaaggcaagagcctcaaactcaacactgcagaagatgctaaagatgtgattaaagagattgaagactttgacagcttggaggctctgcgtctggaaggcaacacagtgggcgtggaagcagccagggtcatcgccaaggccttagagaagaagtcggagttgaagcgctgccactggagtgacatgttcacgggaaggctgcggaccgagatcccaccagccctgatctcactaggggaaggactcatcacagctggggctcagctggtggagctggacttaagcgacaacgcattcgggcccgacggtgtgcaaggcttcgaggccctgctcaagagctcagcctgcttcaccctgcaggaactcaagctcaacaactgtggcatgggcattggcggcggcaagatcctggctgcagctctgaccgaatgtcaccggaaatccagtgcccaaggcaagcctctggccctgaaggtctttgtggctggcagaaaccgtctggagaatgatggcgccactgccttggcagaagcttttagggtcatcgggaccctggaggaggtccacatgccacagaatgggatcaaccaccctggcatcactgccctggcccaggctttcgctgtcaaccccctgctgcgggtcatcaacctgaatgacaacaccttcactgagaagggcgccgtggccatggccgagaccttgaagaccttgcggcaggtggaggtgattaattttggggactgcctggtgcgctccaagggtgcagttgccattgcagatgccatccgcggcggcctgcccaagctaaaggagctgaacttgtcattctgtgaaatcaagagggatgctgccctggctgttgctgaggccatggcagacaaagctgagctggagaagctggacctgaatggcaacaccctgggagaagaaggctgtgaacagcttcaggaggtgctggagggcttcaacatggccaaggtgctggcgtccctcagtgatgacgaggacgaggaggaggaggaggaaggagaagaggaagaagaggaagcagaagaagaggaggaggaagatgaggaagaggaggaagaagaggaggaggaggaggaagaagagcctcagcagcgagggcagggagagaagtcagccacgccctcacggaagattctggaccctaacactggggagccagctcccgtgctgtcctccccacctcctgcagacgtctccaccttcctggcttttccctctccagagaagctgctgcgcctagggcccaagagctccgtgctgatagcccagcagactgacacgtctgaccccgagaaggtggtctctgccttcctaaaggtgtcatctgtgttcaaggacgaagctactgtgaggatggcagtgcaggatgcagtagatgccctgatgcagaaggctttcaactcctcgtccttcaactccaacaccttcctcaccaggctgctcgtgcacatgggtctgctcaagagtgaagacaaggtcaaggccattgccaacctgtacggccccctgatggcgctgaaccacatggtgcagcaggactatttccccaaggcccttgcacccctgctgctggcgttcgtgaccaagcccaacagcgccctggaatcctgctccttcgcccgccacagtctgctgcagacgctgtacaaggtctagactcaaagcctctcccatcccttggcctggaccagtgagctggggagggactcggatgaactgaggcgcagcctacgccattgccttggacaggactctggccacaggcagggcgggtctgtgtcccatgtgtcctgtcagtcccctgagtatgtgtgtgggtgtggcgcatgtgcaggtctgtgcctcctgtcgggatttgggttttaacgtcttctgctggcccagccctgctctgttgtggggagttggcccccaggggaaagggctgtgagctgctccgccattaaactcacctccacctgagggcgctctgctgatctccgcctgggccctgatggccgtccccacccacctgccttccggcccggctccctggcggagccagaacccagggagttgcccgcgtgctgtccttcccctctgtgttgtgattgggttgtttcctgccctgcctggggctgcttctcgtcaccaagccctggtcctgcggcagctgtcacccctaccatccataccactgtgctgaccgctcagcctgaagagcagagaatgccatgggtgggactgtgggggtcggatcgtggggttgttggcagagggcaaccctgggccccacaccgtgtggacaggcagacaccagattgtccaggagcaggagctgctgggactgcgctggccccggacctagtgggccttctcctggctgctgagatgtcgtctgtgactggcctggctggagggggagtgttgacaacccaaagctgttctccagtctggggagggagaggcagggtccccaatgtccgagctgcatctggacgctgctcttaaaggacctcctggggcaggggagcggtagggtctggactgggcagatgctgtatgacctccctgagcacccgtgactgccccatgctttcccctttgtgctctgtgtgtgtctgggctgtgcccgggggcttcacaaataaagtcgtgtggcagcttca

SEQ ID NO: 277600 - DNA, 3469 bp, Artificial Sequence
  derived and/or modified sequence
ctttccccgtcacctgcctggaacaggggtgcggggcgaggagggcgtggcgcccgtgtgcgccttctgcctgccccctcggccttcttcacttagccttcgacggccgagcgccccaggggtggcggtgggagtggggttgttgagcggcgctggctcctttcacaaatggggaaactgaggcttaaagggcgtctgactcgccagagcagctcagcctgcagctgctagcagtggcgtctcatattagcattgttgtcaaccggaggcggtgcgagtccgccggggattccagatggggctcctgcgccgcccgcctatcatttgcggcctgtattcgcgcgtcgctcccgcagagccacctcccagcaggcccacgcccgcgggggccccgggctggcgccgctgtccctggaatcgatagacggtctccttctgtcacccaggctggagtgtagtggaacgatcaccgctgaactgcagcgtcggcttcctgggctcaagcgatcctcccacctcaacctcccaagtcatggggactacagatgccatcacacctggctaatttttaaatttttctgtggagacagggtctcattctgttgcccaggcttgtctcgaaccctggtctaaagtgatcttcccgcctagcctcccaaaatgttggaattacagtctgcagatctccaggggagcccaccagcctagtcaacatggcctcggaagacattgccaagctggcagagacacttgccaagactcaggtggccgggggacagctgagtttcaaaggcaagagcctcaaactcaacactgcagaagatgctaaagatgtgattaaagagattgaagactttgacagcttggaggctctgcgtctggaaggcaacacagtgggcgtggaagcagccagggtcatcgccaaggccttagagaagaagtcggagttgaagcgctgccactggagtgacatgttcacgggaaggctgcggaccgagatcccaccagccctgatctcactaggggaaggactcatcacagctggggctcagctggtggagctggacttaagcgacaacgcattcgggcccgacggtgtgcaaggcttcgaggccctgctcaagagctcagcctgcttcaccctgcaggaactcaagctcaacaactgtggcatgggcattggcggcggcaagatcctggctgcagctctgaccgaatgtcaccggaaatccagtgcccaaggcaagcctctggccctgaaggtctttgtggctggcagaaaccgtctggagaatgatggcgccactgccttggcagaagcttttagggtcatcgggaccctggaggaggtccacatgccacagaatgggatcaaccaccctggcatcactgccctggcccaggctttcgctgtcaaccccctgctgcgggtcatcaacctgaatgacaacaccttcactgagaagggcgccgtggccatggccgagaccttgaagaccttgcggcaggtggaggtgattaattttggggactgcctggtgcgctccaagggtgcagttgccattgcagatgccatccgcggcggcctgcccaagctaaaggagctgaacttgtcattctgtgaaatcaagagggatgctgccctggctgttgctgaggccatggcagacaaagctgagctggagaagctggacctgaatggcaacaccctgggagaagaaggctgtgaacagcttcaggaggtgctggagggcttcaacatggccaaggtgctggcgtccctcagtgatgacgaggacgaggaggaggaggaggaaggagaagaggaagaagaggaagcagaagaagaggaggaggaagatgaggaagaggaggaagaagaggaggaggaggaggaagaagagcctcagcagcgagggcagggagagaagtcagccacgccctcacggaagattctggaccctaacactggggagccagctcccgtgctgtcctccccacctcctgcagacgtctccaccttcctggcttttccctctccagagaagctgctgcgcctagggcccaagagctccgtgctgatagcccagcagactgacacgtctgaccccgagaaggtggtctctgccttcctaaaggtgtcatctgtgttcaaggacgaagctactgtgaggatggcagtgcaggatgcagtagatgccctgatgcagaaggctttcaactcctcgtccttcaactccaacaccttcctcaccaggctgctcgtgcacatgggtctgctcaagagtgaagacaaggtcaaggccattgccaacctgtacggccccctgatggcgctgaaccacatggtgcagcaggactatttccccaaggcccttgcacccctgctgctggcgttcgtgaccaagcccaacagcgccctggaatcctgctccttcgcccgccacagtctgctgcagacgctgtacaaggtctagactcaaagcctctcccatcccttggcctggaccagtgagctggggagggactcggatgaactgaggcgcagcctacgccattgccttggacaggactctggccacaggcagggcgggtctgtgtcccatgtgtcctgtcagtcccctgagtatgtgtgtgggtgtggcgcatgtgcaggtctgtgcctcctgtcgggatttgggttttaacgtcttctgctggcccagccctgctctgttgtggggagttggcccccaggggaaagggctgtgagctgctccgccattaaactcacctccacctgagggcgctctgctgatctccgcctgggccctgatggccgtccccacccacctgccttccggcccggctccctggcggagccagaacccagggagttgcccgcgtgctgtccttcccctctgtgttgtgattgggttgtttcctgccctgcctggggctgcttctcgtcaccaagccctggtcctgcggcagctgtcacccctaccatccataccactgtgctgaccgctcagcctgaagagcagagaatgccatgggtgggactgtgggggtcggatcgtggggttgttggcagagggcaaccctgggccccacaccgtgtggacaggcagacaccagattgtccaggagcaggagctgctgggactgcgctggccccggacctagtgggccttctcctggctgctgagatgtcgtctgtgactggcctggctggagggggagtgttgacaacccaaagctgttctccagtctggggagggagaggcagggtccccaatgtccgagctgcatctggacgctgctcttaaaggacctcctggggcaggggagcggtagggtctggactgggcagatgctgtatgacctccctgagcacccgtgactgccccatgctttcccctttgtgctctgtgtgtgtctgggctgtgcccgggggcttcacaaataaagtcgtgtggcagcttca

SEQ ID NO: 277601 - DNA, 650 bp, Artificial Sequence
  derived and/or modified sequence
gtctcccggccacggttgaaaccagacgtgcagtggggctgacccctgtgccccaccccagagtcatgccagcgtgggtggtggggcattctctgggatgaatgatctggatcccatagccatctgtgtcctgtttgaggaatgggaccctcaaacagagaacagccaagatgctcaagcagtgatttatctctagggtctccatagcaggggaggtagggtcagactcctgagatggctgatgtcctaccctgcccccaaccaggggccccaggagactcctttttcttactgcaactttggcctcctcagtctgcagatctccaggggagcccaccagcctagtcaacatggcctcggaagacattgccaagctggcagagacacttgccaagactcaggtggccgggggacagctgagtttcaaaggcaagagcctcaaactcaacactgcagaagatgctaaagatgtgattaaagagattgaagactttgacagcttggaggctctgcgtctggaaggcaacacagtgggcgtggaagcagccagggtcatcgccaaggccttagagaagaagtcggagttgaagcgctgccactggagtgacatgttcacgggaaggctgcggaccgagatcccaccagccctg

SEQ ID NO: 277602 - DNA, 946 bp, Artificial Sequence
  derived and/or modified sequence
cgccttctgcctgccccctcggccttcttcacttagccttcgacggccgagcgccccaggggtggcggtgggagtggggttgttgagcggcgctggctcctttcacaaatggggaaactgaggcttaaagggcgtctgactcgccagagcagctcagcctgcagctgctagcagtggcgtctcatattagcattgttgtcaaccggaggcggtgcgagtccgccggggattccagatggggctcctgcgccgcccgcctatcatttgcggcctgtattcgcgcgtcgctcccgcagagccacctcccagcaggcccacgcccgcgggggccccgggctggcgccgctgtccctggaatcgatgtgagtcactgctgacgctttgcaggagcatgcatctcacctcagaaagtctctgacgttgctgcggagcggggagaggatgtttctctattagccctttgcttttgctctggcgctgatcctttgctgaccttggacaaatcaatttacgtttctgtgctccagtttcttggtttataaaagacggtctccttctgtcacccaggctggagtgtagtggaacgatcaccgctgaactgcagcgtcggcttcctgggctcaagcgatcctcccacctcaacctcccaagtcatggggactacagatgccatcacacctggctaatttttaaatttttctgtggagacagggtctcattctgttgcccaggcttgtctcgaaccctggtctaaagtgatcttcccgcctagcctcccaaaatgttggaattacagtctgcagatctccaggggagcccaccagcctagtcaacatggcctcggaagacattgccaagctggcagagacacttgccaagactcaggtggccgggggacagctgagtttcaaaggcaagagcctcaaactcaacactgcagaagatg

SEQ ID NO: 277603 - DNA, 603 bp, Artificial Sequence
  derived and/or modified sequence
gaaaccagacgtgcagtggggctgacccctgtgccccaccccagagtcatgccagcgtgggtggtggggcattctctgggatgaatgatctggatcccatagccatctgtgtcctgtttgaggaatgggaccctcaaacagagaacagccaagatgctcaagcagtctgcagatctccaggggagcccaccagcctagtcaacatggcctcggaagacattgccaagctggcagagacacttgccaagactcaggtggccgggggacagctgagtttcaaaggcaagagcctcaaactcaacactgcagaagatgctaaagatgtgattaaagagattgaagactttgacagcttggaggctctgcgtctggaaggcaacacagtgggcgtggaagcagccagggtcatcgccaaggccttagagaagaagtcggagttgaagcgctgccactggagtgacatgttcacgggaaggctgcggaccgagatcccaccagccctgatctcactaggggaaggactcatcacagctggggctcagctggtggagctggacttaagcgacaacgcattcgggcccgacggtgtgcaaggcttcgagg

SEQ ID NO: 277604 - DNA, 4222 bp, Artificial Sequence
  derived and/or modified sequence
ccctgtctctactaaaaatacaaaaaaattagctggacatggtggtgggtgcctgtaatcccagctactcaggaggctgaggcaggagaatgacatgaaccttggaggcggagcttgcagtgagcccagatggcgccactgtgctccagcctgggcgactgagcgagactccgtctcaaaaaaaaaaaattctttcatttatttagttacttttagagatagagcctcccgctgttgcccaggctggagtgcagtggcagtcatagcttactgcagctttgaactcctgggctcaaatgatcctcctgcctcagcctctccagtagctgggactgactacaggcacgtgccaccacacccagctaatttttatttttatttttatttttttgagacagggttttactctgtcacccaggctagagtgcagtggtgagatcatggctcactgtagcctctgtctccggggctcaatcaatcctcccacctcagcctccccagtggctgggattactggtgcacaccaccataccctgctaattgtatttatttttagtagagatgggattttgccatgttgcccagactggtcttgagctgctgggctcaagcgatcttcccatcacagcttcccaatgtgctgggattacaggtgtgagccactgtacctggccagctttacttcttttaccagcactcctgattttataaatagtgaggcttatcaaccccatttctacccaaatcttctggtagacttgagtatagtagggcttcataggtagcagccctgtccctgtcctattatgatggtagctgttgtgatgtggcgatctctgatctagaaacccctgaggggccattgtggcctgcccagtctcccggccacggttgaaaccagacgtgcagtggggctgacccctgtgccccaccccagagtcatgccagcgtgggtggtggggcattctctgggatgaatgatctggatcccatagccatctgtgtcctgtttgaggaatgggaccctcaaacagagaacagccaagatgctcaagcaggtgtgtgcttgggccagactctgcagcctttggtttgggacttgactgccattcactgaaggggcccaggaaatgggcagctcacatggtgttgctgggtgtccagctgcggcagtttagcagaggaggacttgtaatgagatggtagcttcttataggctaagacatgatttttctgttcttttactacctcctgcaccttctagaactgttccttctctgatgctgttttcctttcttccagtgatttatctctagggtctccatagcaggggaggtagggtcagactcctgagatggctgatgtcctaccctgcccccaaccaggggccccaggagactcctttttcttactgcaactttggcctcctcagtctgcagatctccaggggagcccaccagcctagtcaacatggcctcggaagacattgccaagctggcagagacacttgccaagactcaggtggccgggggacagctgagtttcaaaggcaagagcctcaaactcaacactgcagaagatgctaaagatgtgattaaagagattgaagactttgacagcttggaggctctgcgtctggaaggcaacacagtgggcgtggaagcagccagggtcatcgccaaggccttagagaagaagtcggagttgaagcgctgccactggagtgacatgttcacgggaaggctgcggaccgagatcccaccagccctgatctcactaggggaaggactcatcacagctggggctcagctggtggagctggacttaagcgacaacgcattcgggcccgacggtgtgcaaggcttcgaggccctgctcaagagctcagcctgcttcaccctgcaggaactcaagctcaacaactgtggcatgggcattggcggcggcaagatcctggctgcagctctgaccgaatgtcaccggaaatccagtgcccaaggcaagcctctggccctgaaggtctttgtggctggcagaaaccgtctggagaatgatggcgccactgccttggcagaagcttttagggtcatcgggaccctggaggaggtccacatgccacagaatgggatcaaccaccctggcatcactgccctggcccaggctttcgctgtcaaccccctgctgcgggtcatcaacctgaatgacaacaccttcactgagaagggcgccgtggccatggccgagaccttgaagaccttgcggcaggtggaggtgattaattttggggactgcctggtgcgctccaagggtgcagttgccattgcagatgccatccgcggcggcctgcccaagctaaaggagctgaacttgtcattctgtgaaatcaagagggatgctgccctggctgttgctgaggccatggcagacaaagctgagctggagaagctggacctgaatggcaacaccctgggagaagaaggctgtgaacagcttcaggaggtgctggagggcttcaacatggccaaggtgctggcgtccctcagtgatgacgaggacgaggaggaggaggaggaaggagaagaggaagaagaggaagcagaagaagaggaggaggaagatgaggaagaggaggaagaagaggaggaggaggaggaagaagagcctcagcagcgagggcagggagagaagtcagccacgccctcacggaagattctggaccctaacactggggagccagctcccgtgctgtcctccccacctcctgcagacgtctccaccttcctggcttttccctctccagagaagctgctgcgcctagggcccaagagctccgtgctgatagcccagcagactgacacgtctgaccccgagaaggtggtctctgccttcctaaaggtgtcatctgtgttcaaggacgaagctactgtgaggatggcagtgcaggatgcagtagatgccctgatgcagaaggctttcaactcctcgtccttcaactccaacaccttcctcaccaggctgctcgtgcacatgggtctgctcaagagtgaagacaaggtcaaggccattgccaacctgtacggccccctgatggcgctgaaccacatggtgcagcaggactatttccccaaggcccttgcacccctgctgctggcgttcgtgaccaagcccaacagcgccctggaatcctgctccttcgcccgccacagtctgctgcagacgctgtacaaggtctagactcaaagcctctcccatcccttggcctggaccagtgagctggggagggactcggatgaactgaggcgcagcctacgccattgccttggacaggactctggccacaggcagggcgggtctgtgtcccatgtgtcctgtcagtcccctgagtatgtgtgtgggtgtggcgcatgtgcaggtctgtgcctcctgtcgggatttgggttttaacgtcttctgctggcccagccctgctctgttgtggggagttggcccccaggggaaagggctgtgagctgctccgccattaaactcacctccacctgagggcgctctgctgatctccgcctgggccctgatggccgtccccacccacctgccttccggcccggctccctggcggagccagaacccagggagttgcccgcgtgctgtccttcccctctgtgttgtgattgggttgtttcctgccctgcctggggctgcttctcgtcaccaagccctggtcctgcggcagctgtcacccctaccatccataccactgtgctgaccgctcagcctgaagagcagagaatgccatgggtgggactgtgggggtcggatcgtggggttgttggcagagggcaaccctgggccccacaccgtgtggacaggcagacaccagattgtccaggagcaggagctgctgggactgcgctggccccggacctagtgggccttctcctggctgctgagatgtcgtctgtgactggcctggctggagggggagtgttgacaacccaaagctgttctccagtctggggagggagaggcagggtccccaatgtccgagctgcatctggacgctgctcttaaaggacctcctggggcaggggagcggtagggtctggactgggcagatgctgtatgacctccctgagcacccgtgactgccccatgctttcccctttgtgctctgtgtgtgtctgggctgtgcccgggggcttcacaaataaagtcgtgtggcagc

SEQ ID NO: 277605 - protein, 418 aa, Artificial Sequence
  derived and/or modified sequence
MDMLHPSSVSTTSEPENASSAWPPDATLGNVSAGPSPAGLAVSGVLIPLVYLVVCVVGLLGNSLVIYVVLRHTASPSVTNVYILNLALADELFMLGLPFLAAQNALSYWPFGSLMCRLVMAVDGINQFTSIFCLTVMSVDRYLAVVHPTRSARWRTAPVARTVSAAVWVASAVVVLPVVVFSGVPRGMSTCHMQWPEPAAAWRAGFIIYTAALGFFGPLLVICLCYLLIVVKVRSAGRRVWAPSCQRRRRSERRVTRMVVAVVALFVLCWMPFYVLNIVNVVCPLPEEPAFFGLYFLVVALPYANSCANPILYGFLSYRFKQGFRRVLLRPSRRVRSQEPTVGPPEKTEEEDEEEEDGEESREGGKGKEMNGRVSQITQPGTSGQERPPSRVASKEQQLLPQEASTGEKSSTMRISYL

SEQ ID NO: 277606 - DNA, 1257 bp, Artificial Sequence
  derived and/or modified sequence
atggacatgctgcaccccagcagcgtgagcaccaccagcgagcccgagaacgccagcagcgcctggccccccgacgccaccctgggcaacgtgagcgccggccccagccccgccggcctggccgtgagcggcgtgctgatccccctggtgtacctggtggtgtgcgtggtgggcctgctgggcaacagcctggtgatctacgtggtgctgagacacaccgccagccccagcgtgaccaacgtgtacatcctgaacctggccctggccgacgagctgttcatgctgggcctgcccttcctggccgcccagaacgccctgagctactggcccttcggcagcctgatgtgcagactggtgatggccgtggacggcatcaaccagttcaccagcatcttctgcctgaccgtgatgagcgtggacagatacctggccgtggtgcaccccaccagaagcgccagatggagaaccgcccccgtggccagaaccgtgagcgccgccgtgtgggtggccagcgccgtggtggtgctgcccgtggtggtgttcagcggcgtgcccagaggcatgagcacctgccacatgcagtggcccgagcccgccgccgcctggagagccggcttcatcatctacaccgccgccctgggcttcttcggccccctgctggtgatctgcctgtgctacctgctgatcgtggtgaaggtgagaagcgccggcagaagagtgtgggcccccagctgccagagaagaagaagaagcgagagaagagtgaccagaatggtggtggccgtggtggccctgttcgtgctgtgctggatgcccttctacgtgctgaacatcgtgaacgtggtgtgccccctgcccgaggagcccgccttcttcggcctgtacttcctggtggtggccctgccctacgccaacagctgcgccaaccccatcctgtacggcttcctgagctacagattcaagcagggcttcagaagagtgctgctgagacccagcagaagagtgagaagccaggagcccaccgtgggcccccccgagaagaccgaggaggaggacgaggaggaggaggacggcgaggagagcagagagggcggcaagggcaaggagatgaacggcagagtgagccagatcacccagcccggcaccagcggccaggagagaccccccagcagagtggccagcaaggagcagcagctgctgccccaggaggccagcaccggcgagaagagcagcaccatgagaatcagctacctgtag

SEQ ID NO: 277607 - DNA, 1257 bp, Artificial Sequence
  derived and/or modified sequence
atggatatgcttcatccctcaagtgtgtctactacctctgaaccagaaaatgctagtagtgcctggccacccgacgccacgcttggtaacgtttctgcgggcccctcccccgctgggctggccgtgtccggcgtccttatccccctggtgtacctggtcgtgtgtgtggttggtctgctgggcaattccctggtgatctatgtcgtcctgaggcacaccgcctcaccgagcgtgaccaatgtttacattttgaatttggctctggctgatgagctcttcatgctagggctgcctttcctggcagctcagaacgcacttagttactggcccttcgggtcacttatgtgccgcctcgtaatggctgttgacggcatcaaccaattcacatctattttctgcctgaccgttatgtcagtcgacagatacctggccgtggtgcaccctacaagatctgcccgctggcgcacggcccccgttgctcgcacagtatcagccgccgtgtgggtggccagcgccgtggtggttctgccagttgtcgtctttagcggtgtgccgcgcggaatgtccacatgccacatgcaatggcctgagccagcagccgcctggcgggcgggctttatcatttacactgccgcacttggattcttcggacctctgctggtcatttgtctgtgttacctgttgattgtggtcaaggtgagatccgccggaagacgggtttgggccccctcgtgtcagagacgccgaaggagcgagcgtcgtgtgacaagaatggtagtagcagttgttgccctgtttgtactgtgctggatgccattctatgtcctcaacatagtgaacgtcgtctgcccgctgccagaagaacccgcttttttcggactgtacttcctggtggtggcactcccatatgctaattcttgcgctaacccaatactttatggcttcctgtcgtaccgcttcaagcaggggtttagaagggttttgctgagaccttctaggcgcgtccgctcacaggagcctaccgtaggaccacccgaaaagacggaagaggaagatgaagaggaggaagacggtgaggagagccgggagggaggaaagggcaaggaaatgaatggacgcgttagccaaatcacccagccaggcaccagcggtcaagagaggccaccttccagagtggcatctaaggaacagcagttgttaccccaggaagcgagtactggtgagaaatcatcaacaatgaggatatcatatttgtag

SEQ ID NO: 277608 - DNA, 1257 bp, Artificial Sequence
  derived and/or modified sequence
atggatatgctccatccttctagtgtgtctacaacctctgagcccgagaacgccagtagcgcttggcctccagacgctacactcggaaacgtgagtgccggccccagcccagcagggctcgccgtgagtggggtacttatcccactggtttacctcgtagtgtgcgtcgtggggctgctaggaaacagtctggtgatctatgttgtgttgagacacaccgcttccccaagtgtgactaatgtgtacattctgaacctcgcactggccgacgaattgtttatgcttggattgccatttttagcagcgcaaaatgcactgagttattggccatttggctccctgatgtgccggctcgtgatggctgttgacggcatcaaccagtttacttccatcttttgcttgacggttatgtccgtggacaggtacctagcagtggtccaccctactcggagcgccagatggcggacggcccctgtcgcaaggactgtttctgcggctgtctgggtcgcttcggccgttgtcgtgctccccgtggtagtgtttagcggggtgcctaggggaatgtcgacgtgccacatgcaatggcccgagcctgctgcggcatggcgagcggggtttatcatttacacggcagcgctgggcttcttcggtccattgctagttatatgcctctgctatttgctgatcgtcgtgaaagtgcggagtgctggacgccgtgtgtgggccccatcttgtcagaggcgcaggcgctcggagcgtagggtaactcgtatggtggtggctgtggtcgctctgtttgtgctttgctggatgccattttacgtactaaatatcgtcaacgtggtctgccccttgcctgaggaacctgccttcttcgggctctatttcctggtcgtcgctttaccctacgctaattcatgcgccaaccccatcttgtatgggttcttatcctaccgctttaagcagggcttcaggagagtgctgctccgcccttcacgccgggtgagatcacaggaaccgacggtgggacctcccgaaaagacagaggaagaggatgaagaagaggaagacggagaggagtctagggaaggcggcaagggcaaagaaatgaacggcagggtgtcccagatcacccagcccggaacttccggacaggaaagacccccaagcagggtggctagcaaagagcagcagctgctcccccaagaagcgagcactggcgaaaaatcttccaccatgcgcatcagctacttgtag

SEQ ID NO: 277609 - DNA, 1257 bp, Artificial Sequence
  derived and/or modified sequence
atggacatgctgcaccccagctctgtgtccaccaccagcgagccagaaaatgccagcagcgcctggcccccagatgccaccctgggcaatgtgtctgctggccccagccctgctggcctggccgtgtctggagtgctgatccccctggtgtacctggtggtgtgtgtggtgggcctgctgggcaacagcctggtgatctacgtggtgctgcggcacacagccagccccagcgtgaccaacgtgtacatcctgaacctggccctggctgatgagctgttcatgctgggcctgcccttcctggccgcccagaatgccctgagctactggcccttcggcagcctgatgtgccgcctggtgatggctgtggatggcatcaaccagttcaccagcatcttctgcctgactgtgatgtctgtggaccgctacctggccgtggtgcaccccaccaggtctgcccgctggaggacagcccctgtggccaggacagtgtctgctgctgtgtgggtggccagcgctgtggtggtgctgcctgtggtggtgttcagcggcgtgccccggggcatgagcacctgccacatgcagtggccagagcctgctgctgcctggagggctggcttcatcatctacacagctgccctgggcttcttcggccccctgctggtgatctgcctgtgctacctgctgattgtggtgaaggtgcgctctgctggccggcgggtgtgggcccccagctgccagaggagaagaagaagtgaaagaagagtgaccaggatggtggtggccgtggtggccctgtttgtgctgtgctggatgcccttctacgtgctgaacatcgtgaatgtggtgtgccccctgcctgaggagcccgccttcttcggcctgtacttcctggtggtggccctgccctatgccaacagctgtgccaaccccatcctgtatggcttcctgagctaccgcttcaagcagggcttcagaagagtgctgctgcggcccagcagaagagtgcgcagccaggagcccaccgtgggccccccagagaagacagaggaggaggatgaggaggaggaggatggagaggagagccgggagggcggcaagggcaaggagatgaatggccgggtgtcccagatcacccagcccggcaccagcggccaggagcggccccccagccgggtggccagcaaggagcagcagctgctgccccaggaggccagcactggagagaagagcagcaccatgaggatctcctacctgtag

SEQ ID NO: 277610 - DNA, 1257 bp, Artificial Sequence
  derived and/or modified sequence
atggacatgctgcaccccagcagcgtgagcaccaccagcgagcccgaaaatgccagcagcgcttggccgcccgatgccacactggggaacgtttcagctggtccttctcccgccggcctggctgtctccggtgtactcattcccctggtgtacttggtcgtgtgcgtggtcggtctcctgggtaacagtctggtgatctatgttgtattgcgccataccgccagtccctctgttactaatgtttatatcctgaacctcgccttagctgatgaactcttcatgctgggtctcccatttctggccgctcagaatgcattatcgtactggcctttcggctccctgatgtgtcgcctcgttatggccgttgacggcattaatcagttcacaagcattttttgtttaaccgtgatgagcgtggatcgctacctggcggtggtccaccccaccagaagtgcgcggtggcgaacagctccggtggctagaactgtgtccgctgcagtctgggtagcgtccgcagtggttgtcctgcccgtcgttgtctttagcggagtccctcgcggtatgagtacttgtcacatgcagtggcccgagcctgcagccgcatggcgggccggattcattatctacacagccgccctggggttttttgggccacttctggttatatgcctgtgttatttgctgattgtggtgaaagtgaggtccgctggtcggagggtttgggccccgagctgtcagaggcgcaggcgtagcgaacgaagagtcaccagaatggtggtggctgtggtagccctgtttgtcctgtgttggatgccgttctatgtgctgaacatcgtgaatgtcgtctgccctctccccgaagagccagcctttttcggcctctactttcttgtagtggctctgccctacgccaacagctgtgccaatcccatactctacggctttctaagctacagatttaagcaaggattcagacgcgtgcttctgcggccatccaggagagtgcgttcacaggaaccaacggtaggcccccccgaaaagaccgaggaagaggacgaggaggaagaagacggggaagagagtcgcgaggggggcaagggtaaggagatgaacggcagagtgagccagatcacccagccaggcaccagcggtcaggagcgcccaccgtccagggtggcctcaaaagaacaacagctgcttccacaggaggccagcaccggagagaagtcatccaccatgaggataagttatctgtag

SEQ ID NO: 277611 - DNA, 1257 bp, Artificial Sequence
  derived and/or modified sequence
atggacatgctgcaccccagcagcgtgagcaccaccagcgagcccgaaaatgcctcatccgcctggcctcccgacgcaaccctggggaatgtgagtgccggccctagccccgctggacttgccgtgagcggagtgctcatcccgctagtctacctggtggtgtgtgtggtcggactgctgggcaacagcctggtaatttatgttgttcttaggcatactgccagcccctccgtcacaaacgtgtatatcttgaacctggctctcgcagacgagctattcatgctgggcttacctttcctcgcagctcaaaatgccctttcctactggccatttggttcccttatgtgccggctggttatggccgtcgatggtataaatcagtttacgtccatcttctgtctcacagtgatgtccgtagacagataccttgccgtagtgcatccaacgcggtccgcaaggtggaggaccgcgccggtggcccggacagtatctgctgctgtttgggttgcctcggcggtggtggtactccccgtggtcgtgttctccggagtgcccaggggcatgagcacttgtcacatgcagtggccagagcccgcagccgcctggagagccgggtttattatttataccgcagctctgggcttcttcggacccttactggttatatgtctgtgctatcttctgatcgtggtgaaggtacgttctgccgggagacgtgtctgggcaccatcttgtcagaggagaaggcgatcagaaagaagagtgaccagaatggtggtggccgtggttgcactcttcgtgctttgttggatgccattttacgtactgaatatcgttaatgtggtttgtccactccctgaggagcctgctttcttcggtctgtatttcttggtcgtggccctcccctacgctaattcctgcgccaatcctatactttacggtttcctatcatatcgatttaagcagggttttcgcagagtattgcttcggccttcccgtagggttcgcagccaagagccgacggtaggtccccccgaaaaaacagaggaagaagacgaggaggaagaggatggcgaggaatcacgggaaggtgggaagggcaaggagatgaatggtcgcgtgtcacagattactcaaccgggcacctcagggcaagaaaggcctccaagccgcgtggcaagcaaggagcagcaattactcccccaagaggctagcactggtgaaaagagttccaccatgcgtatctcatatctgtag

SEQ ID NO: 277612 - DNA, 1257 bp, Artificial Sequence
  derived and/or modified sequence
atggatatgctccaccccagcagcgtctcaacaacatccgagccagaaaatgcttcttctgcatggccaccagatgcgacgctcggaaacgtgtcggctggcccatctcctgcaggactggcggtgagcggagttctcattccactcgtctatctcgtggtgtgcgtcgtggggttgctggggaactcgttggtcatttacgtcgtgctgaggcacaccgcaagtccctctgttactaacgtttacattttaaacctggccctggccgatgaactattcatgctgggactgccctttctggccgctcagaacgctttgagttactggccatttggcagcttgatgtgtaggttggtgatggccgtggacggcatcaaccagttcacttccattttctgtttaactgtgatgtccgtggatcggtatttagccgtcgttcatccaactaggagcgcccgatggcgtacagctccggtcgcccgtacggtgtcagcagccgtgtgggtagcctcagcggttgtggtcctgcccgtggtcgttttttccggggtccccaggggtatgagcacgtgtcacatgcagtggccggagccggcagccgcttggcgtgcagggttcatcatctatactgccgctctgggtttttttgggcctttactggtcatttgcctgtgctacctgctgatcgtcgtcaaggtgcggagcgcaggacggcgagtctgggcacccagttgtcagcgcagaaggagatccgagcgcagagtgaccagaatggtcgtcgccgtggtagcgctgtttgtcctctgctggatgcctttctacgtcttaaacatcgtcaacgtggtctgtccactgccagaagagcccgcattcttcggtctctattttctggtggtagctctaccctacgcaaattcatgtgccaacccgattttatatggtttcctgagctatcgttttaagcagggctttaggagggtgctgttacgccctagcagacgcgtgcggtcccaagaaccaaccgtcggcccacctgagaagacggaggaagaagatgaggaggaggaggatggtgaggagtctcgcgaagggggtaaaggcaaggaaatgaacggacgtgtaagccaaattacacaacccggtacgtcaggtcaggagcgccctccctccagagtcgcctctaaggagcaacagctcctcccgcaggaggcctcaactggtgagaaatctagcacaatgaggatctcatacttgtag

SEQ ID NO: 277613 - DNA, 1257 bp, Artificial Sequence
  derived and/or modified sequence
atggacatgctacatccatcctccgtatcgaccacctccgagcctgagaacgccagcagtgcctggccgccagacgcgacgttggggaacgtctcagctggaccttccccagccggtttggccgtaagcggagtgttgatccctctggtgtatctggttgtgtgcgttgtcggcttgctgggaaacagcctggtgatctatgtggtcttgaggcacactgctagcccgtccgttaccaacgtctacatccttaatttggcactcgctgacgaattgttcatgttgggccttcctttcctggccgcacagaatgcactttcatactggccatttgggtccctaatgtgtaggttggtgatggctgtagacggtatcaatcagttcactagtatattttgcttgaccgtaatgtcagtcgaccgctatcttgctgttgtccaccctacgcggtccgcaagatggcgcaccgcaccagtggctagaacggtatctgccgctgtgtgggtggcctccgccgttgtggtactccctgtcgtggtgttctctggggttccacgcggaatgtccacttgccatatgcaatggccagaacctgccgctgcatggcgggctggattcatcatatataccgccgctttggggttctttggtccccttcttgtcatttgcctgtgttacctgctcattgtggtaaaggtcaggtccgctggtcgcagagtctgggctccaagctgccagcggagacgccgttctgaacgcagagtaacccgaatggtggtggcggtcgtggccctattcgtcttgtgttggatgccattctatgtcctgaacatcgtgaatgttgtgtgcccgttgccagaagaaccagccttctttggactgtacttccttgtcgtggccctcccgtatgccaatagctgcgccaatcccattttgtacggattcctttcatacagatttaaacagggttttaggagagttttgctgaggccctccaggagggtccgcagtcaagaaccaacagtgggccctcccgagaaaactgaggaggaggacgaggaggaagaggacggggaggagagcagggaggggggaaagggaaaggagatgaacgggagagtctcacagatcactcagcctggcaccagcggacaagagaggcctccctccagagtggcttcaaaagaacaacaattgctgccacaggaggcatctaccggcgagaaatcaagcacaatgagaatttcctatctgtag

SEQ ID NO: 277614 - DNA, 4099 bp, Artificial Sequence
  derived and/or modified sequence
tccctgtcacgcatctctcatcactccccctcattctgcctttcctcctactcacggtctcctctccctctccctctctctctctccccctccctctttctctctctctctctttctccacctcctcccgaccccctttcccctctatttctattggcttctgtgtcccttgctcccctcttctcttcctcaccctgggaagcttctcccccctatccttgcccctgcccccccaggatgtgtcctggagatggggggtgacgtaccaggctctggttgggaagtcagggccggagaccagatgggagaggctctgtggacagccgtggccgagggcctgggagggaacctgagcccgcaagcggtctagaagtgggtgccttgtggggaccctagttaggagtgccctgggggcacctggggactgggcagggagaggggacagcagaatgataaccagcctggcggcaaggagggaagccctcaccccatgggcaggcaaatagctgactgctgaccaccctcccctcagccatggacatgcttcatccatcatcggtgtccacgacctcagaacctgagaatgcctcctcggcctggcccccagatgccaccctgggcaacgtgtcggcgggcccaagcccggcagggctggccgtcagtggcgttctgatccccctggtctacctggtggtgtgcgtggtgggcctgctgggtaactcgctggtcatctatgtggtcctgcggcacacggccagcccttcagtcaccaacgtctacatcctcaacctggcgctggccgacgagctcttcatgctggggctgcccttcctggccgcccagaacgccctgtcctactggcccttcggctccctcatgtgccgcctggtcatggcggtggatggcatcaaccagttcaccagcatattctgcctgactgtcatgagcgtggaccgctacctggccgtggtacatcccacccgctcggcccgctggcgcacagctccggtggcccgcacggtcagcgcggctgtgtgggtggcctcagccgtggtggtgctgcccgtggtggtcttctcgggagtgccccgcggcatgagcacctgccacatgcagtggcccgagccggcggcggcctggcgagccggcttcatcatctacacggccgcactgggcttcttcgggccgctgctggtcatctgcctctgctacctgctcatcgtggtgaaggtgcgctcagctgggcgccgggtgtgggcaccctcgtgccagcggcggcggcgctccgaacgcagggtcacgcgcatggtggtggccgtggtggcgctcttcgtgctctgctggatgcccttctacgtgctcaacatcgtcaacgtggtgtgcccactgcccgaggagcctgccttctttgggctctacttcctggtggtggcgctgccctatgccaacagctgtgccaaccccatcctttatggcttcctctcctaccgcttcaagcagggcttccgcagggtcctgctgcggccctcccgccgtgtgcgcagccaggagcccactgtggggcccccggagaagactgaggaggaggatgaggaggaggaggatggggaggagagcagggaggggggcaaggggaaggagatgaacggccgggtcagccagatcacgcagcctggcaccagcgggcaggagcggccgcccagcagagtggccagcaaggagcagcagctcctaccccaagaggcttccactggggagaagtccagcacgatgcgcatcagctacctgtagggcctggggaaagccaggatggcccgaggaagaggcagaagccgtgggtgtgcctagggcctacttcccaaggtgccacaggcccatgatgggatgttgaggggcctggactttgatgctattgctgccaggtcttgctgtgtgaccttgggtaggttgcttctactctctgggccttgttttctcctctgtgactcagggataggagtcatcagcctggatgagctatgtcagatgagaggtttggagggcactgttgctgggctgacctggctgagcaggcaaaaggtgggtgcagactggcctccccccagggatggagtgtcttggggcatcaactagaatcttggccctcagagggataaaccaaggccaggatttcttgggctcagagtcaggaacacaggagctgctgggggctgggctggaaacctaaacagaagaaagcctaacccggtgggaggagtggggcagaaatggtcaggccccagatcagctccctcccctcgactgtgaggccttggaccagctctgctcctctctaggcctcaggcttcacctgggtaaaacccaacaacctctacacccttttggcccaggcagtcaatgctggaggtcctgtgctcctggacgggaagagcaggtgaatttcctgctcatggaagcgaatgaagtccagcttcagggtctctcactgcctgggcttttgcaaggccctgcatctacttttgtacttgtcattttgtattcgttttcttaaagagggacctcgaactgcataagcttaggccacccaaagcctggctctgcccctgctgaggtcagccacccaatccccaaggaagctcatgttgggtcttatggctggagtaggggcccccgggggttcccaggtcttttgagggcttccaggcacctccttgtaggaagggccatccctgttcctctccttgtgacccatattctcccttcctggagaccgagacagggacccagcccatgaggactggcatggaaaggcagagtgtctgaagagcgctgtgaggagaaggaagaggaagggagaagaggaagaggaaggagaaggaagaggaagacaagggggaaaggggaggatgaggagggggaaggagaagtacagatctgtttcctggagccgtctttggcccccctgggctgagctcagtggtagcatctgtgaacctgagttgccgacaacagccccacccaaccagtactgagggaaggacacgatcagggtggaacagccagggtgcaatggcaaatgcacagagtacagacaggcacagggcctgcgtccctgaggggcctcagagtgctgccaagagggctcaggccttaataaagccctagggtggagctggctaccagggacattgggaggactggggagctccctccccatgctctatcatcctggagactacaggtcgggaggcccagggaagacaagaagaggctgaagtgggactgtggagggggaccatggggagcagccaccatccaaggctgggcctagactccctcccagagatggtccctcagagctgtggtgaggctggccctgggagggtgagacccccggtgaaatccttccgcttccccaccccttgcagagggcaggggtcctcagggaaagcacaggaaccagacttttggagacttggatcttcagcacacctcagggtcctgggctggcattggccttccgggcctcaatttccccatcaacaaatggagatgaatcccagcttggctgcctcctgggatctaacgagaaaatgagtcatgtgaggtaacttccaggctcactgcaatgggtacggtggggtgtatcagattataaagtgggggtgccctcctcacccccaggcttggcctatacccccctctccatcaagtggcctctctgtgtctgtcctttggggtgaggacactgtaggccatgagaaatgggcagttggggggtcagaggccaagggttagggaggcagggcttggggagagtgtgggaccatcagaagagaaggaagtttacaaaaccacattttgtgtggagatggaggctggaggcccggccctgggacttggtctggggtttcttgaggaagatctgagggtccaagggaggaaggatgccctggccttctggccttctctggctgatcctgccttcttgctgcctaggacaggagagtaatgtcctagaatggtccctgggaggccagttaggaaaccctttgctgcttctgtctctagctcttgtcaataaagacggtgacacctg

SEQ ID NO: 277615 - DNA, 1780 bp, Artificial Sequence
  derived and/or modified sequence
tgagtctgaggcttccatccggggacaatgtcccaccttggagctctccttgttgaacggcttggctgttcacatttatggctgttctgggtgatgtcctaggttctggggttaagaaataaatcattcagggcccctgccttcaagagccagtgttctagcgggtgggagatgggcaaatggagaatgattggggtgcctggcctccctgaactgttagggctgtgcggctcaggacagccactcaccctctctgtgctgtctcctcctgaacagtcctccaaggagtccgcccccagctttcaggcaagcttgtgccaaagataaaccagacagggaggaaaagtccctccttctcaaggatgaactagatcatgcacaggattccagctctaaagaaaagacggcacctcaattgcaggcaaatagctgactgctgaccaccctcccctcagccatggacatgcttcatccatcatcggtgtccacgacctcagaacctgagaatgcctcctcggcctggcccccagatgccaccctgggcaacgtgtcggcgggcccaagcccggcagggctggccgtcagtggcgttctgatccccctggtctacctggtggtgtgcgtggtgggcctgctgggtaactcgctggtcatctatgtggtcctgcggcacacggccagcccttcagtcaccaacgtctacatcctcaacctggcgctggccgacgagctcttcatgctggggctgcccttcctggccgcccagaacgccctgtcctactggcccttcggctccctcatgtgccgcctggtcatggcggtggatggcatcaaccagttcaccagcatattctgcctgactgtcatgagcgtggaccgctacctggccgtggtacatcccacccgctcggcccgctggcgcacagctccggtggcccgcacggtcagcgcggctgtgtgggtggcctcagccgtggtggtgctgcccgtggtggtcttctcgggagtgccccgcggcatgagcacctgccacatgcagtggcccgagccggcggcggcctggcgagccggcttcatcatctacacggccgcactgggcttcttcgggccgctgctggtcatctgcctctgctacctgctcatcgtggtgaaggtgcgctcagctgggcgccgggtgtgggcaccctcgtgccagcggcggcggcgctccgaacgcagggtcacgcgcatggtggtggccgtggtggcgctcttcgtgctctgctggatgcccttctacgtgctcaacatcgtcaacgtggtgtgcccactgcccgaggagcctgccttctttgggctctacttcctggtggtggcgctgccctatgccaacagctgtgccaaccccatcctttatggcttcctctcctaccgcttcaagcagggcttccgcagggtcctgctgcggccctcccgccgtgtgcgcagccaggagcccactgtggggcccccggagaagactgaggaggaggatgaggaggaggaggatggggaggagagcagggaggggggcaaggggaaggagatgaacggccgggtcagccagatcacgcagcctggcaccagcgggcaggagcggccgcccagcagagtggccagcaaggagcagcagctcctaccccaagaggcttccactggggagaagtccagcacgatgcgcatcagctacctgtagggcctggggaaagccaggatggcccgaggaagaggcagaagccgtgggtgtgcctagggcctactt

SEQ ID NO: 277616 - protein, 229 aa, Artificial Sequence
  derived and/or modified sequence
MDLLQFLAFLFVLLLSGMGATGTLRTSLDPSLEIYKKMFEVKRREQLLALKNLAQLNDIHQQYKILDVMLKGLFKVLEDSRTVLTAADVLPDGPFPQDEKLKDAFSHVVENTAFFGDVVLRFPRIVHYYFDHNSNWNLLIRWGISFCNQTGVFNQGPHSPILSLMAQELGISEKDSNFQNPFKIDRTEFIPSTDPFQKALREEEKRRKKEEKRKEIRKGPRISRSQSEL

SEQ ID NO: 277617 - DNA, 690 bp, Artificial Sequence
  derived and/or modified sequence
atggatctcctccaatttctggcatttctgtttgtgctcctgctttccggaatgggagcaaccggaactctgagaacatcgcttgacccatctttggagatctacaagaagatgttcgaagtcaagcggcgagaacaacttctggccttaaaaaatctggctcagcttaacgatatccaccagcaatacaaaatcctggatgttatgttaaaaggcctgttcaaggtcttagaagacagccgaactgttctaaccgcagcagacgtgctgccagacggcccattcccacaggatgagaagttgaaagatgccttctcccacgtggttgagaacaccgctttcttcggagatgttgtgctaagattcccacgaatcgtgcactactatttcgaccataactccaactggaacctcctgatccgctgggggatttctttttgtaaccagacaggtgtttttaatcaggggcctcattcaccaatcctttcacttatggcacaggaactcggtatttccgaaaaggacagtaacttccagaacccttttaagatcgatcgcaccgaatttatcccctcaaccgaccccttccaaaaagctttacgggaggaagaaaagagacgcaagaaagaggaaaagcggaaggaaattcgtaaggggccacggatcagccgctcccagtcagaactgtag

SEQ ID NO: 277618 - DNA, 690 bp, Artificial Sequence
  derived and/or modified sequence
atggatctgctgcagttccttgcatttctgttcgttctgctgctctctggtatgggcgcgacaggcacactgcggacgagtctggaccccagcctggaaatttataaaaaaatgtttgaggttaaaagacgtgagcagctcctggctttgaaaaacttggcccagctgaacgatatccaccaacagtacaaaattttggacgttatgctgaagggcctatttaaagttctagaagatagtagaaccgtcctcaccgcagccgatgtcctccctgatggccccttcccacaagatgagaaactgaaagacgccttttcacatgtcgtcgaaaatacagccttctttggggatgtcgttctccgcttcccgagaatagtgcattattatttcgaccataacagtaactggaacctgcttattcggtggggcatcagcttctgcaaccagaccggcgtgttcaaccaaggcccccattcacccattcttagtctgatggctcaggagctggggataagcgaaaaggactccaacttccagaacccgtttaaaatagaccgcactgaattcatcccatcaacagacccctttcaaaaggccttgagagaagaggagaaaagaagaaagaaggaggagaagcgtaaagagatcaggaagggaccccgtatctcccgatcccaatcggaactatag

SEQ ID NO: 277619 - DNA, 690 bp, Artificial Sequence
  derived and/or modified sequence
atggatctgctgcagttccttgcatttctgttcgttctgctgctctctggtatgggcgcgacaggcacactgcggacgagtctggaccccagcctggaaatttataaaaaaatgtttgaggttaaaagacgtgagcagctcctggctttgaaaaacttggcccagctgaacgatatccaccaacagtacaaaattttggacgttatgctgaagggcctatttaaagttctagaagatagtagaaccgtcctcaccgcagccgatgtcctccctgatggccccttcccacaagatgagaaattgaaggacgccttctcgcatgtggtagagaacacagcgttcttcggggacgtagtgctgcgctttccccgcatagtccactattattttgaccacaactccaattggaacctgctaattcgctggggaatcagtttctgtaaccagacaggcgttttcaatcagggcccccatagtcctatcctttctcttatggcccaagaactcggcatctctgagaaagattccaattttcagaacccgtttaaaatcgaccgcacagaattcataccctccacagacccttttcagaaagctctgagagaggaggagaaaagacgaaagaaggaggaaaaaagaaaggaaatcagaaaggggccaagaatcagtaggagccagagcgagctgtag

SEQ ID NO: 277620 - DNA, 1270 bp, Artificial Sequence
  derived and/or modified sequence
agttgctttgctgttagcctgttggaccttcgagcctagctgctcgcacaggactcggccacctgcccttcctgcaccgactggccagctcaagaggtttggatatggaccttcttcaattcctggccttcctctttgtcctgcttttgtctgggatgggagccacaggcaccttgaggacctccctggacccaagcctggagatctacaagaagatgtttgaggtgaagcggcgggagcagctgttggcactgaagaacctggcacagctgaacgacatccaccagcagtacaagatccttgatgtcatgctcaaggggctctttaaggtgctggaggactcccggacagtgctcaccgctgctgatgtgctcccagatgggcccttcccccaggacgagaagctgaaggatgctttctcccacgtggtggagaacacggccttcttcggcgatgtggtgctgcgcttcccgaggattgtgcactattactttgaccacaactccaactggaacctcctcatccgctggggtatcagtttctgcaaccagacaggcgtcttcaaccaggggccccactcgcccatcctcagcctgatggcccaggagctggggatcagtgagaaagactccaacttccagaacccatttaaaatcgaccgcacagagttcattcccagcactgaccctttccagaaggccctgagagaagaagagaaacgccgaaagaaagaggagaagcggaaggagatccgaaaaggcccaaggatctccagatcccagtctgagttatagccctggagcagctcagggctcagggggccacaaggaggcaggtcgggaggaagaagaggtggaggtgtggttgtggtggagagcaccagctagccccttccagaaggggaggccacatttgcccggccccctggagctgggtctgagccccagctgaagggactgagcctcagatggctggattttctctcaggggcctcctgctgaaggggccttcagaggattttatgctggaaatatgaccctgtgcagactgctgggggaggcaggaggatgcctgcctggaccctgttggtggctgaagacctctggccagctggcttccgcccttggtggggaagcagcagaactaggttctgagccacgggtcagggtgccaccctgctgctggccccactgtgtcacagagctgcctggcacaggtcccagcccctctgcagagacacaataaaagccagcagaccctttggaccgac

SEQ ID NO: 277621 - DNA, 690 bp, Artificial Sequence
  derived and/or modified sequence
atggacctgctgcagttcctggccttcctgttcgtgctgctgctgagcggcatgggcgccaccggcaccctgagaaccagcctggaccccagcctggagatctacaagaagatgttcgaggtgaagagaagagagcagctgctggccctgaagaacctggcccagctgaacgacatccaccagcagtacaagatcctggacgtgatgctgaagggcctgttcaaggtgctggaggacagcagaaccgtgctgaccgccgccgacgtgctgcccgacggccccttcccccaggacgagaagctgaaggacgccttcagccacgtggtggagaacaccgccttcttcggcgacgtggtgctgagattccccagaatcgtgcactactacttcgaccacaacagcaactggaacctgctgatcagatggggcatcagcttctgcaaccagaccggcgtgttcaaccagggcccccacagccccatcctgagcctgatggcccaggagctgggcatcagcgagaaggacagcaacttccagaaccccttcaagatcgacagaaccgagttcatccccagcaccgaccccttccagaaggccctgagagaggaggagaagagaagaaagaaggaggagaagagaaaggagatcagaaagggccccagaatcagcagaagccagagcgagctgtag

SEQ ID NO: 277622 - DNA, 690 bp, Artificial Sequence
  derived and/or modified sequence
atggacctcctccaattccttgcttttctgtttgtgctgttgctctcggggatgggggccaccggtacgctgagaaccagtctagacccctcactggagatttacaaaaagatgtttgaagtaaagagacgggagcagttacttgctctcaaaaatctggcccagctcaatgatatccaccaacaatataaaattcttgacgtcatgctgaaggggctctttaaggtgctagaagattcaaggacagtcctgacagcggccgacgtgttacccgatggaccttttccacaagatgagaagttgaaggatgctttctcacatgttgtggagaataccgctttcttcggtgatgtcgtgcttcgattcccacgtattgttcactactactttgaccacaattcgaattggaatctgttgatcagatggggaattagtttttgcaatcagaccggggtgttcaaccagggtcctcatagtcccatactgagcctcatggctcaggaactggggattagcgagaaggattcaaatttccagaatccctttaagattgaccgaacagagtttatccctagtaccgaccccttccagaaagccctgagggaagaggagaagaggcgtaaaaaagaggagaagcgaaaggagatacggaagggtccaagaatctctcggtctcagtccgagctgtag

SEQ ID NO: 277623 - DNA, 690 bp, Artificial Sequence
  derived and/or modified sequence
atggacctgctgcagttcctggccttcctgtttgtgctgctgctgagcggcatgggcgccaccggcaccctgcggaccagcctggaccccagcctggagatctacaagaagatgtttgaggtgaagagaagagagcagctgctggccctgaagaacctggcccagctgaatgacatccaccagcagtacaagatcctggatgtgatgctgaagggcctcttcaaggtgctggaggacagcaggacagtgctgacagctgctgatgtgctgcctgatggccccttcccccaggatgagaagctgaaggatgccttcagccacgtggtggagaacacagccttctttggagatgtggtgctgcgcttccccagaattgtgcactactactttgaccacaacagcaactggaacctgctgatccgctggggcatctccttctgcaaccagacaggagtcttcaaccagggcccccacagccccatcctgagcctgatggcccaggagctgggcatcagcgagaaggacagcaacttccagaaccccttcaagattgacagaacagagttcatccccagcacagaccccttccagaaggccctgcgggaggaggagaagaggaggaagaaggaggagaagaggaaggagatcaggaagggcccccgcatcagccgcagccagagcgagctgtag

SEQ ID NO: 277624 - DNA, 690 bp, Artificial Sequence
  derived and/or modified sequence
atggacctgctgcagttcctggccttcctgttcgtgctgctgctgtccggtatgggcgccacaggaacgcttagaaccagtctcgacccctccttggaaatttacaaaaagatgtttgaagttaaacggagggagcagctcctcgctctaaaaaacctggctcaacttaatgatattcaccaacagtataagattctagacgttatgctcaaaggtctcttcaaagtgctagaagactccagaaccgtcttaacagccgccgacgtgctgccagatggaccattccctcaggatgagaaattgaaagacgcattttcacacgttgtggagaataccgcttttttcggagacgtcgtcctgaggtttcccagaattgtccactattactttgatcataatagcaactggaacctgcttatccggtggggtatctctttttgcaatcagaccggtgttttcaaccagggtccccacagcccaattttatccctcatggcacaggagctggggatttctgagaaggatagtaacttccagaaccctttcaaaatagacaggacagaattcattccttccacagacccttttcagaaagctctgcgggaagaggaaaagaggcggaagaaggaggagaaaagaaaagagattcgaaaagggccccggatctctcgctcacaaagtgagctgtag

SEQ ID NO: 277625 - RNA, 690 nt, Artificial Sequence
  derived and/or modified sequence
auggaucugcugcaguuccuugcauuucuguucguucugcugcucucugguaugggcgcgacaggcacacugcggacgagucuggaccccagccuggaaauuuauaaaaaaauguuugagguuaaaagacgugagcagcuccuggcuuugaaaaacuuggcccagcugaacgauauccaccaacaguacaaaauuuuggacguuaugcugaagggccuauuuaaaguucuagaagauaguagaaccguccucaccgcagccgauguccucccugauggccccuucccacaagaugagaaacugaaagacgccuuuucacaugucgucgaaaauacagccuucuuuggggaugucguucuccgcuucccgagaauagugcauuauuauuucgaccauaacaguaacuggaaccugcuuauucgguggggcaucagcuucugcaaccagaccggcguguucaaccaaggcccccauucacccauucuuagucugauggcucaggagcuggggauaagcgaaaaggacuccaacuuccagaacccguuuaaaauagaccgcacugaauucaucccaucaacagaccccuuucaaaaggccuugagagaagaggagaaaagaagaaagaaggaggagaagcguaaagagaucaggaagggaccccguaucucccgaucccaaucggaacuauag

SEQ ID NO: 277626 - RNA, 690 nt, Artificial Sequence
  derived and/or modified sequence
auggaucugcugcaguuccuugcauuucuguucguucugcugcucucugguaugggcgcgacaggcacacugcggacgagucuggaccccagccuggaaauuuauaaaaaaauguuugagguuaaaagacgugagcagcuccuggcuuugaaaaacuuggcccagcugaacgauauccaccaacaguacaaaauuuuggacguuaugcugaagggccuauuuaaaguucuagaagauaguagaaccguccucaccgcagccgauguccucccugauggccccuucccacaagaugagaaauugaaggacgccuucucgcaugugguagagaacacagcguucuucggggacguagugcugcgcuuuccccgcauaguccacuauuauuuugaccacaacuccaauuggaaccugcuaauucgcuggggaaucaguuucuguaaccagacaggcguuuucaaucagggcccccauaguccuauccuuucucuuauggcccaagaacucggcaucucugagaaagauuccaauuuucagaacccguuuaaaaucgaccgcacagaauucauacccuccacagacccuuuucagaaagcucugagagaggaggagaaaagacgaaagaaggaggaaaaaagaaaggaaaucagaaaggggccaagaaucaguaggagccagagcgagcuguag

SEQ ID NO: 277627 - protein, 22 aa, Artificial Sequence
  derived and/or modified sequence
MGAAAVRWHLCVLLALGTRGRL

SEQ ID NO: 277628 - protein, 347 aa, Artificial Sequence
  derived and/or modified sequence
MGAAAVRWHLCVLLALGTRGRLAGGSGLPGSVDVDECSEGTDDCHIDAICQNTPKSYKCLCKPGYKGEGKQCEDIDECENDYYNGGCVHECINIPGNYRCTCFDGFMLAHDGHNCLDVDECQDNNGGCQQICVNAMGSYECQCHSGFFLSDNQHTCIHRSNEGMNCMNKDHGCAHICRETPKGGVACDCRPGFDLAQNQKDCTLTCNYGNGGCQHSCEDTDTGPTCGCHQKYALHSDGRTCIEKDEAAIERSQFNATSVADVDKRVKRRLLMETCAVNNGGCDRTCKDTATGVRCSCPVGFTLQPDGKTCKGQHVELCGCPCLYWPGQEPPCACIAGPRAGLNGGHV

SEQ ID NO: 277629 - DNA, 66 bp, Artificial Sequence
  derived and/or modified sequence
atgggcgcggcggccgtgcgctggcacttgtgcgtgctgctggccctgggcacacgcgggcggctg

SEQ ID NO: 277630 - DNA, 1044 bp, Artificial Sequence
  derived and/or modified sequence
atgggtgcagctgctgtgaggtggcacctgtgcgtcctgctggcattagggacgcgagggcgtttagcaggtggctccggattgcccggatcagtcgacgtggatgaatgctctgagggaactgacgattgtcatatcgacgccatctgccaaaatacacctaagagctacaagtgcctttgtaaacccgggtacaagggcgaaggcaaacagtgcgaagacatcgatgaatgcgagaacgattactacaatggaggctgcgtccatgagtgcattaacatacccgggaactaccgttgtacatgcttcgacggctttatgctcgcccatgacggccacaactgcctggatgtggatgagtgccaggataataacgggggctgtcagcagatctgtgtaaatgcaatggggtcatacgagtgccaatgtcattccggttttttcctgtctgataaccaacatacatgtatccaccgctcgaacgagggaatgaactgcatgaacaaagatcacggttgcgcccacatttgccgcgagacccctaagggcggggtagcctgtgattgccgacccgggttcgacctcgcacagaatcagaaagattgtaccttgacatgtaactacggtaacggaggctgtcagcattcctgcgaggataccgatacggggccaacctgcggctgtcaccaaaagtatgctcttcatagcgatggtcgtacatgtatagagaaagatgaggccgccattgaaaggtcccagttcaacgctacatctgttgccgacgtagacaagagagttaagaggaggctcttgatggagacgtgcgcggtaaacaacggcggctgcgaccgcacatgtaaggacacagcaaccggagtccggtgtagttgtcctgtgggattcactctccaaccagatgggaagacatgcaagggacaacacgtggagttatgcggctgtccctgtctgtactggcccggacaagaacccccctgtgcatgtattgctggccccagggctggattgaacgggggccatgtctag

SEQ ID NO: 277631 - DNA, 1044 bp, Artificial Sequence
  derived and/or modified sequence
atgggcgctgctgctgtgcgctggcacctgtgtgtgctgctggccctgggcacccggggccgcctggccggcggcagcggcctgcccggctctgtggatgtggatgagtgcagcgagggcacagatgactgccacattgatgccatctgccagaacacccccaagagctacaagtgcctgtgcaagccaggctacaagggggagggcaagcagtgtgaagatattgatgaatgtgaaaatgactactacaacggcggctgtgtgcatgagtgcatcaacatccctggcaactaccgctgcacctgctttgatggcttcatgctggcccatgatggccacaactgcctggatgtggatgagtgccaggacaacaatggaggctgccagcagatctgtgtgaatgccatgggcagctatgagtgccagtgccacagcggcttcttcctgagtgacaaccagcacacctgcatccacaggagcaatgaaggcatgaactgcatgaacaaggaccacggctgtgcccacatctgccgggagacccccaagggcggcgtggcctgtgactgcaggcctggctttgacctggcccagaaccagaaggactgcaccctgacctgcaactatggaaatggaggctgccagcacagctgtgaggacacagacaccggccccacctgtggctgccaccagaagtatgccctgcacagtgatggccgcacctgcatcgagaaggatgaagctgccatcgagaggagccagttcaatgccacctctgtggctgatgtggacaagagggtgaagaggcggctgctgatggagacctgtgctgtgaacaatggaggctgtgacaggacctgcaaggacacagccactggagtgcgctgcagctgccctgtgggcttcaccctgcagccagatggcaagacctgcaagggccagcacgtggagctgtgtggctgcccctgcctgtactggccaggccaggagcccccctgtgcctgcatcgccggcccccgggccggcctgaatggaggccacgtgtag

SEQ ID NO: 277632 - DNA, 1044 bp, Artificial Sequence
  derived and/or modified sequence
atgggcgccgccgccgtgcggtggcacctgtgcgtgctgctggccctgggcaccaggggccggctggctggcggatcgggacttcctggcagtgtggatgtggacgaatgttctgaaggtacagacgattgtcatatcgacgccatctgtcaaaacacgccaaagtcatataaatgcttgtgtaagcccggctacaaaggggaaggaaaacaatgtgaagatatcgacgagtgcgaaaacgattactataacggcggatgcgtccatgagtgcataaacatcccaggcaactaccgctgcacctgtttcgacggctttatgttggctcacgatgggcataattgcctcgacgtggatgagtgccaggataataatggcggctgtcagcagatttgcgtcaacgccatgggctcctacgagtgccagtgtcactctggattctttctgagcgacaatcagcatacctgcattcaccgctcaaacgaaggaatgaactgtatgaataaagatcacggttgtgcgcacatttgtcgtgaaactcccaaaggcggagtggcctgcgattgccgccccgggtttgacttagctcagaaccagaaggattgcaccctcacctgtaattacggcaatgggggatgtcagcatagctgcgaagacactgacactgggcccacgtgtggctgccatcagaagtatgccctccactctgacggacgcacttgcatcgagaaagatgaggctgcaatcgagaggtcccagtttaatgctacgtccgtagccgatgtggacaaacgggtcaaaaggcgtctactgatggaaacctgcgctgtgaataatggcgggtgcgacaggacgtgtaaagacaccgccacgggcgtgcgctgttcctgtcccgtcgggtttaccctgcagcccgacggtaaaacttgtaaaggacagcacgtcgagctctgcggctgtccatgtctgtactggcccggccaggaacccccctgcgcgtgtattgctggcccgcgcgctggactgaatggaggacatgtttag

SEQ ID NO: 277633 - DNA, 1044 bp, Artificial Sequence
  derived and/or modified sequence
atgggagccgcagccgttaggtggcacctctgtgttctacttgccctggggaccagaggcagacttgccggaggaagcggactgcccggttctgttgacgtagatgaatgctccgaaggcacagatgactgccatatcgacgctatctgccagaacacccccaaatcttataaatgtctgtgtaagcctggatataaaggagagggaaagcagtgtgaagacatcgacgaatgcgaaaatgattattacaatggcggatgtgttcacgaatgcattaatatccccggtaattatagatgcacctgcttcgatggatttatgcttgcccatgacgggcataactgtctggatgtggatgaatgccaggataataatggtggctgccagcagatttgtgtcaacgctatggggagttacgaatgccaatgccacagcggatttttcttgtcagacaaccaacacacgtgcatacatcgctccaatgaaggaatgaattgtatgaataaggatcatggctgcgcccatatctgcagggagacaccaaagggcggagttgcatgcgattgccggccaggattcgatcttgctcagaaccagaaagattgcacgctgacttgtaattatgggaatgggggatgccaacactcatgtgaagacacagacactggaccgacctgcggatgtcatcagaagtacgctctgcattctgatggaagaacatgtattgagaaagatgaagccgcaatcgagcgaagccaattcaatgcgaccagcgtcgccgacgttgacaaacgggttaaaaggaggctcctcatggagacatgcgcggtgaataatggcggttgcgaccggacctgtaaggacaccgcgacaggagtgaggtgctcttgccccgtgggtttcacgctgcaaccagatggcaagacttgcaaagggcagcacgtggagctgtgcggttgtccttgcctttactggcccggacaagagcccccatgcgcgtgtatagctggacctagagctggcctgaacggcggtcatgtttag

SEQ ID NO: 277634 - DNA, 2258 bp, Artificial Sequence
  derived and/or modified sequence
ggccggtcggtcgggtccccgcgccccgcacgcccgcacgcccagcggggcccgcattgagcatgggcgcggcggccgtgcgctggcacttgtgcgtgctgctggccctgggcacacgcgggcggctggccgggggcagcgggctcccagggtcagtcgacgtggatgagtgctcagagggcacagatgactgccacatcgatgccatctgtcagaacacgcccaagtcctacaaatgcctctgcaagccaggctacaagggggaaggcaagcagtgtgaagacattgacgagtgtgagaatgactactacaatgggggctgtgtccacgagtgcatcaacatcccggggaactacaggtgtacctgctttgatggcttcatgctggcacacgatggacacaactgcctggatgtggacgagtgtcaggacaataatggtggctgccagcagatctgcgtcaatgccatgggcagctacgagtgtcagtgccacagtggcttcttccttagtgacaaccagcatacctgcatccaccgctccaatgagggtatgaactgcatgaacaaagaccatggctgtgcccacatctgccgggagacgcccaaaggtggggtggcctgcgactgcaggcccggctttgaccttgcccaaaaccagaaggactgcacactaacctgtaattatggaaacggaggctgccagcacagctgtgaggacacagacacaggccccacgtgtggttgccaccagaagtacgccctccactcagacggtcgcacgtgcatcgagaaggatgaggctgcaattgagcgctctcagttcaatgccacgtcagtagctgatgtggacaagcgggtgaaacggcggctactcatggagacgtgcgcagtcaataacggaggctgcgaccggacatgcaaggacacagccactggcgtgcgatgcagctgccccgttggattcacactgcagccggacgggaagacatgcaaaggtcagcatgtggagctgtgtgggtgcccctgcctgtactggcctggccaagagcctccgtgtgcttgcatagccgggcccagggctgggctgaacgggggccacgtgtagctgtgggaaaggacacgtggcaatcatttgctttgctgttggagaggccaggaagagggagggctggccagcagcagggtccccagcagagttcgagagaacacaggtcccacggcacatcagcaggttcctgggccaaaaaggcactgatgtcagagaatttggctgcacgctgggttaaacagttaagccagcgtctctactgtgggacttcctgggccctcagtgatagtgtggcttcccaaggcgcgtagaatgtagcgcgtttccgaaccccttgacctttggttgcagtgggtcttgcagagctgatggggacagtctggtgttgggccatctgggacacacaggtctactcatgccaggaaaaataaggacagtgtgtcactactaggggggcgaggctagggggatcccatctgaaaagataaggactcaggacttctgcttgccatcagaaaatgaggagtcaggaagacctgagagtgactggttgaaggaaggagggacagggctggcctgctggtggctggcagtgagggaaggcagaggtgtatcctcccacttgtcccctgagtcaccccacaaagacttactgagtacctcctgggttgaggggaccctcaggaaacaggaagcccagggagctgggagaggagagctgggtgggctctcgagacagccctgcagatgaggaggtccagctacccccaaaggacagacggagccccaagaagctgtgggccctggggcagggtgttaggcctgagtgccggagccctctgtgcagaagggtgaggggcagtgctcagtgcccccagcatcactccagaccaccctccaaacgcccccaccccagcgctgggcagtacccccacactctgccaggaagggagagcctagagagcagggcgtggaggggagaggaactggaacttccaaagtcccatcggggaaaatattgaaagtggaggttagggtgacttaaaatagcttgaggtggactttttttaagcctgtaaaaataaatgtatttttgtacagtgtatgacttcttccttgccaacttgctgggaagaaccgagtgattattgacagaaataacagtgcttccgcctgtttatttgaaaataaagcccttctgtggccacc

SEQ ID NO: 277635 - DNA, 1044 bp, Artificial Sequence
  derived and/or modified sequence
atgggcgccgccgccgtgagatggcacctgtgcgtgctgctggccctgggcaccagaggcagactggccggcggcagcggcctgcccggcagcgtggacgtggacgagtgcagcgagggcaccgacgactgccacatcgacgccatctgccagaacacccccaagagctacaagtgcctgtgcaagcccggctacaagggcgagggcaagcagtgcgaggacatcgacgagtgcgagaacgactactacaacggcggctgcgtgcacgagtgcatcaacatccccggcaactacagatgcacctgcttcgacggcttcatgctggcccacgacggccacaactgcctggacgtggacgagtgccaggacaacaacggcggctgccagcagatctgcgtgaacgccatgggcagctacgagtgccagtgccacagcggcttcttcctgagcgacaaccagcacacctgcatccacagaagcaacgagggcatgaactgcatgaacaaggaccacggctgcgcccacatctgcagagagacccccaagggcggcgtggcctgcgactgcagacccggcttcgacctggcccagaaccagaaggactgcaccctgacctgcaactacggcaacggcggctgccagcacagctgcgaggacaccgacaccggccccacctgcggctgccaccagaagtacgccctgcacagcgacggcagaacctgcatcgagaaggacgaggccgccatcgagagaagccagttcaacgccaccagcgtggccgacgtggacaagagagtgaagagaagactgctgatggagacctgcgccgtgaacaacggcggctgcgacagaacctgcaaggacaccgccaccggcgtgagatgcagctgccccgtgggcttcaccctgcagcccgacggcaagacctgcaagggccagcacgtggagctgtgcggctgcccctgcctgtactggcccggccaggagcccccctgcgcctgcatcgccggccccagagccggcctgaacggcggccacgtgtag

SEQ ID NO: 277636 - protein, 427 aa, Artificial Sequence
  derived and/or modified sequence
MQFFGRLVNTFSGVTNLFSNPFRVKEVAVADYTSSDRVREEGQLILFQNTPNRTWDCVLVNPRNSQSGFRCANCAENEEGCTPLHLACRKGDGEILVELVQYCHTQMDVTDYKGETVFHYAVQGDNSQVLQLLGRNAVAGLNQVNNQGLTPLHLACQLGKQEMVRVLLLCNARCNIMGPNGYPIHSAMKFSQKGCAEMIISMDSSQIHSKDPRYGASPLHWAKNAEMARMLLKRGCNVNSTSSAGNTALHVAVMRNRFDCAIVLLTHGANADARGEHGNTPLHLAMSKDNVEMIKALIVFGAEVDTPNDFGETPTFLASKIGRLVTRKAILTLLRTVGAEYCFPPIHGVPAEQGSAAPHHPFSLERAQPPPISLNNLGSHPSQAGWWAWGAASDGTTGSHAHLTGPEASVHPGLHEGREADRQNMES

SEQ ID NO: 277637 - DNA, 1284 bp, Artificial Sequence
  derived and/or modified sequence
atgcagttcttcggcagactggtgaacaccttcagcggcgtgaccaacctgttcagcaaccccttcagagtgaaggaggtggccgtggccgactacaccagcagcgacagagtgagagaggagggccagctgatcctgttccagaacacccccaacagaacctgggactgcgtgctggtgaaccccagaaacagccagagcggcttcagatgcgccaactgcgccgagaacgaggagggctgcacccccctgcacctggcctgcagaaagggcgacggcgagatcctggtggagctggtgcagtactgccacacccagatggacgtgaccgactacaagggcgagaccgtgttccactacgccgtgcagggcgacaacagccaggtgctgcagctgctgggcagaaacgccgtggccggcctgaaccaggtgaacaaccagggcctgacccccctgcacctggcctgccagctgggcaagcaggagatggtgagagtgctgctgctgtgcaacgccagatgcaacatcatgggccccaacggctaccccatccacagcgccatgaagttcagccagaagggctgcgccgagatgatcatcagcatggacagcagccagatccacagcaaggaccccagatacggcgccagccccctgcactgggccaagaacgccgagatggccagaatgctgctgaagagaggctgcaacgtgaacagcaccagcagcgccggcaacaccgccctgcacgtggccgtgatgagaaacagattcgactgcgccatcgtgctgctgacccacggcgccaacgccgacgccagaggcgagcacggcaacacccccctgcacctggccatgagcaaggacaacgtggagatgatcaaggccctgatcgtgttcggcgccgaggtggacacccccaacgacttcggcgagacccccaccttcctggccagcaagatcggcagactggtgaccagaaaggccatcctgaccctgctgagaaccgtgggcgccgagtactgcttcccccccatccacggcgtgcccgccgagcagggcagcgccgccccccaccaccccttcagcctggagagagcccagcccccccccatcagcctgaacaacctgggcagccaccccagccaggccggctggtgggcctggggcgccgccagcgacggcaccaccggcagccacgcccacctgaccggccccgaggccagcgtgcaccccggcctgcacgagggcagagaggccgacagacagaacatggagagctag

SEQ ID NO: 277638 - DNA, 1284 bp, Artificial Sequence
  derived and/or modified sequence
atgcagttcttcggccgcctggtgaacaccttttctggagtgacaaatttgttcagtaatccatttcgagtgaaagaagtcgccgtggcagattatacttcatccgatcgtgttagagaggaaggccagctcatcctgttccaaaacacacctaaccgcacttgggattgcgtattggtcaacccaaggaattctcagagtgggttcagatgtgctaactgcgctgagaacgaagaaggttgtactcccctgcacctggcctgtagaaagggcgacggggagatcctcgttgagcttgtgcagtattgccacactcaaatggacgtgactgactataaaggggagacagtgttccactatgcggtccagggcgacaatagtcaagtgcttcaactgctcgggaggaatgccgttgcagggctgaaccaggtgaacaatcagggcctcacacccctgcacctggcatgccaattgggtaaacaggaaatggtccgggtcctgttattgtgcaatgcccggtgcaatataatggggccaaacggatatcccattcacagcgcaatgaagtttagtcagaagggctgcgccgagatgataatcagcatggactcgagtcagatccacagtaaagaccccagatacggtgcaagcccgctgcactgggccaagaatgctgaaatggcccgtatgctgctaaaacgcggctgcaacgtaaatagcacgtcaagcgctgggaacaccgcgcttcacgtggccgtaatgcgcaaccgtttcgattgcgcaattgtgctgcttactcacggcgcaaacgcggatgctcgcggggaacatggaaatacccccctgcatctcgccatgtccaaggataacgtcgagatgatcaaggccctcatcgtattcggcgccgaggtggatacacctaacgacttcggtgaaacaccaactttcctcgcctctaaaatcggacgtctggtcactaggaaagcaatcctgacacttttgagaactgtgggtgctgaatattgtttcccaccaatacacggagttcctgcggagcagggcagtgcagccccccaccacccttttagcctggagagggcccagcccccacccatttctttaaacaacctaggtagtcacccaagtcaagcagggtggtgggcgtggggggcagcctcagacgggactacaggaagtcatgcacaccttacagggccagaggcttcggtgcaccccggtctccacgaaggacgagaggcagacagacagaatatggagagttag

SEQ ID NO: 277639 - DNA, 1284 bp, Artificial Sequence
  derived and/or modified sequence
atgcagttcttcggccgcctggtgaacaccttcagcggcgtgaccaacctcttcagcaaccccttccgggtgaaggaggtggccgtggccgactacaccagcagtgacagagtgcgggaggagggccagctgatcctcttccagaacacccccaacagaacctgggactgtgtgctggtgaaccccaggaacagccagagcggcttccgctgtgccaactgtgccgagaatgaggagggctgcacccccctgcacctggcctgcaggaaaggagatggagagatcctggtggagctggtgcagtactgccacacccagatggatgtgacagactacaagggggagaccgtcttccactatgctgtgcagggcgacaacagccaggtgctgcagctgctgggcagaaatgctgtggccggcctgaaccaggtgaacaaccagggcctgacccccctgcacctggcctgccagctgggcaagcaggagatggtgcgggtgctgctgctgtgcaatgcccgctgcaacatcatgggccccaacggctaccccatccacagcgccatgaagttcagccagaagggctgtgccgagatgatcatctccatggacagcagccagatccacagcaaggacccccgctacggggccagccccctgcactgggccaagaatgctgagatggccaggatgctgctgaagaggggctgcaatgtgaacagcaccagcagcgctggcaacacagccctgcacgtggccgtgatgaggaacagatttgactgtgccatcgtgctgctgacccatggagccaatgctgatgcccggggggagcacggcaacacccccctgcacctggccatgagcaaggacaacgtggagatgatcaaggccctgattgtgtttggagctgaggtggacaccccaaatgactttggagagacccccaccttcctggccagcaagattggccgcctggtgaccaggaaggccatcctgaccctgctgaggacagtgggcgctgagtactgcttcccccccatccatggagtgcctgctgagcagggcagcgctgccccccaccaccccttcagcctggagcgggcccagcccccacccatcagcctgaacaacctgggcagccaccccagccaggccggctggtgggcctggggcgccgccagtgatggcaccaccggcagccacgcccacctgaccggccctgaggcctctgtgcaccctggcctgcacgagggccgggaggccgaccggcagaacatggagagctag

SEQ ID NO: 277640 - DNA, 1284 bp, Artificial Sequence
  derived and/or modified sequence
atgcagttcttcggccggctggtgaacaccttcagcggcgtgaccaacctctttagcaacccctttcgggttaaggaggtagccgtcgctgattacacctcctccgacagggtgagggaagagggacaactgattttgttccagaacacgcccaatcggacgtgggactgtgtcctggtaaatccacggaattcccagagcggctttagatgcgcaaattgtgccgaaaacgaggaaggatgtacgccgctgcaccttgcgtgtcgcaagggcgatggcgagattctcgttgagctagttcagtactgccatacacaaatggacgtcactgattacaaaggcgagaccgtttttcattacgccgtgcagggagacaatagtcaggtcctgcagctccttggccggaatgctgtggctggtctgaatcaggtcaacaatcagggattgacccctttgcacctggcttgtcaattaggcaagcaggaaatggtgcgtgtgctattactttgcaatgcccgatgcaatattatgggcccaaatggatacccaatccattctgcgatgaagttttcacagaagggatgtgccgagatgattatctctatggacagttcccagattcatagcaaagacccacgatacggcgcatcccccctgcactgggctaagaacgctgagatggctaggatgcttctgaagcgaggctgtaacgtgaattctacttcgtctgccggaaacacagcgctccatgtggccgtcatgcgcaacaggttcgactgtgccatcgtgctcctaactcatggagctaacgctgacgcgcgtggggagcacggaaatacgccccttcacttggccatgagcaaagacaacgtggaaatgatcaaagccctgatcgtgttcggagcggaagtggatacacccaacgatttcggcgaaacaccaacattccttgcttctaaaatcggcaggctcgttacccggaaggccatcctcaccctcctcagaacagtgggagcggagtattgctttccgcccatccatggggtacctgccgaacagggcagtgccgccccccatcaccctttttccttagagagggcccaacctcccccgatcagtttaaataatctgggctcccacccatctcaggccggctggtgggcctggggcgccgccagcgacggcaccacgggaagccatgcacatctgacaggtcctgaagcttccgttcaccccggattacatgaggggcgggaggcagaccgtcagaatatggagtcgtag

SEQ ID NO: 277641 - DNA, 1284 bp, Artificial Sequence
  derived and/or modified sequence
atgcagtttttcgggaggcttgtcaataccttttctggagtgaccaatctgtttagcaatccattcagggttaaggaagtagccgtcgccgactacaccagctccgatcgcgtccgcgaggagggtcagttgatccttttccaaaatactccaaaccgcacatgggattgcgtattagtcaacccaagaaacagccagagcggcttcaggtgtgccaattgcgctgagaacgaagaaggctgtacgccgctccacctcgcctgtaggaagggcgatggggagatattggtggaattggtgcagtactgccacacccaaatggatgtgacggattataaaggagaaaccgtgttccattatgcagttcagggggataactcccaggtattgcagctgttggggcgaaatgccgttgccggtctgaaccaagtgaataaccagggcttgactccccttcacttagcctgccagctcggtaagcaggaaatggtgagagttctgttactttgcaacgccagatgtaacataatgggcccaaacggctaccctatccattcagccatgaaatttagccaaaagggctgcgctgagatgataatctcgatggattctagccagatacattccaaggatcccaggtatggagcttctcctctccattgggcaaaaaatgcagaaatggcgcgaatgctcctcaaaaggggctgcaatgtaaatagcacgagctcggctggcaatacagccctccacgtggctgtcatgcgcaatagattcgattgcgccatagtgctgcttacacacggcgctaatgctgacgccaggggggagcatgggaataccccacttcacctggcaatgtccaaggataacgttgagatgatcaaagctctcatcgtgtttggcgctgaggtcgataccccaaacgactttggcgaaacccccacctttctggcaagcaaaattggacggctagtcactaggaaagccatattgacccttttacgaacggtgggtgccgagtattgcttcccgccaattcacggggtcccagccgaacaggggtcagcggcacctcaccacccctttagcctcgagcgtgctcagccaccgccaatttccttgaacaacttgggttcccacccaagccaggccggttggtgggcttggggggctgcctctgatggcaccacaggaagccatgcacacctgactggaccagaggcctcagtacaccctggactgcatgagggccgagaggccgatcgccagaacatggaatcctag

SEQ ID NO: 277642 - DNA, 1411 bp, Artificial Sequence
  derived and/or modified sequence
ccgttccccaacttcctcggcgctccggactcccaagtctccgccggaccctcctttggatattcctcgtgtctccgattctgagacagagggggaagacggtggggcctccccacctgccccgcagaagatgcagttctttggccgcctggtcaataccttcagtggcgtcaccaacttgttctctaacccattccgggtgaaggaggtggctgtggccgactacacctcgagtgaccgagttcgggaggaagggcagctgattctgttccagaacactcccaaccgcacctgggactgcgtcctggtcaaccccaggaactcacagagtggattccgctgtgccaattgcgcggagaacgaggagggctgcacacccctgcacctggcctgccgcaagggtgatggggagatcctggtggagctggtgcagtactgccacactcagatggatgtcaccgactacaagggagagaccgtcttccattatgctgtccagggtgacaattctcaggtgctgcagctccttggaaggaacgcagtggctggcctgaaccaggtgaataaccaagggctgaccccgctgcacctggcctgccagctggggaagcaggagatggtccgcgtgctgctgctgtgcaatgctcggtgcaacatcatgggccccaacggctaccccatccactcggccatgaagttctctcagaaggggtgtgcggagatgatcatcagcatggacagcagccagatccacagcaaagacccccgttacggagccagccccctccactgggccaagaacgcagagatggcccgcatgctgctgaaacggggctgcaacgtgaacagcaccagctccgcggggaacacggccctgcacgtggcggtgatgcgcaaccgcttcgactgtgccatagtgctgctgacccacggggccaacgcggatgcccgcggagagcacggcaacaccccgctgcacctggccatgtcgaaagacaacgtggagatgatcaaggccctcatcgtgttcggagcagaagtggacaccccgaatgactttggggagactcctacattcctagcctccaaaatcggcagacttgtcaccaggaaggcgatcttgactctgctgagaaccgtgggggccgaatactgcttcccacccatccacggggtccccgcggagcagggctctgcagcgccacatcatcccttctccctggaaagagctcagcccccaccgatcagcctaaacaacctaggcagtcacccaagccaggccggatggtgggcctggggtgcggcgtcagatggaactacaggatctcatgcacatctcacgggcccggaagccagcgttcatcctgggctccatgagggacgagaagcggacagacagaacatggagagc

SEQ ID NO: 277643 - protein, 93 aa, Artificial Sequence
  derived and/or modified sequence
MSSESSKKRKPKVIRSDGAPAEGKRNRSDTEQEGKYYSEEAEVDLRDPGRDYELYKYTCQELQRLMAEIQDLKSRGGKDVAIEIEERRIQSCV

SEQ ID NO: 277644 - protein, 161 aa, Artificial Sequence
  derived and/or modified sequence
MSSESSKKRKPKVIRSDGAPAEGKRNRSDTEQEGKYYSEEAEVDLRDPGRDYELYKYTCQELQRLMAEIQDLKSRGGKDVAIEIEERRIQSCVHFMTLKKLNRLAHIRLKKGRDQTHEAKQKVDAYHLQLQNLLYEVMHLQKEITKCLEFKSKHEEIDLVS

SEQ ID NO: 277645 - protein, 223 aa, Artificial Sequence
  derived and/or modified sequence
MSSESSKKRKPKVIRSDGAPAEGKRNRSDTEQEGKYYSEEAEVDLRDPGRDYELYKYTCQELQRLMAEIQDLKSRGGKDVAIEIEERRIQSCVHFMTLKKLNRLAHIRLKKGRDQTHEAKQKVDAYHLQLQNLLYEVMHLQKEITKCLEFKSKHEEIDLVSLEEFYKEAPPDISKAEVTMGDPHQQTLARLDWELEQRKRLAEKYRECLSNKEKILKEIEVKK

SEQ ID NO: 277646 - DNA, 582 bp, Artificial Sequence
  derived and/or modified sequence
agtgctagctcgccgcggccgcctccggggaccacctggcttcatgtgtggatttccacggctcttgcccagaggcgggtacactgtgttccaatgtgccacggaactcacgcagtggcactttgtggcttcatgaaggaagaggcaggccacgcaacacttcctccccaagccaaggagaagtatcacttttagaggcagaggagcggaaggcagtgggtgtgaccaaaagtgccatttgttaaagtctcctccaatctgaaatagttcctcagtttttcctcgtctttcatgattttgattcttcgaagagtaccagttaggtatatcgtggaatgaacttgtgcttatcttccttgccagattttaaaaactattatggaaaatctcaagcattcacaaaagtagagagaaagaaaggactctcagactgttggagcagaactactgagaaaaaccaggcattgtatcttcagttgtcatcaagttcgcaatcagattggaaaagctcaacttgaagctttcttgcctgcagtgaagcagagagatagatattattcacgtaataaaaaacatgggctt

SEQ ID NO: 277647 - DNA, 849 bp, Artificial Sequence
  derived and/or modified sequence
atgttcctgaacatgaccaagctggagaaggaggcccaggtggaggccaccagcagaaaggagaaggccaagcagagacccctggccctgaacaccgtggagatgctgagagtggccagcagcagcctgggcatgggcccccagcacgccatgcagaccgccgagagactgtacacccagggctacatcagctaccccagaaccgagaccacccactaccccgagaacttcgacctgaagggcagcctgagacagcaggccaaccacccctactgggccgacaccgtgaagagactgctggccgagggcatcaacagacccagaaagggccacgacgccggcgaccacccccccatcacccccatgaagagcgccaccgaggccgagctgggcggcgacgcctggagactgtacgagtacatcaccagacacttcatcgccaccgtgagccacgactgcaagtacctgcagagcaccatcagcttcagaatcggccccgagctgttcacctgcagcggcaagaccgtgctgagccccggcttcaccgaggtgatgccctggcagagcgtgcccctggaggagagcctgcccacctgccagagaggcgacgccttccccgtgggcgaggtgaagatgctggagaagcagaccaacccccccgactacctgaccgaggccgagctgatcaccctgatggagaagcacggcatcggcggctgcgcctgccccggccccagagccggcagcgtgagcagcacccaggccagcagcctgctgaccaagctgcccagacagccctgcgtgcccagccccgcccccctgcacggcctggtgagcggcaactggtag

SEQ ID NO: 277648 - DNA, 849 bp, Artificial Sequence
  derived and/or modified sequence
atgtttctgaacatgaccaagttagagaaagaagcacaggtggaagccacctctcggaaagagaaggcaaaacaaaggcctttggcattgaataccgtagagatgctgcgcgttgctagcagttcgttggggatgggacctcagcacgctatgcagactgccgagcgactatatacgcagggctacatctcatacccacggacggagactactcattatccagaaaactttgacctgaaaggctcattgcgccagcaggccaaccatccatattgggcagacaccgtcaaacgcctgctcgcagaaggtataaacagaccgcgcaaagggcacgatgcaggggaccacccacctataaccccaatgaagagcgcaacagaagccgaactcggcggcgatgcttggaggttgtacgaatacattacaaggcactttatagccaccgtgagccatgattgcaaataccttcagtcgactatcagctttcgcattggacccgagctgttcacctgctcaggcaagacagtcttgtctcctggcttcactgaggtcatgccatggcagtcagtgccgctcgaggaatcactaccaacatgtcaaaggggcgatgctttcccagttggggaggtgaagatgctggagaaacaaacaaacccccccgactatctcacagaagctgagctgatcactcttatggaaaaacacggtatcggcggatgtgcctgtccaggcccccgtgctggcagtgtttccagtacccaggcgagctctctgctgaccaagctgccccgccagccctgcgtgccgtctccggccccccttcacggtcttgtcagtggtaattggtag

SEQ ID NO: 277649 - DNA, 849 bp, Artificial Sequence
  derived and/or modified sequence
atgttcctgaacatgaccaagctggagaaggaggcccaggtggaggccaccagcaggaaggagaaggccaagcagaggcccctggccctgaacacagtggagatgctgcgggtggccagcagcagcctgggcatgggcccccagcacgccatgcagacagctgagcggctgtacacccagggctacatctcctaccccaggacagagaccacccactacccagaaaattttgacctgaagggcagcctgcggcagcaggccaaccacccctactgggccgacacagtgaagaggctgctggccgagggcatcaaccggcccaggaaaggacatgatgctggggaccacccccccatcacccccatgaagagcgccacagaggccgagctgggcggagatgcctggaggctgtatgagtacatcaccaggcacttcatcgccaccgtgtcccatgactgcaagtacctgcagagcaccatctccttccgcatcggccctgagctgttcacctgcagcggcaagacagtgctgagccctggcttcacagaggtgatgccctggcagagcgtgcccctggaggagagcctgcccacctgccagagaggagatgccttccctgtgggggaggtgaagatgctggagaagcagaccaaccccccagactacctgacagaggccgagctgatcaccctgatggagaagcatggaattggaggctgtgcctgccccggccccagggctggctctgtgagcagcacccaggccagcagcctgctgaccaagctgccccggcagccctgtgtgcccagccctgcccccctgcacggcctggtgtctggcaactggtag

SEQ ID NO: 277650 - DNA, 849 bp, Artificial Sequence
  derived and/or modified sequence
atgttcctgaacatgaccaagctggagaaggaggcccaggtggaggctacctctcggaaggaaaaggccaaacagaggccccttgctttgaacacagtggaaatgttacgcgtggcaagttctagcctcgggatgggtcctcagcacgctatgcaaaccgcagagcgtctgtacacccagggctatatctcctacccgcggaccgagacaacccactaccccgagaacttcgatcttaaaggatctctgcgccagcaggccaaccacccgtactgggcggataccgttaagaggttactagccgagggcatcaatagaccacgtaaaggtcatgatgccggggaccatcctccgatcactccgatgaagtcagcaaccgaggcagagctcggaggagatgcctggcggctgtatgagtacattacaagacacttcattgcgacagtatcacacgactgcaagtacttacagagtaccatcagcttccgcattgggccagagttgttcacctgtagtgggaaaaccgtcttatcacctggctttaccgaggtgatgccctggcagagtgtgcccctggaagaatctcttccaacatgccagaggggggatgctttcccagtgggtgaagtgaagatgctcgagaagcagacaaatccaccagactatcttactgaggcagagcttatcacactgatggaaaagcacggaattggaggctgcgcctgcccgggaccaagggccggaagtgttagttccactcaggcaagttccctacttacaaagctgcccaggcagccatgtgttcccagcccggcgcctctccacgggctcgtgtccggtaattggtag

SEQ ID NO: 277651 - DNA, 849 bp, Artificial Sequence
  derived and/or modified sequence
atgtttttgaatatgactaagctcgagaaagaggctcaggtggaagctacctcccggaaagagaaggcaaagcagcggccactagcattgaacacagtggagatgctacgtgtggctagttctagcttggggatgggccctcaacacgcaatgcagacggccgaaaggctctacactcaggggtatatctcatacccacggaccgaaaccacccattaccctgagaactttgatttgaagggatcattgcggcagcaggccaatcacccttactgggctgacacagtgaagcggctgttggcagaaggaattaacaggcctcggaagggccatgacgcaggggatcaccccccaataactcccatgaaatcagccactgaggccgaactgggcggagatgcctggcgcctttacgaatacatcactcgacacttcatagcaaccgtgtctcacgactgtaaatacctgcagtccacaattagtttcaggatcggacccgagctcttcacttgttcagggaaaacagttctgagccccggattcacagaagtgatgccgtggcagtccgtcccactggaagagtctctgcccacctgccagagaggtgatgcattccctgtgggggaggtcaagatgctcgaaaagcagactaacccacccgactacctcactgaagctgaactaattaccctgatggagaaacacggtattggcggatgtgcctgccctggcccacgagccggttctgtgtcttccactcaagcttcatctctgctaacaaagctccctaggcagccttgtgttcccagccctgcacccctccacggtctggtctccggcaactggtag

SEQ ID NO: 277652 - DNA, 2033 bp, Artificial Sequence
  derived and/or modified sequence
aacaaggaccggagctggatccgcggtgcggctgtgggagtcagcattggtaatagtgctgtgctgcggaagagtggagtctaaactttttcattgccagtgccccgaaactggagtgtgaaggaccgagacaaaatgaagactgtgctcatggttgctgaaaagccgtccttggcacagtcaattgccaaaatcctctctagagggagcctgtcctcacacaaagggctgaacggggcctgctcagtccacgagtacactgggacctttgctggccagccagtgcgcttcaagatgacgtctgtctgtggtcacgtgatgaccctggatttcctgggaaaatacaacaaatgggacaaagtggaccccgcagaactgttcagccaagctcccacggagaagaaagaagctaaccccaagctgaacatggtgaagttcctgcaggtttcagactaaatatttccaggggaaatacggtgatttagacagctctctcatctcctttgggccgtgtcagactccaaccctgggattctgtgtggagagacatgataaaatccagtccttcaaaccagagacctactgggtgctgcaggccaaggttaacactgacaaagacagatctctccttttggactgggaccgagtaagagtgtttgaccgggagatcgcacagatgtttttaaacatgacaaagctggagaaggaagcccaggtggaggccacaagcaggaaagaaaaggccaagcagaggcccctggccctgaacactgtggagatgctgcgtgtggccagctcttctctgggcatggggccgcagcacgccatgcagacggctgagcggctctacacgcaaggctacatcagctacccacggacagagaccacccactaccctgagaactttgacctgaagggctctctgcggcagcaggccaaccacccctactgggccgacacggtgaagcggttgttagcagaaggtatcaaccgcccgcggaaaggccatgacgccggcgaccatccccccatcacccccatgaagtctgccacagaggccgaattagggggtgacgcgtggcggctctatgagtacatcaccagacacttcatcgccacggtcagccatgactgcaagtacctgcagagcaccatctccttcagaattgggcccgagctcttcacctgctccgggaagaccgtcctctcaccaggcttcacggaggtcatgccctggcagagcgtgcccctggaggagagcctgcccacttgccagcggggtgatgccttccctgtgggcgaggtgaagatgctggagaagcagacgaacccacccgactacctgacggaggccgagctcatcacgctcatggagaagcatggcatcggtgggtgcgcctgcccaggccccagagccggctccgtctccagtactcaggcttcgagtctactcacaaagctgccccgccagccctgtgtgcccagcccagcacccctccatgggctggtatctggaaactggtgacccagtgtgtggccagccaggcaggtccacagcgggcatcccctcctgaggcctccattcaggacctggccttccctgtgaaggcccagatgtgccctcgtgcactgtggggtgtgcacacaccgactaacgcccacaaggctgaagattggcccagatgccaggcacggatgccagcatccctgtgcatatcaacaacatctgccagcgcaactatgtcacggtggagagcgggcgccggctcaagcccaccaacctcggcatcgtcctggtgcacggctactataagattgatgcagagctggtgctccccaccatccgcagtgcagtggagaagcagctgaacctgatcgcccagggcaaggccgactaccgccaggtcctgggccacaccctggacgtgttcaagaggaagttccactactttgtcgactccattgctggtagagtctgcctctggcctgcccctcaccagaggggtgtctctctgtcagcaaggccagtacct

SEQ ID NO: 277653 - protein, 704 aa, Artificial Sequence
  derived and/or modified sequence
MLGICRGRRKFLAASLSLLCIPAITWIYLFSGSFEDGKPVSLSPLESQAHSPRYTASSQRERESLEVRMREVEEENRALRRQLSLAQGRAPSHRRGNHSKTYSMEEGTGDSENLRAGIVAGNSSECGQQPVVEKCETIHVAIVCAGYNASRDVVTLVKSVLFHRRNPLHFHLIADSIAEQILATLFQTWMVPAVRVDFYNADELKSEVSWIPNKHYSGIYGLMKLVLTKTLPANLERVIVLDTDITFATDIAELWAVFHKFKGQQVLGLVENQSDWYLGNLWKNHRPWPALGRGYNTGVILLLLDKLRKMKWEQMWRLTAERELMGMLSTSLADQDIFNAVIKQNPFLVYQLPCFWNVQLSDHTRSEQCYRDVSDLKLQKQLSELDEDDLCYEFRRERFTVHRTHLYFLHYEYEPAADSTDVTLVAQLSMDRLQMLEAICKHWEGPISLALYLSDAEAQQFLRYAQGSEVLMSRHNVGYHIVYKEGQFYPVNLLRNVAMKHISTPYMFLSDIDFLPMYGLYEYLRKSVIQLDLANTKKAMIVPAFETLRYRLSFPKSKAELLSMLDMGTLFTFRYHVWTKGHAPTNFAKWRTATTPYRVEWEADFEPYVVVRRDCPEYDRRFVGFGWNKVAHIMELDVQEYEFIVLPNAYMIHMPHAPSFDITKFRSNKQYRICLKTLKEEFQQDMSRRYGFAALKYLTAENNS

SEQ ID NO: 277654 - protein, 756 aa, Artificial Sequence
  derived and/or modified sequence
MLGICRGRRKFLAASLSLLCIPAITWIYLFSGSFEDGKPVSLSPLESQAHSPRYTASSQRERESLEVRMREVEEENRALRRQLSLAQGRAPSHRRGNHSKTYSMEEGTGDSENLRAGIVAGNSSECGQQPVVEKCETIHVAIVCAGYNASRDVVTLVKSVLFHRRNPLHFHLIADSIAEQILATLFQTWMVPAVRVDFYNADELKSEVSWIPNKHYSGIYGLMKLVLTKTLPANLERVIVLDTDITFATDIAELWAVFHKFKGQQVLGLVENQSDWYLGNLWKNHRPWPALGRGYNTGVILLLLDKLRKMKWEQMWRLTAERELMGMLSTSLADQDIFNAVIKQNPFLVYQLPCFWNVQLSDHTRSEQCYRDVSDLKVIHWNSPKKLRVKNKHVEFFRNLYLTFLEYDGNLLRRELFGCPSEADVNSENLQKQLSELDEDDLCYEFRRERFTVHRTHLYFLHYEYEPAADSTDVTLVAQLSMDRLQMLEAICKHWEGPISLALYLSDAEAQQFLRYAQGSEVLMSRHNVGYHIVYKEGQFYPVNLLRNVAMKHISTPYMFLSDIDFLPMYGLYEYLRKSVIQLDLANTKKAMIVPAFETLRYRLSFPKSKAELLSMLDMGTLFTFRYHVWTKGHAPTNFAKWRTATTPYRVEWEADFEPYVVVRRDCPEYDRRFVGFGWNKVAHIMELDVQEYEFIVLPNAYMIHMPHAPSFDITKFRSNKQYRICLKTLKEEFQQDMSRRYGFAALKYLTAENNS

SEQ ID NO: 277655 - protein, 135 aa, Artificial Sequence
  derived and/or modified sequence
MLGICRGRRKFLAASLSLLCIPAITWIYLFSGSFEDGKPVSLSPLESQAHSPRYTASSQRERESLEVRMREVEEENRALRRQLSLAQGRAPSHRRGNHSKTYSMEEGTGDSENLRAGIVAGNSSECGQQPVVEKC

SEQ ID NO: 277656 - protein, 109 aa, Artificial Sequence
  derived and/or modified sequence
MLGICRGRRKFLAASLSLLCIPAITWIYLFSGSFEDGKPVSLSPLESQAHSPRYTASSQRERESLEVRMREVEEENRALRRQLSLAQGRAPSHRRGNHSKTYSMEEGTG

SEQ ID NO: 277657 - protein, 707 aa, Artificial Sequence
  derived and/or modified sequence
MLGICRGRRKFLAASLSLLCIPAITWIYLFSGSFEDGKPVSLSPLESQAHSPRYTASSQRERESLEVRMREVEEENRALRRQLSLAQGRAPSHRRGNHSKTYSMEEGTGDSENLRAGIVAGNSSECGQQPVVEKCETIHVAIVCAGYNASRDVVTLVKSVLFHRRNPLHFHLIADSIAEQILATLFQTWMVPAVRVDFYNADELKSEVSWIPNKHYSGIYGLMKLVLTKTLPANLERVIVLDTDITFATDIAELWAVFHKFKGQQVLGLVENQSDWYLGNLWKNHRPWPALGRGYNTGVILLLLDKLRKMKWEQMWRLTAERELMGMLSTSLADQDIFNAVIKQNPFLVYQLPCFWNVQLSDHTRSEQCYRDVSDLKVIHWNSPKKLRVKNKHVEFFRNLYLTFLEYDGNLLRRELFGCPSEADVNSENLQKQLSELDEDDLCYEFRRERFTVHRTHLYFLHYEYEPAADSTDVTLVAQLSMDRLQMLEAICKHWEGPISLALYLSDAEAQQFLRYAQGSEVLMSRHNVGYHIVYKEGQFYPVNLLRNVAMKHISTPYMFLSDIDFLPMYGLYEYLRYHVWTKGHAPTNFAKWRTATTPYRVEWEADFEPYVVVRRDCPEYDRRFVGFGWNKVAHIMELDVQEYEFIVLPNAYMIHMPHAPSFDITKFRSNKQYRICLKTLKEEFQQDMSRRYGFAALKYLTAENNS

SEQ ID NO: 277658 - DNA, 2115 bp, Artificial Sequence
  derived and/or modified sequence
atgctgggcatttgtagaggaaggaggaaattcctcgcggcgagcctgagtctcctgtgtatccccgccatcacatggatttacctcttcagtgggtccttcgaggatggcaaacccgtatcactctcccctctagagtctcaggcccattctcccaggtacacagcttcttcccagagggaaagggagagtttggaggtccgaatgcgcgaggtggaagaggagaacagggctctgaggagacaactgtcactcgctcagggccgcgcaccttctcatcgccgtggtaatcattccaaaacttactccatggaagaaggtacgggcgatagcgagaacctgcgggcaggaatcgtcgctggtaactcatcggagtgcggccagcagcccgtggtggaaaaatgtgagaccattcacgtggctattgtctgcgctggctacaatgcctctagggatgttgttacactagttaaaagcgtgcttttccacaggagaaacccactacattttcatctgatagcagatagcatcgccgagcagattctggccaccttgttccaaacctggatggtccccgcagtcagagtggacttttacaatgccgatgagttgaagagcgaagtatcctggattcctaacaagcactatagtgggatttacgggctgatgaagctagtgctaactaagaccctgccagctaatctggaacgggtgatcgtgctggacacggatataactttcgccacagatattgcagaactgtgggctgtttttcataagttcaaaggccagcaggtgctgggcctcgtggagaaccagagtgactggtacctcgggaacttatggaaaaaccaccggccgtggccagctttaggccgcggatataatacaggcgtaatactattattacttgataagctgcgcaaaatgaagtgggaacagatgtggcgcctgactgccgaacgagagctgatgggcatgctttccacatctctggccgaccaggatatttttaacgcagtaatcaagcagaatccgtttctggtctatcagctgccatgtttttggaatgtgcagctctccgatcacacacgcagtgaacagtgttacagggatgtgagcgatcttaagctccagaagcagttatccgaactcgatgaagacgacttgtgctatgagttccgcagagagcgctttaccgtgcatagaacccacctttattttttacactacgaatacgagcctgctgcggatagtaccgacgtgactctggtggcgcagctgtctatggacaggctgcaaatgttggaggccatatgcaaacattgggaaggacccatttcactcgccctgtacctaagtgatgcggaggcccagcagttcctgcgctacgctcaaggcagcgaggtcctcatgagtagacataacgtcgggtatcatattgtttataaagaaggccaattctacccagtaaaccttctgaggaacgttgctatgaagcacattagtactccttatatgtttctcagcgacattgactttctcccaatgtacgggttatacgagtacctccgtaaatccgtaattcagctcgacctcgcaaacacaaagaaggccatgattgtgcctgcgtttgagactcttagatatcgtctttcttttccaaagagcaaagctgagctgctctcaatgttagacatggggactctgttcacattccggtatcacgtgtggacgaaggggcacgctccaaccaatttcgctaagtggcgcactgcaaccacaccctatcgggtagaatgggaggccgactttgagccatacgtggtggtcaggagagactgtccagaatatgaccgaaggttcgtgggattcggctggaataaggtggctcatatcatggagctggatgtgcaggagtatgagtttatcgttctaccgaacgcctacatgatccatatgccgcatgcaccctctttcgatattaccaaatttaggtccaataaacagtaccggatctgcctcaaaactctcaaagaagagttccaacaggatatgagtcgtcggtacggctttgccgcacttaaatatttgactgccgagaacaacagttag

SEQ ID NO: 277659 - DNA, 2271 bp, Artificial Sequence
  derived and/or modified sequence
atgctcgggatatgtcgaggccgacgcaaattcctcgcagcctctctcagcctgctttgtatcccagctattacctggatctacttgttcagcggaagctttgaagatgggaaacccgtgtctctgtctcctctggaatctcaagctcacagccccaggtacactgcatcttctcagcgcgagcgcgaatccctggaagtccggatgagggaagttgaggaggagaatcgcgcactccgccgtcaactgagtctcgcccaaggccgcgcgccttctcacagaagaggcaaccactctaaaacctacagcatggaagaaggaacaggtgactctgaaaacctccgtgcagggattgtcgcaggaaattctagcgagtgtggtcaacagcccgtggttgagaagtgcgagacaatccacgtagccatcgtgtgcgccggttataatgcctcgcgggacgtggtgacgttggtgaagtctgttctgtttcataggagaaatccacttcactttcatcttatcgccgatagcattgccgaacagattctggctacattgtttcaaacatggatggtgcccgctgtccgggtggatttttacaacgccgatgagttaaaatccgaggtatcatggatcccaaacaaacattattccggaatttatggcctcatgaaattagtgctgaccaaaaccctacccgccaacctggagagggtgattgtgcttgatactgacatcactttcgctacagacattgctgaactttgggctgtcttccacaaatttaagggccagcaagtgctcggactggtggagaatcagagcgactggtacctcggcaacttatggaaaaatcaccggccgtggccggcactgggcaggggttacaatacgggggttatcctgttgctgctggacaaactgaggaagatgaagtgggaacagatgtggaggttaacagctgagcgggaactcatgggcatgttgtctacaagcctggctgatcaagatatctttaatgcagtgattaagcaaaacccgttccttgtatatcaactcccctgcttttggaatgtccagttgtccgaccacacacggtcagaacagtgttacagggacgtgtccgatctcaaggtcatccattggaattcgcccaagaaactacgcgttaaaaacaagcacgttgaatttttccgaaatctgtatctcacctttcttgaatacgacggcaatctgctgaggagagagctcttcggatgcccttcagaagcggacgttaacagtgaaaaccttcagaaacagttaagtgaactagatgaagacgatctctgctacgagttccgccgagagcgtttcaccgtccacagaacacacctttacttcctccactacgagtacgagccggctgcagattctacagacgtcacactggtggctcaattaagcatggacaggctccagatgctggaagcaatttgtaaacattgggaagggcccatcagcttagccctatacctgagtgacgctgaggcacagcagttccttcggtacgcacaaggttccgaggtccttatgtcccgccacaatgtcggatatcatattgtctacaaagagggtcagttttaccctgttaacctgctgcggaacgtagccatgaagcacatctccacaccttacatgtttctgtccgacatagattttctacctatgtacggcctgtacgagtacctgagaaagtctgttatacaactggacctggcaaacacgaaaaaggccatgatcgtgccggcttttgagaccctacggtataggctaagctttcctaaaagcaaagcagaactcctgtctatgttggatatggggactctttttacattcaggtatcatgtgtggacaaaaggacatgctcccaccaactttgccaaatggaggacggccactaccccataccgggtggagtgggaagcagactttgaaccgtatgtggtagtcagacgggattgccctgagtacgatagaagattcgtcggtttcggttggaataaggtggctcatattatggagcttgatgtacaagaatatgaattcattgtcttgcctaatgcttacatgatccatatgccacacgcgccctctttcgatattaccaagtttagatccaacaagcaatacagaatatgtctgaaaaccctcaaggaagaatttcagcaggacatgtccagacgctatgggtttgctgcactgaaatacttaacggcagaaaacaactcatag

SEQ ID NO: 277660 - DNA, 2271 bp, Artificial Sequence
  derived and/or modified sequence
atgctgggcatctgcagaggacggcgtaaatttctggccgcctcactatcattgctgtgcatccccgcgataacttggatctacctgtttagtggctcatttgaggatggaaaacctgtatcgctttctcccttagagagtcaggcgcactctcctcgctacacagccagctcgcagagagagagagagtcgctagaggttcgcatgcgggaggtcgaagaagaaaatcgggccctgcgccgccagctatctctcgcccagggacgcgcgccttcgcataggcggggaaaccactcaaagacctactcaatggaggaaggtacaggggacagtgaaaatctgcgcgcagggatcgtggccggaaacagttcagaatgtggccagcagccagtggtggagaagtgcgagacgattcatgtagctattgtatgtgctggttacaatgccagtcgcgacgtggttaccctggtaaagagtgtgctcttccacaggcgtaatcccctacacttccatctgatcgccgacagcattgcggagcaaatcctggcaactttgttccaaacttggatggtccctgcagtgagagtcgacttttataatgccgatgagcttaaaagcgaagtttcttggatccccaacaagcactattctgggatctatggccttatgaaactggtgttaactaaaaccttgcctgcaaatctcgagcgcgtcatcgtgctggatacagatattaccttcgcgacggacattgctgagctctgggccgtgttccataaattcaaaggtcaacaagttctgggcttagtggaaaaccaatcagattggtacttggggaacctgtggaagaaccatcgcccatggccagccctaggtcgggggtacaataccggcgtcattctccttcttcttgacaagctacggaaaatgaagtgggaacaaatgtggcggctcactgcagaaagggaactgatggggatgctgagtactagcctggctgaccaagacatcttcaacgctgttataaaacagaacccttttcttgtctatcagttgccatgcttttggaacgtccagctgagcgatcacactcgatccgagcaatgttatagggatgttagcgacctcaaagtcattcactggaatagtcccaaaaagctgagagtcaagaataagcatgtggaattctttagaaatctgtatctgacctttcttgaatacgatggaaacttactcagaagagagctgttcggatgtccctctgaggccgatgttaatagcgagaatctccaaaaacagttgagtgagctggatgaggacgacctctgctacgaatttaggagggaacgcttcaccgtgcatcggactcacctttactttctgcactatgagtatgagccagccgctgacagcactgacgtaacactggtggcccagctctcaatggatcgactgcagatgctggaggccatatgcaagcactgggaaggaccgatctctctcgccctgtacctgagcgatgccgaggcacaacagttcctaaggtacgctcaggggtccgaagtgctcatgtcacggcacaacgttggataccatattgtgtataaagaggggcagttttatccggtcaatctgctgcggaacgtagccatgaaacacatctcaaccccctatatgtttctaagcgacattgattttctaccaatgtatggcctgtatgagtatctcagaaaaagtgtgatccagcttgatctggccaacaccaagaaggctatgatcgtcccagcctttgagaccctacgctatcgcctttcctttccaaaatcaaaggccgagctgttaagcatgctagatatgggaacgctatttaccttccggtaccacgtgtggactaagggacacgccccaaccaacttcgctaaatggcgcaccgccaccaccccataccgggtggagtgggaagccgacttcgaaccttacgtggtggtgcggcgggactgtcccgagtatgacagacggtttgtcggatttggatggaataaagtggctcacatcatggaactcgatgtacaggagtacgaatttatagtgctgcccaacgcatatatgattcatatgcctcatgcaccctctttcgatattacgaagttcagatcaaacaagcagtatcgcatctgccttaaaacattgaaagaggagttccaacaagatatgagtcgtcggtatggcttcgctgccctcaaataccttaccgcagaaaacaactcatag

SEQ ID NO: 277661 - DNA, 2115 bp, Artificial Sequence
  derived and/or modified sequence
atgctgggtatttgtcgcgggcgacggaagtttttggccgctagtctctccctcctgtgtatcccagcaataacgtggatttatctcttcagcggttctttcgaagatgggaaacctgtctctctgagccctctggagagccaagcgcactcaccacggtatactgcctccagtcagcgggagagggagtccctggaagttcgcatgcgggaagtcgaggaagaaaaccgcgccctgcggagacagctgtctctggctcagggtagagcaccctcccaccggagaggcaatcatagcaaaacctactccatggaggagggcactggggattccgaaaatctccgtgcagggattgttgcaggtaactccagcgagtgcgggcagcagcccgtggtcgaaaaatgcgagacgatacacgtggccattgtttgtgctgggtacaatgcaagccgggacgtggtcaccctcgttaagagcgtgttgttccatcgcagaaacccactgcattttcacctgatagcagatagcatagctgagcaaattcttgcaactctgtttcagacctggatggtaccagccgttagagtggatttctacaacgctgacgagttgaagtctgaggtctcttggatcccaaacaaacattactctggcatctatggactcatgaagctagtgctgaccaagaccctgcctgccaatttagagagggtaattgtgctggacaccgacatcaccttcgctacagacatcgccgaactctgggctgtgttccataagtttaaaggacagcaagtattgggcctggtggagaaccagtcagactggtacctgggtaacctgtggaaaaatcatcgaccttggcctgccctcgggagaggatacaacacgggagtaattctgctgctgctggataaactccgaaagatgaagtgggagcagatgtggcggctgaccgcggaaagggagctgatgggcatgttgagcacctcacttgcagatcaagacatcttcaacgctgtaatcaagcagaaccccttccttgtctaccaacttccatgcttctggaatgtccaactcagcgaccacacccgaagtgagcagtgttatagggacgtgagcgatcttaaactccaaaagcaactctcagaattggacgaagatgacctctgctatgaattcaggcgggaaagatttaccgtgcatcgtactcatctgtattttctgcactacgaatacgagcctgctgccgactccacagatgttaccctggtcgcgcagctgagcatggaccgcttacaaatgctcgaggccatttgcaaacattgggagggccctatatccctcgcactctacctttcagatgccgaggcccagcaatttctgcggtatgctcagggctctgaggtgctgatgtcacggcataatgtgggctaccacattgtctacaaagaggggcagttttatcccgtgaatcttctccgtaacgtggctatgaaacacattagcactccatatatgttcctgtcagatattgattttctccctatgtacgggttgtatgaatatctgcgaaagtccgtaattcagctcgacctggctaacaccaagaaggccatgattgtccccgcgttcgagaccctgcgctatagactgtcctttccaaagtcaaaggccgaactgctttccatgctggatatgggcaccttgtttacttttcgataccacgtgtggactaagggtcacgcccctacaaattttgctaagtggaggacagcaaccactccttatcgggttgaatgggaggctgactttgaaccatatgtagtggtccggcgggattgtcccgaatacgacagaaggttcgttggattcggctggaataaagtggctcacatcatggaactggacgttcaggaatacgaattcatagtcttacctaacgcctatatgatccacatgccgcacgcaccctcttttgatatcaccaaattccggagcaataagcagtaccgaatttgcttgaaaaccttaaaagaggaattccagcaggatatgtcccgccgatacggatttgcagccctgaagtatctcacagcggagaacaactcctag

SEQ ID NO: 277662 - DNA, 2124 bp, Artificial Sequence
  derived and/or modified sequence
atgctaggaatttgccggggtcggcgcaaattccttgctgctagcttatcccttctctgcatcccagccataacctggatctacctattttccggctcattcgaggatggaaaaccggtctcactgtccccactggaatcccaggcacacagtccccggtacaccgctagctcccagcgagagcgcgagtcattggaggtacgcatgcgcgaagttgaggaagagaatagggcactaagacgtcaactgagcttggctcaggggagggcgccttcccaccgtcgcggtaaccatagtaaaacctattcgatggaagaaggaacgggcgactctgaaaacctgcgcgctggaatcgtcgccgggaatagctcagaatgcggccagcagcctgtcgttgaaaaatgcgagactatccacgtggcaatcgtctgtgcaggatataatgcatccagggatgtggtcacccttgtcaaaagcgtgttattccaccgacggaacccgctgcactttcatctgattgccgactccatcgctgagcagatcctggccaccctgtttcagacgtggatggttcctgccgtgagagtcgatttttacaacgccgatgaactgaagtcagaggtgagctggattccgaataaacattattcaggcatctacggactgatgaagctggtgctcaccaagactctcccagcgaacttagagcgcgtgatcgtgctggacaccgatattacctttgccaccgacatcgcagagctgtgggcagtcttccacaagttcaaaggccagcaggtgttgggactagtcgagaatcagagtgactggtacctgggtaacctttggaagaatcaccgtccttggcccgccctgggtcgaggctataataccggagtgatccttcttctcctggataagctgaggaagatgaagtgggaacagatgtggagacttaccgcggagcgtgagctgatgggtatgctgtccaccagtctggcggatcaggacattttcaacgcggtgattaagcagaacccgtttctggtctaccagctgccctgtttttggaacgtccagctcagtgaccatactagatccgaacagtgttacagggacgtgagcgacctcaaagtgattcactggaattcgccgaaaaagttgcgggtgaagaacaaacatgtggagttctttcggaatctctatttgacttttcttgaatatgacggcaatttactgagaagagaacttttcggctgtccctctgaggctgacgtgaattcggagaatttgcagaagcagctgtcggaattggacgaggacgatctgtgttatgaattccggcgcgaaaggttcactgtgcaccgcacccatctctacttccttcactacgaatacgagcccgcagccgactccaccgacgtgaccctggtggcacagctgagtatggacaggctacaaatgttggaggccatctgtaagcattgggaaggacccatctcccttgcactatatctgagcgatgccgaggctcagcagtttctccgctacgcccaaggcagcgaggtcctgatgtcacgccataacgtgggctatcacattgtttacaaagaggggcagttctacccagtgaacctcctgcggaatgtagccatgaagcatatcagcacaccgtacatgtttcttagcgatatagattttctccccatgtacggcctctatgagtaccttagataccatgtatggacaaagggtcacgcccccactaattttgccaaatggagaaccgcaaccactccttaccgggtggaatgggaggcagacttcgagccgtacgtggtagtcagacgtgattgcccagagtacgacaggcgttttgtgggcttcggatggaataaggttgctcatatcatggagcttgatgtgcaggagtatgaattcatcgtcctgcccaacgcttacatgatccacatgcctcacgccccatcgtttgacatcacaaaatttaggagcaacaagcagtatagaatctgcctgaagactttgaaagaggagtttcaacaggacatgagccgcaggtacggcttcgctgcccttaaatacctgactgctgaaaataatagttag

SEQ ID NO: 277663 - DNA, 2115 bp, Artificial Sequence
  derived and/or modified sequence
atgctgggcatctgccggggccgcaggaagttcctggccgccagcctgagcctgctgtgcatcccagccatcacctggatctacctgttcagcggcagctttgaagatggcaagcctgtgtccctgagccccctggagagccaggcccacagcccccgctacacagccagcagccagcgggagcgggagagcctggaggtgaggatgagggaggtggaggaggagaacagagccctgcggcggcagctgagcctggcccagggccgggcccccagccaccggcggggcaaccacagcaagacctacagcatggaggagggcaccggggacagcgagaacctgcgggccggcatcgtggccggcaacagcagtgaatgtggccagcagcctgtggtggagaagtgtgagaccatccacgtggccatcgtgtgtgccggctacaatgccagcagagatgtggtgaccctggtgaagtctgtgctcttccacagaagaaaccccctgcacttccacctgattgctgacagcattgctgagcagatcctggccaccctcttccagacctggatggtgcctgctgtgcgggtggacttctacaatgctgatgagctgaagtctgaggtgtcctggatccccaacaagcactacagcggcatctacggcctgatgaagctggtgctgaccaagaccctgcctgccaacctggagcgggtgattgtgctggacacagacatcacctttgccacagacattgctgagctgtgggccgtgttccacaagttcaagggccagcaggtgctgggcctggtggagaaccagagcgactggtacctgggcaacctgtggaagaaccaccggccctggccagccctgggccggggctacaacacaggagtcatcctgctgctgctggacaagctgaggaagatgaagtgggagcagatgtggaggctgacagctgagcgggagctgatgggcatgctgagcaccagcctggccgaccaggacatcttcaatgctgtgatcaagcagaaccccttcctggtgtaccagctgccctgcttctggaatgtgcagctgagtgaccacaccaggtctgagcagtgctacagagatgtgtctgacctgaagctgcagaagcagctgtctgagctggatgaagatgacctgtgctatgagttcagaagagagcgcttcaccgtgcacaggacccacctgtacttcctgcactatgaatatgagcctgctgctgacagcacagatgtgaccctggtggcccagctgtccatggaccggctgcagatgctggaggccatctgcaagcactgggagggccccatcagcctggccctgtacctgagtgatgctgaggcccagcagttcctgcgctatgcccagggcagcgaggtgctgatgagccgccacaacgtgggctaccacatcgtgtacaaggagggccagttctaccctgtgaacctgctgagaaatgtggccatgaagcacatcagcaccccctacatgttcctgagtgacatcgacttcctgcccatgtatggcctgtatgagtacctgaggaagagcgtcatccagctggacctggccaacaccaagaaggccatgattgtgcctgcctttgagaccctgcgctaccgcctgtccttccccaagagcaaggccgagctgctgtccatgctggacatgggcaccctcttcaccttccgctaccacgtgtggaccaagggccacgcccccaccaactttgccaagtggaggacagccaccaccccctacagagtggagtgggaggccgactttgagccctacgtggtggtgcggcgggactgcccagaatatgacagaagatttgtgggcttcggctggaacaaggtggcccacatcatggagctggatgtgcaggagtatgagttcatcgtgctgcccaatgcctacatgatccacatgccccacgcccccagctttgacatcaccaagttccgcagcaacaagcagtaccgcatctgcctgaagaccctgaaggaggagttccagcaggacatgagccgccgctatggctttgctgccctgaagtacctgacagctgagaacaacagctag

SEQ ID NO: 277664 - DNA, 2271 bp, Artificial Sequence
  derived and/or modified sequence
atgctgggcatctgccggggccgcaggaagttcctggccgccagcctgagcctgctgtgcatcccagccatcacctggatctacctgttcagcggcagctttgaagatggcaagcctgtgtccctgagccccctggagagccaggcccacagcccccgctacacagccagcagccagcgggagcgggagagcctggaggtgaggatgagggaggtggaggaggagaacagagccctgcggcggcagctgagcctggcccagggccgggcccccagccaccggcggggcaaccacagcaagacctacagcatggaggagggcaccggggacagcgagaacctgcgggccggcatcgtggccggcaacagcagtgaatgtggccagcagcctgtggtggagaagtgtgagaccatccacgtggccatcgtgtgtgccggctacaatgccagcagagatgtggtgaccctggtgaagtctgtgctcttccacagaagaaaccccctgcacttccacctgattgctgacagcattgctgagcagatcctggccaccctcttccagacctggatggtgcctgctgtgcgggtggacttctacaatgctgatgagctgaagtctgaggtgtcctggatccccaacaagcactacagcggcatctacggcctgatgaagctggtgctgaccaagaccctgcctgccaacctggagcgggtgattgtgctggacacagacatcacctttgccacagacattgctgagctgtgggccgtgttccacaagttcaagggccagcaggtgctgggcctggtggagaaccagagcgactggtacctgggcaacctgtggaagaaccaccggccctggccagccctgggccggggctacaacacaggagtcatcctgctgctgctggacaagctgaggaagatgaagtgggagcagatgtggaggctgacagctgagcgggagctgatgggcatgctgagcaccagcctggccgaccaggacatcttcaatgctgtgatcaagcagaaccccttcctggtgtaccagctgccctgcttctggaatgtgcagctgagtgaccacaccaggtctgagcagtgctacagagatgtgtctgacctgaaggtgatccactggaacagccccaagaagctgcgggtgaagaacaagcacgtggagttcttcaggaacctgtacctgaccttcctggagtatgatggcaacctgctgcggcgggagctgtttggctgccccagcgaggctgatgtgaacagcgagaacctgcagaagcagctgtctgagctggatgaagatgacctgtgctatgagttcagaagagagcgcttcaccgtgcacaggacccacctgtacttcctgcactatgaatatgagcctgctgctgacagcacagatgtgaccctggtggcccagctgtccatggaccggctgcagatgctggaggccatctgcaagcactgggagggccccatcagcctggccctgtacctgagtgatgctgaggcccagcagttcctgcgctatgcccagggcagcgaggtgctgatgagccgccacaacgtgggctaccacatcgtgtacaaggagggccagttctaccctgtgaacctgctgagaaatgtggccatgaagcacatcagcaccccctacatgttcctgagtgacatcgacttcctgcccatgtatggcctgtatgagtacctgaggaagagcgtcatccagctggacctggccaacaccaagaaggccatgattgtgcctgcctttgagaccctgcgctaccgcctgtccttccccaagagcaaggccgagctgctgtccatgctggacatgggcaccctcttcaccttccgctaccacgtgtggaccaagggccacgcccccaccaactttgccaagtggaggacagccaccaccccctacagagtggagtgggaggccgactttgagccctacgtggtggtgcggcgggactgcccagaatatgacagaagatttgtgggcttcggctggaacaaggtggcccacatcatggagctggatgtgcaggagtatgagttcatcgtgctgcccaatgcctacatgatccacatgccccacgcccccagctttgacatcaccaagttccgcagcaacaagcagtaccgcatctgcctgaagaccctgaaggaggagttccagcaggacatgagccgccgctatggctttgctgccctgaagtacctgacagctgagaacaacagctag

SEQ ID NO: 277665 - DNA, 2124 bp, Artificial Sequence
  derived and/or modified sequence
atgctgggcatctgccggggccgcaggaagttcctggccgccagcctgagcctgctgtgcatcccagccatcacctggatctacctgttcagcggcagctttgaagatggcaagcctgtgtccctgagccccctggagagccaggcccacagcccccgctacacagccagcagccagcgggagcgggagagcctggaggtgaggatgagggaggtggaggaggagaacagagccctgcggcggcagctgagcctggcccagggccgggcccccagccaccggcggggcaaccacagcaagacctacagcatggaggagggcaccggggacagcgagaacctgcgggccggcatcgtggccggcaacagcagtgaatgtggccagcagcctgtggtggagaagtgtgagaccatccacgtggccatcgtgtgtgccggctacaatgccagcagagatgtggtgaccctggtgaagtctgtgctcttccacagaagaaaccccctgcacttccacctgattgctgacagcattgctgagcagatcctggccaccctcttccagacctggatggtgcctgctgtgcgggtggacttctacaatgctgatgagctgaagtctgaggtgtcctggatccccaacaagcactacagcggcatctacggcctgatgaagctggtgctgaccaagaccctgcctgccaacctggagcgggtgattgtgctggacacagacatcacctttgccacagacattgctgagctgtgggccgtgttccacaagttcaagggccagcaggtgctgggcctggtggagaaccagagcgactggtacctgggcaacctgtggaagaaccaccggccctggccagccctgggccggggctacaacacaggagtcatcctgctgctgctggacaagctgaggaagatgaagtgggagcagatgtggaggctgacagctgagcgggagctgatgggcatgctgagcaccagcctggccgaccaggacatcttcaatgctgtgatcaagcagaaccccttcctggtgtaccagctgccctgcttctggaatgtgcagctgagtgaccacaccaggtctgagcagtgctacagagatgtgtctgacctgaaggtgatccactggaacagccccaagaagctgcgggtgaagaacaagcacgtggagttcttcaggaacctgtacctgaccttcctggagtatgatggcaacctgctgcggcgggagctgtttggctgccccagcgaggctgatgtgaacagcgagaacctgcagaagcagctgtctgagctggatgaagatgacctgtgctatgagttcagaagagagcgcttcaccgtgcacaggacccacctgtacttcctgcactatgaatatgagcctgctgctgacagcacagatgtgaccctggtggcccagctgtccatggaccggctgcagatgctggaggccatctgcaagcactgggagggccccatcagcctggccctgtacctgagtgatgctgaggcccagcagttcctgcgctatgcccagggcagcgaggtgctgatgagccgccacaacgtgggctaccacatcgtgtacaaggagggccagttctaccctgtgaacctgctgagaaatgtggccatgaagcacatcagcaccccctacatgttcctgagtgacatcgacttcctgcccatgtatggcctgtatgagtacctgcgctaccacgtgtggaccaagggccacgcccccaccaactttgccaagtggaggacagccaccaccccctacagagtggagtgggaggccgactttgagccctacgtggtggtgagaagagactgcccagaatatgacagaagatttgtgggcttcggctggaacaaggtggcccacatcatggagctggatgtgcaggagtatgagttcatcgtgctgcccaatgcctacatgatccacatgcctcatgcccccagctttgacatcaccaagttccgcagcaacaagcagtaccgcatctgcctgaagaccctgaaggaggagttccagcaggacatgagcagaagatatggctttgctgccctgaagtacctgacagctgagaacaacagctag

SEQ ID NO: 277666 - DNA, 4170 bp, Artificial Sequence
  derived and/or modified sequence
cggccccggcggtcgctccctggacccaacccgaggctgacccaggcccctgcccatgcggggcgcccctggctcggaagagtcccccgggccgggagcagctccaggcagcggccccggaggaagaggaagaagggacagtgctcagcttgggggacccggaccctcgccgcggcatttggagccgggggcagtcccgaactctgtgcttggcaccgccgctccgagtagggcagcgcctgccgggaccctgacccggaccccctgcgcctcgtaggcggcggcgccgccgcgccaccctgttcttccgtgtctccctctgcctggcggcagtcacggccaagaacctacattaagaaacgcattcagatgcatcagccgtttgtaaagcacctgtcgtgagccagagagtattatgagggaggccgaggacttcatgctccggacagagaaacggcgctgggattagggattgccacttctgagaggatgctgggaatctgcagggggagacggaaattcttggctgcctcgttgagtcttctctgcatcccagccatcacctggatttacctgttttctgggagcttcgaagatggaaagcccgtgtctctgtcaccgctggagtcccaggcacacagccccaggtacacggcctccagccagcgggagcgcgagagcctggaggtgcgcatgcgcgaggtggaggaggagaaccgcgccctccgcaggcagctcagcctggcccagggccgagccccatcccatcgccgaggcaaccactccaagacctactccatggaggagggcactggagacagcgagaaccttcgggctggcatcgtggcaggcaacagctccgagtgtgggcagcagccggtcgtggagaaatgcgagacaatccacgttgctattgtctgcgccggatacaatgccagccgggatgtcgtcaccctggtcaaatccgtcctgttccatagacggaaccctctgcacttccaccttattgctgactccattgcggagcagatcctggccacgctcttccagacctggatggtgcccgctgtgcgtgtggacttctacaatgcagacgagctcaagtctgaagtttcctggatccccaataaacattactctgggatttatggtctgatgaagcttgtcctgaccaagactcttcctgccaacctggagagagtcatcgtccttgacacggatatcacctttgccactgacattgcagagctgtgggctgtgttccacaagttcaaaggtcagcaagtcctgggcttggtggagaaccagagtgactggtaccttggaaacctgtggaaaaatcaccgcccatggccagcccttggaagaggctacaacacaggggtgatcctgttacttctggataagctgcggaagatgaaatgggagcagatgtggaggctgaccgcagagagggagctcatgggcatgctctctacatccttagctgaccaggatattttcaatgccgtcatcaaacaaaaccccttccttgtgtaccagctcccctgcttctggaatgtgcagctgtcagaccacacccgctccgagcagtgctacagagacgtgtctgatctaaagctccagaagcagctgtctgagctggacgaggacgacctgtgctatgagttccggcgagagcgcttcactgtccaccgcacccacctgtacttcctgcactacgagtatgagcctgcagcagacagcacggacgtcaccctggtcgctcagctgtccatggacaggctccagatgctggaggccatctgcaagcactgggaggggcccatcagcctggccctctacctgtcagacgccgaggcccagcagttcctccgctacgcacagggctctgaggtgcttatgagccgccacaacgtgggctaccacatcgtgtacaaggagggccagttctaccccgtgaacctgctgcgcaacgtggccatgaagcacatcagcactccctacatgttcctgtctgacattgacttcctgcccatgtatgggctctatgagtacctcaggaagtctgtcatccagctcgatcttgccaacaccaagaaagcaatgattgtccccgcgttcgagacactgcgctaccggctgtccttccccaagtcaaaagcggagttgctgtcaatgctggacatggggaccctcttcacattcaggtaccacgtctggacgaaaggccacgcacccacaaacttcgccaagtggcggaccgccaccacgccttaccgggttgagtgggaggccgattttgagccgtatgttgttgtgagacgtgactgcccggagtacgaccggaggtttgtaggctttggctggaacaaagtggctcatatcatggagctggatgtgcaggagtatgagttcattgtgctgcccaacgcctacatgatccacatgcctcatgcccccagcttcgacattaccaagttccgttccaacaagcaataccgcatctgtctcaaaaccctcaaggaagagtttcagcaggacatgtcccgccgctacggctttgctgccctgaaatatctcacagccgagaacaacagctagcaccaagaagcccaccactagggggagacatgctgtaggggaagtgccactcgctgtttggggcccggccttcaaattcaaaattgagccatgctttttcggtttgtttttatttatctctttggcccagccaagctgccctcactacagagaccttggacaaggatccagccagtccctctctgccccacaaccctgcattcccagaggttagctatgcagcccacctagatgagtctcttcaagaatgggaaatcaaggggtgacagggagtaaaagggttatcatcttactgcaaagccacaagatcagggcagggctttaggatgttctggatgctttttaataattatgcttcccatcataactggggagaaagggaagtcagggttctaggggttattcgtcccaggaaatagaagtgaaattgtctttattaagtgaaaactttcccctttgccctgcaatgtagctgggcattcaaacggagggcaaaccgatgatctaaaccaaccacttggaaaaacccaatggggacattgtaaccagagggtcctggaggtggggttgatgggtttccttatccccaaagtcactcctgttttgttttgtttttctttgggggttttgtttatttttggggctggcaatccaaaatagaaaatctgatcctttgaggctctaaaggaaaatcagctgcctctaccaaccaccctctatcagcagtggcccaggaaggaggtcaagcatcttcggccgatatttaaacatgggcagcttccttcaggatgatcaccgaggctcccgtgactttgaactccctactctccagaatccaggggctatagcgatggggactgcggaattacgagggctggctgttttacaccggtcacattttctattggcagtgactgattcatgggaaagggctttgaaggaactacttcagtgcacacacaaggtacgaacctctcaggcctttcgaagaactttcataattcatgaaagcccagttctgaagattcacgtatccatctggagacctacaggaagaaagtgattgggttcctctggttcttgcctgcttcactgtggatgggaagaggtgacaacctcagtctccctttgggacctgtccaagggtaggcaaccaccttcaccttcacacagattgaggagacactggactttttacccattttctttaatcttcaatattaatattgtgtttacattgatgagaacaagagttaatgccctaccctctgctgggctgtttgtattgagttgcaatgtgaccagcgaaagctgcatttaataaatgaaagtacagactgtttcttccccattcccctcccactcttgcaggaagctactgagacacaccttgacatagagagctaaattgcagtggataaacagcaacttcacactttctgttcccccattctatttttctcatcatttgaactttagccttttttttccccttttgcctgaagttagatcccactctgtctctaactcaaaccatcttcaagttttccattccgcatctttctc

SEQ ID NO: 277667 - DNA, 4409 bp, Artificial Sequence
  derived and/or modified sequence
cggccgcgctcgtctcgccgggctgttcgcgggcaggccctgccctgaagggacgaatcggcttggagcgcgggaggtggagtcggccccggcggtcgctccctggacccaacccgaggctgacccaggcccctgcccatgcggggcgcccctggctcggaagagtcccccgggccgggagcagctccaggcagcggccccggaggaagaggaagaagggacagtgctcagcttgggggacccggaccctcgccgcggcatttggagccgggggcagtcccgaactctgtgcttggcaccgccgctccgagtagggcagcgcctgccgggaccctgacccggaccccctgcgcctcgtaggcggcggcgccgccgcgccaccctgttcttccgtgtctccctctgcctggcggcagtcacggccaagaacctacattaagaaacgcattcagatgcatcagccgtttgtaaagcacctgtcgtgagccagagagtattatgagggaggccgaggacttcatgctccggacagagaaacggcgctgggattagggattgccacttctgagaggatgctgggaatctgcagggggagacggaaattcttggctgcctcgttgagtcttctctgcatcccagccatcacctggatttacctgttttctgggagcttcgaagatggaaagcccgtgtctctgtcaccgctggagtcccaggcacacagccccaggtacacggcctccagccagcgggagcgcgagagcctggaggtgcgcatgcgcgaggtggaggaggagaaccgcgccctccgcaggcagctcagcctggcccagggccgagccccatcccatcgccgaggcaaccactccaagacctactccatggaggagggcactggagacagcgagaaccttcgggctggcatcgtggcaggcaacagctccgagtgtgggcagcagccggtcgtggagaaatgcgagacaatccacgttgctattgtctgcgccggatacaatgccagccgggatgtcgtcaccctggtcaaatccgtcctgttccatagacggaaccctctgcacttccaccttattgctgactccattgcggagcagatcctggccacgctcttccagacctggatggtgcccgctgtgcgtgtggacttctacaatgcagacgagctcaagtctgaagtttcctggatccccaataaacattactctgggatttatggtctgatgaagcttgtcctgaccaagactcttcctgccaacctggagagagtcatcgtccttgacacggatatcacctttgccactgacattgcagagctgtgggctgtgttccacaagttcaaaggtcagcaagtcctgggcttggtggagaaccagagtgactggtaccttggaaacctgtggaaaaatcaccgcccatggccagcccttggaagaggctacaacacaggggtgatcctgttacttctggataagctgcggaagatgaaatgggagcagatgtggaggctgaccgcagagagggagctcatgggcatgctctctacatccttagctgaccaggatattttcaatgccgtcatcaaacaaaaccccttccttgtgtaccagctcccctgcttctggaatgtgcagctgtcagaccacacccgctccgagcagtgctacagagacgtgtctgatctaaaggtcattcactggaactcccccaagaagctccgggtgaagaacaagcatgtggagttttttcgcaacctctacctgaccttcctggagtatgacggcaatcttctgaggcgggaactgtttggctgccccagtgaggctgatgtcaacagtgaaaacctccagaagcagctgtctgagctggacgaggacgacctgtgctatgagttccggcgagagcgcttcactgtccaccgcacccacctgtacttcctgcactacgagtatgagcctgcagcagacagcacggacgtcaccctggtcgctcagctgtccatggacaggctccagatgctggaggccatctgcaagcactgggaggggcccatcagcctggccctctacctgtcagacgccgaggcccagcagttcctccgctacgcacagggctctgaggtgcttatgagccgccacaacgtgggctaccacatcgtgtacaaggagggccagttctaccccgtgaacctgctgcgcaacgtggccatgaagcacatcagcactccctacatgttcctgtctgacattgacttcctgcccatgtatgggctctatgagtacctcaggaagtctgtcatccagctcgatcttgccaacaccaagaaagcaatgattgtccccgcgttcgagacactgcgctaccggctgtccttccccaagtcaaaagcggagttgctgtcaatgctggacatggggaccctcttcacattcaggtaccacgtctggacgaaaggccacgcacccacaaacttcgccaagtggcggaccgccaccacgccttaccgggttgagtgggaggccgattttgagccgtatgttgttgtgagacgtgactgcccggagtacgaccggaggtttgtaggctttggctggaacaaagtggctcatatcatggagctggatgtgcaggagtatgagttcattgtgctgcccaacgcctacatgatccacatgcctcatgcccccagcttcgacattaccaagttccgttccaacaagcaataccgcatctgtctcaaaaccctcaaggaagagtttcagcaggacatgtcccgccgctacggctttgctgccctgaaatatctcacagccgagaacaacagctagcaccaagaagcccaccactagggggagacatgctgtaggggaagtgccactcgctgtttggggcccggccttcaaattcaaaattgagccatgctttttcggtttgtttttatttatctctttggcccagccaagctgccctcactacagagaccttggacaaggatccagccagtccctctctgccccacaaccctgcattcccagaggttagctatgcagcccacctagatgagtctcttcaagaatgggaaatcaaggggtgacagggagtaaaagggttatcatcttactgcaaagccacaagatcagggcagggctttaggatgttctggatgctttttaataattatgcttcccatcataactggggagaaagggaagtcagggttctaggggttattcgtcccaggaaatagaagtgaaattgtctttattaagtgaaaactttcccctttgccctgcaatgtagctgggcattcaaacggagggcaaaccgatgatctaaaccaaccacttggaaaaacccaatggggacattgtaaccagagggtcctggaggtggggttgatgggtttccttatccccaaagtcactcctgttttgttttgtttttctttgggggttttgtttatttttggggctggcaatccaaaatagaaaatctgatcctttgaggctctaaaggaaaatcagctgcctctaccaaccaccctctatcagcagtggcccaggaaggaggtcaagcatcttcggccgatatttaaacatgggcagcttccttcaggatgatcaccgaggctcccgtgactttgaactccctactctccagaatccaggggctatagcgatggggactgcggaattacgagggctggctgttttacaccggtcacattttctattggcagtgactgattcatgggaaagggctttgaaggaactacttcagtgcacacacaaggtacgaacctctcaggcctttcgaagaactttcataattcatgaaagcccagttctgaagattcacgtatccatctggagacctacaggaagaaagtgattgggttcctctggttcttgcctgcttcactgtggatgggaagaggtgacaacctcagtctccctttgggacctgtccaagggtaggcaaccaccttcaccttcacacagattgaggagacactggactttttacccattttctttaatcttcaatattaatattgtgtttacattgatgagaacaagagttaatgccctaccctctgctgggctgtttgtattgagttgcaatgtgaccagcgaaagctgcatttaataaatgaaagtacagactgtttcttccccattcccctcccactcttgcaggaagctactgagacacaccttgacatagagagctaaattgcagtggataaacagcaacttcacactttctgttcccccattctatttttctcatcatttgaactttagccttttttttccccttttgcctgaagttagatcccactctgtctctaactcaaaccatcttcaagttttccattccgcatctttctc

SEQ ID NO: 277668 - DNA, 4138 bp, Artificial Sequence
  derived and/or modified sequence
gggggcgcggccgcgctcgtctcgccgggctgttcgcgggcaggccctgccctgaagggacgaatcggcttggagcgcgggaggtggagtcggccccggcggtcgctccctggacccaacccgaggctgacccaggcccctgcccatgcggggcgcccctggctcggaagagtcccccgggccgggagcagctccaggcagcggccccggaggaagaggaagaagggacagtgctcagcttgggggacccggaccctcgccgcggcatttggagccgggggcagtcccgaactctgtgcttggcaccgccgctccgagtagggcagcgcctgccgggaccctgacccggaccccctgcgcctcgtaggcggcggcgccgccgcgccaccctgttcttccgtgtctccctctgcctggcggcagtcacggccaagagagtattatgagggaggccgaggacttcatgctccggacagagaaacggcgctgggattagggattgccacttctgagaggatgctgggaatctgcagggggagacggaaattcttggctgcctcgttgagtcttctctgcatcccagccatcacctggatttacctgttttctgggagcttcgaagatggaaagcccgtgtctctgtcaccgctggagtcccaggcacacagccccaggtacacggcctccagccagcgggagcgcgagagcctggaggtgcgcatgcgcgaggtggaggaggagaaccgcgccctccgcaggcagctcagcctggcccagggccgagccccatcccatcgccgaggcaaccactccaagacctactccatggaggagggcactggagacagcgagaaccttcgggctggcatcgtggcaggcaacagctccgagtgtgggcagcagccggtcgtggagaaatgcgagacaatccacgttgctattgtctgcgccggatacaatgccagccgggatgtcgtcaccctggtcaaatccgtcctgttccatagacggaaccctctgcacttccaccttattgctgactccattgcggagcagatcctggccacgctcttccagacctggatggtgcccgctgtgcgtgtggacttctacaatgcagacgagctcaagtctgaagtttcctggatccccaataaacattactctgggatttatggtctgatgaagcttgtcctgaccaagactcttcctgccaacctggagagagtcatcgtccttgacacggatatcacctttgccactgacattgcagagctgtgggctgtgttccacaagttcaaaggtcagcaagtcctgggcttggtggagaaccagagtgactggtaccttggaaacctgtggaaaaatcaccgcccatggccagcccttggaagaggctacaacacaggggtgatcctgttacttctggataagctgcggaagatgaaatgggagcagatgtggaggctgaccgcagagagggagctcatgggcatgctctctacatccttagctgaccaggatattttcaatgccgtcatcaaacaaaaccccttccttgtgtaccagctcccctgcttctggaatgtgcagctgtcagaccacacccgctccgagcagtgctacagagacgtgtctgatctaaaggtcattcactggaactcccccaagaagctccgggtgaagaacaagcatgtggagttttttcgcaacctctacctgaccttcctggagtatgacggcaatcttctgaggcgggaactgtttggctgccccagtgaggctgatgtcaacagtgaaaacctccagaagcagctgtctgagctggacgaggacgacctgtgctatgagttccggcgagagcgcttcactgtccaccgcacccacctgtacttcctgcactacgagtatgagcctgcagcagacagcacggacgtcaccctggtcgctcagctgtccatggacaggctccagatgctggaggccatctgcaagcactgggaggggcccatcagcctggccctctacctgtcagacgccgaggcccagcagttcctccgctacgcacagggctctgaggtgcttatgagccgccacaacgtgggctaccacatcgtgtacaaggagggccagttctaccccgtgaacctgctgcgcaacgtggccatgaagcacatcagcactccctacatgttcctgtctgacattgacttcctgcccatgtatgggctctatgagtacctcaggaagtctgtcatccagctcgatcttgccaacaccaagaaagcaatgattgtccccgcgttcgagacactgcgctaccggctgtccttccccaagtcaaaagcggagttgctgtcaatgctggacatggggaccctcttcacattcaggtaccacgtctggacgaaaggccacgcacccacaaacttcgccaagtggcggaccgccaccacgccttaccgggttgagtgggaggccgattttgagccgtatgttgttgtgagacgtgactgcccggagtacgaccggaggtttgtaggctttggctggaacaaagtggctcatatcatggagctggatgtgcaggagtatgagttcattgtgctgcccaacgcctacatgatccacatgcctcatgcccccagcttcgacattaccaagttccgttccaacaagcaataccgcatctgtctcaaaaccctcaaggaagagtttcagcaggacatgtcccgccgctacggctttgctgccctgaaatatctcacagccgagaacaacagctagcaccaagaagcccaccactagggggagacatgctgtaggggaagtgccactcgctgtttggggcccggccttcaaattcaaaattgagccatgctttttcggtttgtttttatttatctctttggcccagccaagctgccctcactacagagaccttggacaaggatccagccagtccctctctgccccacaaccctgcattcccagaggttagctatgcagcccacctagatgagtctcttcaagaatgggaaatcaaggggtgacagggagtaaaagggttatcatcttactgcaaagccacaagatcagggcagggctttaggatgttctggatgctttttaataattatgcttcccatcataactggggagaaagggaagtcagggttctaggggttattcgtcccaggaaatagaagtgaaattgtctttattaagtgaaaactttcccctttgccctgcaatgtagctgggcattcaaacggagggcaaaccgatgatctaaaccaaccacttggaaaaacccaatggggacattgtaaccagagggtcctggaggtggggttgatgggtttccttatccccaaagtcactcctgttttgttttgtttttctttgggggttttgtttatttttggggctggcaatccaaaatagaaaatctgatcctttgaggctctaaaggaaaatcagctgcctctaccaaccaccctctatcagcagtggcccaggaaggaggtcaagcatcttcggccgatatttaaacatgggcagcttccttcaggatgatcaccgaggctcccgtgactttgaactccctactctccagaatccaggggctatagcgatggggactgcggaattacgagggctggctgttttacaccggtcacattttctattggcagtgactgattcatgggaaagggctttgaaggaactacttcagtgcacacacaaggtacgaacctctcaggcctttcgaagaactttcataattcatgaaagcccagttctgaagattcacgtatccatctggagacctacaggaagaaagtgattgggttcctctggttcttgcctgcttcactgtggatgggaagaggtgacaacctcagtctccctttgggacctgtccaagggtaggcaaccaccttcaccttcacacagattgaggagacactggactttttacccattttctttaatcttcaatattaatattgtgtttacattgatgagaacaagagttaatgccctaccctctgctgggctgtttgtattgagttgcaatgtgaccagcgaaagctgcatttaataaatgaaagtacagactgtttcttcccca

SEQ ID NO: 277669 - DNA, 3955 bp, Artificial Sequence
  derived and/or modified sequence
gctcgtctcgccgggctgttcgcgggcaggccctgccctgaagggacgaatcggcttggagcgcgggaggtggagtcggccccggcggtcgctccctggacccaacccgaggctgacccaggcccctgcccatgcggggcgcccctggctcggaagagtcccccgggccgggagcagctccaggcagcggccccggaggaagaggaagaagggacagtgctcagcttgggggacccggaccctcgccgcggcatttggagccgggggcagtcccgaactctgtgcttggcaccgccgctccgagtagggcagcgcctgccgggaccctgacccggaccccctgcgcctcgtaggcggcggcgccgccgcgccaccctgttcttccgtgtctccctctgcctggcggcagtcacggccaagagagtattatgagggaggccgaggacttcatgctccggacagagaaacggcgctgggattagggattgccacttctgagaggatgctgggaatctgcagggggagacggaaattcttggctgcctcgttgagtcttctctgcatcccagccatcacctggatttacctgttttctgggagcttcgaagatggaaagcccgtgtctctgtcaccgctggagtcccaggcacacagccccaggtacacggcctccagccagcgggagcgcgagagcctggaggtgcgcatgcgcgaggtggaggaggagaaccgcgccctccgcaggcagctcagcctggcccagggccgagccccatcccatcgccgaggcaaccactccaagacctactccatggaggagggcactggagacagcgagaaccttcgggctggcatcgtggcaggcaacagctccgagtgtgggcagcagccggtcgtggagaaatgcgagacaatccacgttgctattgtctgcgccggatacaatgccagccgggatgtcgtcaccctggtcaaatccgtcctgttccatagacggaaccctctgcacttccaccttattgctgactccattgcggagcagatcctggccacgctcttccagacctggatggtgcccgctgtgcgtgtggacttctacaatgcagacgagctcaagtctgaagtttcctggatccccaataaacattactctgggatttatggtctgatgaagcttgtcctgaccaagactcttcctgccaacctggagagagtcatcgtccttgacacggatatcacctttgccactgacattgcagagctgtgggctgtgttccacaagttcaaaggtcagcaagtcctgggcttggtggagaaccagagtgactggtaccttggaaacctgtggaaaaatcaccgcccatggccagcccttggaagaggctacaacacaggggtgatcctgttacttctggataagctgcggaagatgaaatgggagcagatgtggaggctgaccgcagagagggagctcatgggcatgctctctacatccttagctgaccaggatattttcaatgccgtcatcaaacaaaaccccttccttgtgtaccagctcccctgcttctggaatgtgcagctgtcagaccacacccgctccgagcagtgctacagagacgtgtctgatctaaagctccagaagcagctgtctgagctggacgaggacgacctgtgctatgagttccggcgagagcgcttcactgtccaccgcacccacctgtacttcctgcactacgagtatgagcctgcagcagacagcacggacgtcaccctggtcgctcagctgtccatggacaggctccagatgctggaggccatctgcaagcactgggaggggcccatcagcctggccctctacctgtcagacgccgaggcccagcagttcctccgctacgcacagggctctgaggtgcttatgagccgccacaacgtgggctaccacatcgtgtacaaggagggccagttctaccccgtgaacctgctgcgcaacgtggccatgaagcacatcagcactccctacatgttcctgtctgacattgacttcctgcccatgtatgggctctatgagtacctcaggaagtctgtcatccagctcgatcttgccaacaccaagaaagcaatgattgtccccgcgttcgagacactgcgctaccggctgtccttccccaagtcaaaagcggagttgctgtcaatgctggacatggggaccctcttcacattcaggtaccacgtctggacgaaaggccacgcacccacaaacttcgccaagtggcggaccgccaccacgccttaccgggttgagtgggaggccgattttgagccgtatgttgttgtgagacgtgactgcccggagtacgaccggaggtttgtaggctttggctggaacaaagtggctcatatcatggagctggatgtgcaggagtatgagttcattgtgctgcccaacgcctacatgatccacatgcctcatgcccccagcttcgacattaccaagttccgttccaacaagcaataccgcatctgtctcaaaaccctcaaggaagagtttcagcaggacatgtcccgccgctacggctttgctgccctgaaatatctcacagccgagaacaacagctagcaccaagaagcccaccactagggggagacatgctgtaggggaagtgccactcgctgtttggggcccggccttcaaattcaaaattgagccatgctttttcggtttgtttttatttatctctttggcccagccaagctgccctcactacagagaccttggacaaggatccagccagtccctctctgccccacaaccctgcattcccagaggttagctatgcagcccacctagatgagtctcttcaagaatgggaaatcaaggggtgacagggagtaaaagggttatcatcttactgcaaagccacaagatcagggcagggctttaggatgttctggatgctttttaataattatgcttcccatcataactggggagaaagggaagtcagggttctaggggttattcgtcccaggaaatagaagtgaaattgtctttattaagtgaaaactttcccctttgccctgcaatgtagctgggcattcaaacggagggcaaaccgatgatctaaaccaaccacttggaaaaacccaatggggacattgtaaccagagggtcctggaggtggggttgatgggtttccttatccccaaagtcactcctgttttgttttgtttttctttgggggttttgtttatttttggggctggcaatccaaaatagaaaatctgatcctttgaggctctaaaggaaaatcagctgcctctaccaaccaccctctatcagcagtggcccaggaaggaggtcaagcatcttcggccgatatttaaacatgggcagcttccttcaggatgatcaccgaggctcccgtgactttgaactccctactctccagaatccaggggctatagcgatggggactgcggaattacgagggctggctgttttacaccggtcacattttctattggcagtgactgattcatgggaaagggctttgaaggaactacttcagtgcacacacaaggtacgaacctctcaggcctttcgaagaactttcataattcatgaaagcccagttctgaagattcacgtatccatctggagacctacaggaagaaagtgattgggttcctctggttcttgcctgcttcactgtggatgggaagaggtgacaacctcagtctccctttgggacctgtccaagggtaggcaaccaccttcaccttcacacagattgaggagacactggactttttacccattttctttaatcttcaatattaatattgtgtttacattgatgagaacaagagttaatgccctaccctctgctgggctgtttgtattgagttgcaatgtgaccagcgaaagctgcatttaataaatgaaagtacagac

SEQ ID NO: 277670 - DNA, 2533 bp, Artificial Sequence
  derived and/or modified sequence
gcagttaacttatcccgaagctccaaagcaaacgtcttttacttcttcgccggggacgctgctgtaccaccgctgcctccctttcgcattctgctgggctcggtcagccgctgagattagagagtattatgagggaggccgaggacttcatgctccggacagagaaacggcgctgggattagggattgccacttctgagaggatgctgggaatctgcagggggagacggaaattcttggctgcctcgttgagtcttctctgcatcccagccatcacctggatttacctgttttctgggagcttcgaagatggaaagcccgtgtctctgtcaccgctggagtcccaggcacacagccccaggtacacggcctccagccagcgggagcgcgagagcctggaggtgcgcatgcgcgaggtggaggaggagaaccgcgccctccgcaggcagctcagcctggcccagggccgagccccatcccatcgccgaggcaaccactccaagacctactccatggaggagggcactggagacagcgagaaccttcgggctggcatcgtggcaggcaacagctccgagtgtgggcagcagccggtcgtggagaaatgcgagacaatccacgttgctattgtctgcgccggatacaatgccagccgggatgtcgtcaccctggtcaaatccgtcctgttccatagacggaaccctctgcacttccaccttattgctgactccattgcggagcagatcctggccacgctcttccagacctggatggtgcccgctgtgcgtgtggacttctacaatgcagacgagctcaagtctgaagtttcctggatccccaataaacattactctgggatttatggtctgatgaagcttgtcctgaccaagactcttcctgccaacctggagagagtcatcgtccttgacacggatatcacctttgccactgacattgcagagctgtgggctgtgttccacaagttcaaaggtcagcaagtcctgggcttggtggagaaccagagtgactggtaccttggaaacctgtggaaaaatcaccgcccatggccagcccttggaagaggctacaacacaggggtgatcctgttacttctggataagctgcggaagatgaaatgggagcagatgtggaggctgaccgcagagagggagctcatgggcatgctctctacatccttagctgaccaggatattttcaatgccgtcatcaaacaaaaccccttccttgtgtaccagctcccctgcttctggaatgtgcagctgtcagaccacacccgctccgagcagtgctacagagacgtgtctgatctaaaggtcattcactggaactcccccaagaagctccgggtgaagaacaagcatgtggagttttttcgcaacctctacctgaccttcctggagtatgacggcaatcttctgaggcgggaactgtttggctgccccagtgaggctgatgtcaacagtgaaaacctccagaagcagctgtctgagctggacgaggacgacctgtgctatgagttccggcgagagcgcttcactgtccaccgcacccacctgtacttcctgcactacgagtatgagcctgcagcagacagcacggacgtcaccctggtcgctcagctgtccatggacaggctccagatgctggaggccatctgcaagcactgggaggggcccatcagcctggccctctacctgtcagacgccgaggcccagcagttcctccgctacgcacagggctctgaggtgcttatgagccgccacaacgtgggctaccacatcgtgtacaaggagggccagttctaccccgtgaacctgctgcgcaacgtggccatgaagcacatcagcactccctacatgttcctgtctgacattgacttcctgcccatgtatgggctctatgagtacctcaggtaccacgtctggacgaaaggccacgcacccacaaacttcgccaagtggcggaccgccaccacgccttaccgggttgagtgggaggccgattttgagccgtatgttgttgtgagacgtgactgcccggagtacgaccggaggtttgtaggctttggctggaacaaagtggctcatatcatggagctggatgtgcaggagtatgagttcattgtgctgcccaacgcctacatgatccacatgcctcatgcccccagcttcgacattaccaagttccgttccaacaagcaataccgcatctgtctcaaaaccctcaaggaagagtttcagcaggacatgtcccgccgctacggctttgctgccctgaaatatctcacagccgagaacaacagctagcaccaagaagcccaccactagggggagacatgctgtaggggaagtgccactcgctgtttggggcccggccttcaaattcaaaattgagccatgctttttcggtttgtttttatttatctctttggcccagccaagctgccctcactacagagaccttggacaaggatccagccagtccctctctgccccacaaccctgcattcccag

SEQ ID NO: 277671 - DNA, 2115 bp, Artificial Sequence
  derived and/or modified sequence
atgctgggcatctgccggggccggcggaagttcctggccgccagcttgtctttgttatgcattccagccatcacttggatctatctgttcagcgggagctttgaggatggtaagcctgtttcccttagccctttggagtcacaggcccatagcccgagatacaccgcctcttcgcaaagagagcgtgagagtttagaagtccgcatgagagaggtggaggaagaaaatagagccctccggcgccagctttccctagctcaaggccgtgcgccctcccaccggcgtggaaaccactcaaagacctattccatggaagagggcactggcgattccgagaatctcagagctggtattgtagccggtaattcaagtgagtgcggccagcagcccgtggtggaaaagtgcgaaaccatacacgtagctatcgtgtgcgccgggtacaacgctagtcgggacgttgtaactctcgtgaagagcgttctgtttcacaggcggaatcccctccattttcacctcatcgccgattccatcgccgaacaaatcctcgccacgctgtttcagacatggatggttcctgccgttagagtcgacttctacaatgccgatgagttgaagtccgaagtatcctggatcccaaacaagcactatagcggaatctacgggttgatgaagctggtcttgaccaagacgctgccggccaatctggaacgagtgatagtactcgataccgacatcacgttcgctactgatattgcagaactctgggctgtgttccacaagtttaaaggacagcaggttttgggcctagttgaaaaccagagtgactggtatctaggcaatttatggaaaaatcataggccttggccagccctgggccgaggttataacacgggagtaattctgctactcctcgacaaactccggaagatgaagtgggaacagatgtggcgcctgaccgcagagcgagagctcatgggtatgctgtctacatctctggctgaccaagacatctttaacgccgtcattaagcaaaatccttttttggtgtatcaactgccgtgtttttggaatgtacagctctccgaccacacccgctctgagcagtgctaccgtgacgtaagtgatctgaagctccagaagcaacttagtgagctggacgaagatgacctctgctacgaattccgacgggagcggtttaccgtgcacaggacccacctgtacttccttcactacgaatatgaacccgctgcagacagtaccgacgttacgctggtcgcccaactctcgatggatagactgcagatgctggaggccatctgcaagcactgggaaggccctattagcctcgccctgtacctgagtgacgcagaagcccagcagtttttgcggtacgcacagggctcagaggtcctcatgagccgccacaatgtggggtatcacatcgtatataaagagggccaattttacccggtcaacctgctgcgcaacgtagcaatgaagcatatttccaccccgtatatgtttctgtccgacatagattttctacccatgtacggcctttatgagtacctgcggaaatccgttatccagttggacttagcgaacaccaagaaagccatgattgtgcccgcatttgagaccctccgatataggctgtcttttcccaagtcaaaggctgagcttctgtcaatgttggatatgggcaccctcttcaccttcagataccatgtttggacgaagggccacgctccaacaaactttgccaaatggcggacagccaccactccatatcgcgttgagtgggaagccgacttcgagccgtatgtagtcgtgaggagagactgtccagagtacgatcgaaggttcgtgggctttggatggaataaggtcgcacatatcatggagctcgatgtgcaggagtacgagtttatcgtcttacccaatgcctacatgatccatatgccacatgcaccatcatttgacattacaaaattccgctctaacaagcagtatcgcatttgtctcaagaccctgaaggaagagttccaacaggacatgtcccggcgctacgggtttgcagccctcaagtatcttactgctgagaataacagctag

SEQ ID NO: 277672 - DNA, 2271 bp, Artificial Sequence
  derived and/or modified sequence
atgctgggcatctgccggggccggcggaagttcctggccgccagcttgtccctactatgcattcccgcgatcacctggatctatctcttcagcgggtcctttgaggacgggaagcctgtctcactctcacccctagagagtcaggctcactcccctcgctataccgcctcgtctcaacgcgagagggaatcccttgaagtgaggatgagggaggtcgaagaagagaacagagctctaagacggcaattgtccttggcacaggggcgggcaccttctcataggcgcgggaaccatagcaaaacgtatagcatggaggaaggtaccggagacagcgaaaacctgcgggccgggattgtcgctggcaattctagtgaatgtgggcagcagcctgtagtggagaaatgtgaaactatccacgtggccatagtctgcgccggttacaatgcatccagggatgttgtgacactggttaaatctgtattgtttcatcgtcgtaaccctctgcactttcacttaatcgctgattcaatagccgagcagatcctggctaccctgttccagacttggatggtcccggccgtcagagttgacttctacaatgctgacgaactgaagagtgaggtgtcttggattccaaataagcattattcaggcatctacggcctcatgaagctggtgctaactaaaacactgcccgccaatctggaaagagtcatcgtgctcgatacagatattaccttcgccaccgacattgctgagctctgggccgtgttccacaagttcaagggccagcaagtactgggcctcgtggaaaatcagtctgattggtacctgggaaacctatggaaaaatcacagaccctggcccgccctgggccgagggtacaataccggcgtgatcctgctcctgctggataagttgaggaagatgaaatgggagcagatgtggcgtctcacagccgagcgcgagcttatgggcatgctctcgacctccctggcagaccaggatatcttcaatgctgtcatcaagcaaaacccctttctggtgtatcagctgccatgtttctggaatgtgcagctgtccgaccatactcggtccgagcagtgttatagagatgtgtcggacctgaaagtcatccattggaattccccaaagaaattaagggttaaaaacaagcatgttgagtttttcagaaatttatacctaacgtttcttgagtatgacggtaatctactgagacgggagcttttcgggtgccccagcgaagcggacgtgaacagcgaaaacctgcagaagcagctctctgagctcgatgaagatgatctgtgctacgaattcagacgagagcgtttcacagtgcatcgcacccatctatatttcctgcactacgagtacgagcctgcagcagactctaccgacgtcactctcgtagcacaactgagcatggacagacttcaaatgctagaggctatctgcaagcattgggaagggcctatatcccttgcattgtacctcagtgacgccgaagctcagcagtttttgcggtatgcccaggggagtgaggtgttgatgtcacgccataatgttgggtaccacattgtatacaaggagggacagttctatcctgtcaacctactgcgtaacgtggctatgaaacacatctcaaccccttacatgtttttgagtgacattgattttttacctatgtacggcctttacgaatacttgaggaagtccgtaatccagctcgacctggcaaacaccaaaaaagccatgattgtgcctgcctttgaaacactgcgataccgactgagcttcccgaaaagcaaagccgagttgctcagtatgctggatatgggaaccctgtttactttcaggtatcacgtgtggactaaaggccacgctcctaccaactttgccaaatggcggacggccacgacaccctatcgggtggagtgggaagccgacttcgaaccctatgtcgtcgtcaggagagactgcccagaatatgacaggagatttgtcggattcggatggaacaaggtggcccacataatggagctggacgtacaggagtatgagttcatcgtgttgccgaacgcctatatgatccacatgccacacgctcccagcttcgatatcacaaaattcaggagtaataaacagtaccggatttgcctcaagacccttaaagaggagttccagcaggacatgtcccgccgatatgggtttgctgctctgaaatatttaactgcggaaaataatagctag

SEQ ID NO: 277673 - DNA, 2271 bp, Artificial Sequence
  derived and/or modified sequence
atgctgggcatctgccggggccggcggaagttcctggccgccagcctgtcattactgtgtatccccgccatcacatggatctacttgttctctgggtccttcgaggacggaaagcccgtgtctttgagccccttagagagccaagctcactcgccccggtatacggcatctagtcaaagagagcgagagagtttagaggtgcgaatgcgggaggtggaggaggagaacagggcgctcagacggcagctgagcttggcccaaggcagggcacctagccacagacgtggtaaccactccaagacgtattcaatggaagaaggtaccggagatagcgagaacctcagggctggcatagtggctgggaacagttccgaatgtgggcagcagcctgtggtagagaaatgtgaaacaatccacgtggctatcgtatgtgcgggctacaatgcctcccgtgatgtggttacactggtaaaatctgttctttttcacagaagaaatcccctacacttccatctgatcgccgactcaatcgctgagcagatcctcgctacgctgtttcagacctggatggtccccgccgtcagagtcgatttttataacgcagatgaactcaagagcgaagtgagttggatcccgaataaacattattccggaatatacggccttatgaagctagtcctgactaagacactccctgcaaaccttgagcgggtcattgtactggacacagatatcacgtttgccaccgatattgcagagctgtgggccgtgttccacaaattcaaaggtcagcaggtgctgggtcttgtggagaatcagagcgactggtacctggggaacctgtggaaaaaccacaggccatggcctgcactcggccgtgggtataacaccggtgtcatcctgctgctgctggataagctgaggaaaatgaagtgggaacagatgtggcgtctgaccgccgagagagaactgatgggaatgctgtccactagtctggccgatcaggatattttcaatgccgtcatcaagcaaaacccttttctggtataccagctaccttgtttctggaacgtgcaactgtcagaccatacccgtagtgagcagtgttaccgcgacgtctccgatctcaaggtcatacattggaattctcccaaaaaacttagagttaagaataaacacgttgaattcttccggaacctgtatttaacattcctggaatatgatggcaacctgttaagacgggaactgttcggctgtccctctgaggccgacgtgaacagtgaaaacctgcagaaacagctttccgagctcgatgaggatgatttgtgttatgaattccggagggagaggttcaccgtgcacaggacgcatctgtatttcctccattatgagtacgaacccgcagcagacagtacagacgtgacattggtggcgcaactcagcatggatcgactgcagatgctggaggccatctgtaaacattgggagggtcccattagtctcgctctttatttaagtgatgccgaggcgcagcagtttctgcgttacgcacaagggtccgaagtgcttatgtccagacataacgtgggataccatatcgtgtacaaggagggccaattttaccccgtcaatctgctgagaaatgtggctatgaagcacatttccaccccctacatgttcctgtctgatatagatttcttaccgatgtatgggctctatgagtatttgagaaagagcgtaatacaactcgatctggccaacactaaaaaagccatgatcgtccctgcattcgaaaccctgcggtaccggctgtcatttccaaagtcaaaggctgagctgcttagcatgctggacatgggcaccttattcaccttcaggtatcatgtttggacaaaaggtcacgcgcctaccaatttcgcaaaatggcgtactgccacaacaccctacagagtggagtgggaggcggatttcgagccatacgtggttgtgaggagagactgtccagagtacgataggaggtttgtaggatttggatggaataaagttgcccacattatggagctcgatgtccaagaatatgaatttattgtgttgcctaatgcttacatgattcatatgccccacgcgccatctttcgacatcactaaatttagaagtaacaagcagtacaggatatgtcttaaaaccctaaaggaggagttccagcaggacatgtcacggagatatggatttgctgctctgaaatatctaacagccgaaaataacagctag

SEQ ID NO: 277674 - DNA, 2115 bp, Artificial Sequence
  derived and/or modified sequence
atgctgggcatctgccggggccggcggaagttcctggccgccagcctctccttgctgtgtatccccgctattacttggatctatcttttctctgggtctttcgaggatgggaaaccggtaagcctctctcctctggagtctcaggcccatagtcctcggtacacggcttcttcccagagagaacgtgagtcattggaggtcaggatgcgcgaggtcgaggaggagaaccgcgcgctcaggcgacagctgtcacttgcccagggacgggcccctagccaccgcagggggaatcacagcaagacctattctatggaagagggtacgggcgacagcgagaacttgcgagccggcatcgttgctggaaattccagtgaatgcggccaacagcccgtcgtggaaaaatgtgagacaattcacgtggcaattgtatgtgcagggtataacgctagccgcgatgtggtgactttagtaaaaagtgtactattccatcggcggaacccgctccattttcacctcatcgcagattctattgctgaacagatactcgcaactttgtttcagacatggatggtgcctgccgtgcgcgtggacttctataatgcagacgagctaaaatccgaggtatcctggatacccaataagcactacagtgggatttatggactcatgaagctcgtattaactaagacgctccccgccaatttggagcgagttatcgtactagatactgacatcactttcgccacagacatcgcggaactgtgggctgtcttccacaagtttaaggggcagcaggtcctggggctcgtcgagaatcaatcagactggtatctaggcaacctgtggaagaatcaccgaccttggccagctctcggtcgtggatataacaccggcgtgattttgctcctcctggataagctgagaaaaatgaagtgggaacagatgtggagactcacagctgaaagggaacttatgggcatgcttagcaccagcctcgctgatcaggatatcttcaacgccgtgatcaagcagaacccatttctggtgtaccagttaccgtgcttctggaacgttcagctcagtgatcacaccaggagtgagcagtgctacagagatgtgagcgacttgaagttacagaagcagctgtctgagctggatgaagatgatttatgttatgagttccgacgggagagattcaccgtgcaccgtacccatctctacttcctccactacgagtatgagccagctgcagattcgacagacgtgaccctggtggcccagcttagtatggaccgactgcagatgctggaagcgatatgcaagcactgggagggacccataagtctggctctctaccttagcgacgcggaggcccagcagtttctgcggtatgcccagggctccgaggttctgatgtcgaggcacaacgttgggtatcatatagtgtataaggagggtcaattctacccggtcaacctgctgcgcaatgtggcaatgaaacacatcagtacgccttacatgtttttgagcgatattgattttctcccgatgtatggcctgtatgaatacctgcgaaagagcgtgatccaacttgacctggcaaatactaaaaaggctatgattgtcccggcctttgagacactgcgatatcggctgagtttcccaaagagtaaagccgagctgctgtctatgctcgatatgggaactctatttacattccgctatcacgtttggactaaaggacacgctcccactaacttcgcaaagtggagaactgcgaccacgccttaccgggtcgagtgggaggctgatttcgagccctacgttgttgtacggcgcgattgtccggagtatgacaggaggttcgtgggatttggctggaacaaggtggcgcacataatggagctcgacgtccaagagtacgaatttatcgtgctccccaacgcctacatgatccatatgccccacgcccccagtttcgatattacgaaatttcgcagcaacaagcaataccgaatctgcctaaagactctgaaggaggaattccagcaggatatgtcaagacgctatggtttcgccgccctgaagtatctaacagccgagaataattcttag

SEQ ID NO: 277675 - DNA, 2124 bp, Artificial Sequence
  derived and/or modified sequence
atgctgggcatctgccggggccggcggaagttcctggccgccagcctctctctcttgtgcataccggccataacttggatatacctcttctccgggagcttcgaggatggtaagcctgtttccttatcaccactcgaaagtcaggctcatagccctaggtacacagctagtagtcaacgggagcgcgagtcacttgaggttaggatgagggaggtcgaggaggaaaatcgcgcactccgcaggcaactgagcctggcgcaggggagggctccaagtcatcggaggggaaaccatagcaagacttactcaatggaggagggcaccggtgactccgaaaatttaagagccggaatagttgccggcaactcctctgaatgtgggcaacaacctgttgtcgaaaaatgtgagaccatccacgtggccatcgtttgcgctggatacaacgcgagcagagacgtcgtgactcttgtgaaatcagtgctgtttcatagaaggaacccactccacttccatctaatcgctgactcaattgcggagcaaatcctcgctacactctttcaaacatggatggtgcctgccgtgcgagttgatttttacaatgccgacgagctcaagtctgaagttagttggattccgaataagcattactctgggatctacggcctcatgaagctcgtgctgacaaagacactgccagctaacctggaaagggttatcgttctggatactgacattactttcgctacagacatcgcggaactgtgggcagtgttccataagtttaaaggtcagcaggtgctgggtcttgtcgagaaccagagtgattggtacctcggaaacttatggaaaaatcatagaccatggccagcattaggcaggggctacaatactggggtgatcctgttgctgttggacaagctcagaaagatgaagtgggagcagatgtggcggttgacggccgagcgggagcttatgggtatgctctccacgtcattagccgatcaggatatattcaatgcggtgataaagcagaatccattcctagtttaccagctgccctgcttttggaatgtgcagctgtccgatcacactaggagcgagcagtgttatagagacgtcagtgatttaaaggtgatacactggaattcccctaaaaaactgcgcgtgaagaataaacatgtagagttctttcgtaatttatatctgacattcctggaatatgatggtaatctcttaagaagggaactgtttggctgcccctccgaagctgatgtaaattcagaaaacctgcagaaacagctgtcagagcttgacgaggacgatctttgttacgaatttcgccgcgagaggtttaccgttcaccgcactcacttgtatttcttgcactacgagtacgagcccgcggccgatagcacagatgtcacccttgtcgctcaactgagcatggacagacttcagatgctcgaagccatttgcaaacattgggaagggcccatatccttggctctctatctgtccgatgcggaagcacagcagttcctgcggtatgcacaagggagtgaggtgctcatgtcgaggcataacgtcggctatcatattgtgtataaagagggtcaattttatccggtcaatctgctacggaacgtggcaatgaaacatataagcactccatacatgttcttgagtgacatagacttccttcctatgtacggcttgtacgaatacctgcggtaccatgtctggactaagggtcacgcgcccaccaacttcgccaaatggaggaccgctactacaccgtacagggtagaatgggaggcagatttcgagccctacgtcgtcgttcgacgggactgccccgagtatgaccggagatttgtggggtttggatggaacaaggtggctcatattatggaactcgatgtgcaggagtacgaatttatagtgttgcccaacgcttacatgatccatatgccccacgctccatcttttgacatcaccaagtttcggtccaataaacagtatagaatctgcctcaaaaccttaaaggaagagttccaacaggatatgtcacgacgctacgggtttgcggccctgaaatatctcaccgctgagaataacagctag

SEQ ID NO: 277676 - DNA, 2115 bp, Artificial Sequence
  derived and/or modified sequence
atgttggggatctgtcgaggcagaagaaaattcttggccgctagcctgtccctcctttgcattcccgcaatcacgtggatctacctgtttagcggctccttcgaggatggcaagcctgtgtctctgtcgccacttgaatctcaagcccacagcccaagatatactgcaagtagccagcgcgagcgcgaatcccttgaggtgagaatgagagaagtggaagaggagaatagggccctaaggagacagcttagtctggcccagggacgggctccgtctcaccggagggggaaccactcgaaaacatattctatggaggagggaaccggcgatagtgagaacctgagagcaggcattgtcgcaggcaatagctctgaatgtggccagcagcctgtggtggaaaaatgcgaaacaatccacgtcgcaatcgtatgcgccggatataacgctagccgggatgtcgtcactctggttaagtcagtgttgtttcaccggcgtaacccactccacttccacctaatcgccgactctattgccgaacaaatcctcgcaactctttttcagacctggatggtacctgctgtcagggttgacttttacaatgccgatgaattgaaatctgaagtgagctggattccaaacaaacactacagtggtatctacggattaatgaaactagttctgacgaagacacttccggctaacctcgagcgcgtgattgttctcgacacagatatcactttcgctactgacatcgcagagctgtgggctgtcttccacaagtttaaaggccaacaggtcctgggcctcgtcgaaaaccagtccgactggtatctggggaatctgtggaagaaccacagaccatggccagcactgggtagggggtacaacacaggcgtcatactattattgctcgacaagctcaggaaaatgaagtgggaacaaatgtggaggcttacagccgagagagagctgatggggatgctgtccacctccctcgcggaccaagacatcttcaatgccgtgattaagcagaatcctttcctcgtctaccagctgccctgcttctggaacgttcagttgagcgatcacacgcgctcagaacagtgctaccgcgatgtttctgatctgaagctgcaaaagcaactaagcgaactggatgaggacgacctctgctatgagtttcggagggagcgattcaccgttcaccggacccacctgtacttcctccactatgaatacgagcctgcagctgactccacagacgtgaccctggtggcccaattaagtatggaccgattgcagatgcttgaagcaatctgcaagcactgggaaggtcccatctccttggccttgtacctgtcagacgccgaagcgcaacagttcttgcgttacgcccagggttccgaggtgctgatgagtagacacaacgtaggttatcatattgtctacaaagagggtcagttctaccctgtgaacctcctgcggaatgtagctatgaagcatatctccaccccttatatgtttttgagcgatatcgatttcctgcccatgtatgggctgtacgagtatctcagaaagtcagtgattcagctggacctcgccaatactaagaaggctatgattgttcctgcgttcgagaccctgcggtatcggttgtcgttccccaaaagcaaagccgagctgctgagtatgttggatatgggcacactgtttacgtttcgataccatgtgtggaccaaggggcacgcaccaacaaatttcgccaagtggcgcactgccaccaccccataccgcgtggagtgggaggcagatttcgaaccatatgtggtggtgaggcgcgattgtccagagtacgatcgccgttttgtgggtttcggttggaataaggttgcccacatcatggagttggatgtccaagagtacgagttcattgtactccctaacgcatatatgatccacatgccgcacgctcccagcttcgacatcactaagtttcggagcaataaacaatatagaatctgcctgaaaacacttaaagaagaattccagcaggatatgtcccgacgatatggatttgcagcactcaagtaccttacggcagaaaacaactcgtag

SEQ ID NO: 277677 - DNA, 2271 bp, Artificial Sequence
  derived and/or modified sequence
atgctggggatttgccgaggccgtcgtaagttcctggctgctagcctttcactgctttgcattcccgctattacatggatatacttgttcagcggctccttcgaggacggaaaacctgtatctttgtccccacttgaatcccaggcacacagccctaggtacaccgcctcaagtcagagggaaagggaatccctcgaggttcggatgcgagaggtcgaagaggagaatcgcgctttaaggagacagttgagcctggcccagggtcgagctccctcacaccgcagaggcaaccattcaaagacttattccatggaggagggtacaggagatagcgaaaatctgcgtgcaggaatcgtggccggaaatagttctgagtgcggtcaacaacctgtagtggaaaaatgtgaaaccatacacgttgcaattgtgtgcgcgggatacaacgcttccagagacgtggtcacactagtgaaaagtgtgttgtttcatcgcagaaacccgctgcacttccacctgattgctgatagtatcgccgaacagattcttgcaacgcttttccagacctggatggtcccagctgtcagagtcgacttttataacgcggacgaactgaagtccgaagtcagctggattcctaataagcattactccggtatctacggtctcatgaaactggtgctaactaaaactctgccggcaaacttagagcgtgtcatcgtccttgatacagatattactttcgctacggacatcgcagaattatgggccgttttccataagtttaaaggccaacaggttcttggcttggtcgaaaatcagtccgactggtacctcggaaatctgtggaagaatcacagaccttggccagccctcggcaggggctacaacacgggcgttatcctgctactgttagataagctgcggaaaatgaagtgggaacagatgtggaggctgaccgctgaacgcgagctcatgggtatgctttcgacctccctggcagaccaggatatcttcaacgctgtcattaagcagaaccccttcttggtgtaccagctgccatgtttttggaacgtgcagctcagcgaccacacgagatctgaacagtgttatagggatgtgtccgacctcaaagtcatccactggaattcacctaagaagctgcgggtcaaaaacaagcacgtggagttctttaggaatctgtatctgacatttctagaatacgacgggaatctgcttcgacgcgaactcttcggatgccctagtgaggccgacgtgaactcggaaaacctgcaaaaacagctgagtgaactggacgaggatgatctctgctacgaatttcgccgtgagaggtttacagttcacagaactcatctgtacttcctgcattatgaatatgagcctgccgcagacagcacggacgttacactggttgcccaactctctatggataggcttcagatgctggaagctatctgcaagcactgggagggccctatttctttagctctttacttatctgatgctgaagcccagcagttcctgagatacgcacagggatcagaggtcctcatgtcccggcacaatgtaggttatcacattgtttataaggagggtcagttttatcccgtaaacctccttagaaacgtagcgatgaaacacatttccacgccttatatgtttctgagcgatattgacttcctccccatgtacggtttatatgaatacttgagaaaatcagtcatccagctcgacctggccaataccaagaaagctatgattgttccagcatttgaaaccctgaggtatcggttgagctttcctaagagcaaagccgagcttctgagcatgctggacatgggcactctcttcacattccgctaccacgtgtggaccaagggacatgcgcctaccaattttgccaagtggcgaacagcaacaactccctatagagttgaatgggaagctgacttcgagccgtatgtcgttgtgcgcagggattgtccagagtatgaccgacgctttgtcggtttcggctggaataaggttgcccatatcatggagctggatgtccaggaatacgagttcatagtgctacccaacgcctatatgattcacatgccacacgctccttcttttgatatcaccaaattccggtcaaacaagcaataccgaatttgcctcaagaccctgaaagaagaatttcaacaggatatgagtagacggtacggctttgccgctctgaaatacctgacagctgaaaataacagctag

SEQ ID NO: 277678 - DNA, 2271 bp, Artificial Sequence
  derived and/or modified sequence
atgttgggcatatgccgcggacgccgaaagtttcttgccgcttcactgagcttactgtgcatccccgctataacctggatttacctgttcagtggatcatttgaagacggcaagccagtctcccttagtccactcgaatctcaggcacactcccctagatataccgccagtagtcagcgggagcgtgagtctcttgaggtccggatgagagaagtagaagaagaaaaccgggctctgaggcggcagttgagcctggctcagggcagggcaccctcccatcggaggggcaaccacagcaagacctactccatggaagaaggcaccggcgactccgagaatctcagggcaggcatcgtggccggaaatagctcagaatgcgggcagcagccagtcgttgaaaaatgtgagacgattcacgtggccatcgtatgtgccggttacaatgcctctcgagacgtcgttacgttggtgaaatctgtcctgtttcacagacgcaatccgttgcactttcatctgatagctgacagcattgccgaacagattctcgccacattattccagacatggatggtgccggctgtgcgcgttgacttttacaacgctgatgagctgaaatctgaggttagctggatcccgaacaaacattacagtggcatctacgggctgatgaagctggtgctgactaaaacactgcccgcaaatttagaacgagtcatcgtgctcgacaccgacattacattcgctacagacattgcggagctgtgggctgtcttccacaagtttaaaggccagcaggtgctgggcttagtggaaaaccagtctgattggtacctcggaaacctgtggaaaaaccaccgtccttggcctgccctcgggcgtgggtataacacaggagttatcctgcttctactcgacaaattgaggaagatgaagtgggagcaaatgtggcgcctcactgctgagcgggagcttatgggcatgctgtccactagtctggcagaccaggatattttcaatgccgtcattaaacagaatcctttcctcgtgtatcagctcccgtgtttctggaacgtccagctcagtgaccatacacgttctgaacaatgttacagggatgtttcagatttgaaagtgatccactggaatagcccaaagaaactccgtgtcaaaaacaaacacgttgagttcttccgaaatctgtatctgactttcctggagtatgacggcaacttactaagaagggaactgttcggttgtccgtcggaggccgacgttaactccgaaaaccttcagaaacagctgtccgaactcgatgaggacgacttgtgctacgaatttcgccgtgagcggttcactgtgcatcgaactcatttgtactttctacactacgagtacgagccagccgctgattcgactgacgtgacgctggttgcgcagctgtcgatggacaggcttcagatgctcgaagccatctgtaagcactgggaggggcctattagtctagcactctatctctcagatgctgaagcccagcagttccttcggtacgcccagggatccgaagtgttgatgagtagacacaacgtgggctaccacatcgtctacaaggaggggcaattctatccggtcaacctccttcgaaatgtggctatgaagcatattagcactccctacatgtttctctctgatattgacttcctgcccatgtatggcctgtacgaatatctccgcaaaagcgtcatccagctggacttggctaacacaaaaaaggccatgatcgttcctgctttcgagacacttagatatcgcctgagtttcccaaagagtaaggctgagctgctctcgatgcttgatatggggaccctctttactttccgctatcatgtctggaccaaaggccacgcacccaccaacttcgcgaaatggcgaactgccacaacaccatatcgggtcgagtgggaagccgactttgagccgtatgttgtggtgcgacgcgattgtcctgaatatgatcgtaggttcgtcggctttggctggaacaaagtggcccatataatggagcttgatgttcaggagtatgagtttatcgtcctgccaaacgcctatatgatccatatgccccacgctccttccttcgatatcaccaaatttagatctaacaagcagtaccgcatctgcctgaagaccctcaaagaagaattccagcaggatatgtcgagaagatacggcttcgctgccttaaagtatctgactgccgaaaacaacagctag

SEQ ID NO: 277679 - DNA, 2115 bp, Artificial Sequence
  derived and/or modified sequence
atgctgggaatctgtcggggaaggcgaaagttcctggcagcatctctgagccttctctgtattcccgctatcacgtggatctatctgtttagtggttcctttgaagatgggaaacctgttagcctttccccgctggagtctcaagcacattcacctcgctacaccgcctcctcacagcgtgagcgggaaagcctggaggtgcgcatgcgggaggtggaggaggaaaaccgcgcattgcgcaggcaactatccctggcacagggtagggcgccaagccaccgcagaggcaaccactccaaaacatatagcatggaggaaggtacaggggactcggagaacttgagggctggtatagtggctggcaatagttcggagtgcggtcagcaaccagttgtggagaagtgcgagaccattcacgtggccattgtgtgcgcaggctataacgcttctcgagatgtcgtgaccctggtaaagagcgttctcttccaccggaggaatcctctgcattttcacctgatcgccgattctattgcggagcaaatcctggctaccttattccagacatggatggtccctgcagtaagggttgacttctataatgctgacgagctcaagtccgaggtctcttggatcccgaataagcactacagtggtatctatggcttgatgaaattggttctcacaaagactttacccgctaatctagagcgcgtaatcgtcctggacacagacatcaccttcgcaacagacattgccgagttatgggccgttttccataagttcaagggccagcaggttctcggtctcgttgaaaaccagtctgactggtaccttggaaacctgtggaaaaatcacaggccttggcccgcactgggccgaggctacaatacgggcgtgatcctcctccttctggacaagctgcgtaaaatgaagtgggagcagatgtggagactcaccgcagaacgtgaattgatgggaatgctcagtactagtcttgccgatcaggacatatttaatgccgtcattaagcagaacccttttttggtttatcagctgccttgcttctggaatgttcagcttagcgaccacacaagatcagagcaatgctacagggatgtgtctgatctgaaactacagaaacaattaagcgagctggatgaggatgacctttgctatgaatttagaagagagcgtttcactgtgcatcggactcatctctacttcttgcattatgagtatgaacccgcagccgattcgactgatgtgaccctggttgcccagctgagcatggatagactccagatgctggaggctatttgcaaacattgggagggccctatctcactagctctctatctgtccgacgccgaggctcagcagttcctgcgttacgctcaaggttctgaggtgctgatgtcgaggcacaacgtcggatatcacatcgtttacaaggagggtcagttttacccagtgaacctgttgaggaatgtggcgatgaaacatattagcactccatatatgtttctgtctgatatcgattttcttcccatgtatggtctgtatgaatatttgaggaagtcggtgatccagttggaccttgccaatacaaagaaggcaatgatcgtacctgcctttgagacgcttagatataggctgagttttccgaagtcaaaagcagaattactaagtatgttggatatggggactctgtttaccttcaggtaccacgtgtggacgaagggccatgcccctacaaatttcgctaagtggcgcaccgctacaacaccctatcgtgtagagtgggaagctgactttgagccttatgtcgtggtacggagggattgccccgagtacgaccggcgttttgtgggctttggatggaacaaagttgctcacatcatggaattagatgtgcaggaatatgagttcattgttctcccaaatgcctacatgatccacatgccccatgcgccttcctttgacatcaccaaattccgctcaaacaagcagtatcgtatatgcttgaaaaccctgaaggaggagtttcaacaggacatgagcagaaggtacggatttgctgctctgaaatatctgaccgccgagaataacagctag

SEQ ID NO: 277680 - DNA, 2124 bp, Artificial Sequence
  derived and/or modified sequence
atgctcggcatctgccggggtcggagaaagttcttggcagcttctctctctctgctgtgcataccggctatcacttggatctatctgttctctggctcctttgaggatgggaagccggtgtccctctcacccctggaatctcaggctcatagccccaggtatacagcttcatcacagagggagcgagagagcctggaggtccggatgcgggaggtagaagaggagaacagggctcttagaaggcagctttccctcgcacagggtcgggcaccctctcaccgtaggggcaatcactccaagacgtacagcatggaggagggaactggagacagcgaaaatctgcgcgcaggtatcgtggcgggaaattcctcagaatgtggccagcaacccgttgtcgagaagtgcgagactattcacgtggctatcgtctgcgctggatataatgcgagccgtgatgtggtgaccctcgtgaaatcagtgttatttcatcggagaaaccctctgcacttccaccttatcgccgatagcattgccgagcagatcctagccactttatttcagacctggatggtacctgccgtccgggtcgatttctacaatgccgacgaactgaaatcagaggtgtcatggatacctaacaaacactattctggtatctatggcctaatgaaactggttctgacaaaaacactgccagccaacttagagagagttattgtgctagatacagatatcacattcgcaacagatatagccgagctgtgggccgttttccacaagtttaagggtcagcaggtcctagggctcgttgaaaatcagagcgattggtatttgggaaacttatggaagaaccatcggccttggcccgctttgggtcgagggtacaacaccggtgtcattttacttctcttagacaaattgcggaaaatgaaatgggagcagatgtggcgcctgaccgccgagagggagctgatggggatgttgagcaccagtctggcagatcaggacatattcaatgccgttatcaagcaaaacccgttcctcgtttaccaactgccctgtttttggaatgtccagttgtcagaccatacacgctctgagcagtgctatcgcgacgtcagcgatcttaaggtcattcactggaattctcccaaaaaactgagagtaaagaacaaacacgtcgagttttttcggaatctttacctcacattcctagaatacgatgggaatctgctgagacgtgagctctttggttgtcctagcgaagctgatgttaattctgagaatttacagaagcagctgtccgagctggacgaagacgatttgtgctacgagttcaggagggagaggttcacagtgcatcggacacatctctattttcttcattacgagtatgagccagccgctgacagcaccgacgtgacactggttgcgcaactatccatggaccgcctccaaatgctagaggccatttgcaagcactgggaaggacccattagcctggctttatacctctcggatgcagaagcgcagcagttccttcgctatgcgcaaggtagcgaagtgctcatgagcaggcacaatgttgggtatcatatcgtttataaggagggacagttttatcctgtgaatttactcaggaatgttgcgatgaagcacataagtaccccctatatgttcctgtcggatatcgattttttacctatgtatgggctctatgagtatctgaggtaccacgtgtggactaaggggcacgcacccacaaattttgctaagtggcggacggctacaacaccctaccgcgtggaatgggaggcagatttcgaaccctacgtggtggtacgtagggattgccccgaatatgatcggagatttgtggggtttggatggaataaggtggctcacataatggaactggacgtccaggagtacgaattcattgtgctcccaaacgcctatatgattcacatgcctcatgccccatccttcgacatcaccaagtttcgcagcaacaaacagtatcggatatgtctcaagactctgaaagaggaattccaacaggatatgtcccgcaggtatggcttcgctgcactcaagtatcttacggctgagaataacagctag

SEQ ID NO: 277681 - DNA, 2115 bp, Artificial Sequence
  derived and/or modified sequence
atgctgggcatctgcagaggcagaagaaagttcctggccgccagcctgagcctgctgtgcatccccgccatcacctggatctacctgttcagcggcagcttcgaggacggcaagcccgtgagcctgagccccctggagagccaggcccacagccccagatacaccgccagcagccagagagagagagagagcctggaggtgagaatgagagaggtggaggaggagaacagagccctgagaagacagctgagcctggcccagggcagagcccccagccacagaagaggcaaccacagcaagacctacagcatggaggagggcaccggcgacagcgagaacctgagagccggcatcgtggccggcaacagcagcgagtgcggccagcagcccgtggtggagaagtgcgagaccatccacgtggccatcgtgtgcgccggctacaacgccagcagagacgtggtgaccctggtgaagagcgtgctgttccacagaagaaaccccctgcacttccacctgatcgccgacagcatcgccgagcagatcctggccaccctgttccagacctggatggtgcccgccgtgagagtggacttctacaacgccgacgagctgaagagcgaggtgagctggatccccaacaagcactacagcggcatctacggcctgatgaagctggtgctgaccaagaccctgcccgccaacctggagagagtgatcgtgctggacaccgacatcaccttcgccaccgacatcgccgagctgtgggccgtgttccacaagttcaagggccagcaggtgctgggcctggtggagaaccagagcgactggtacctgggcaacctgtggaagaaccacagaccctggcccgccctgggcagaggctacaacaccggcgtgatcctgctgctgctggacaagctgagaaagatgaagtgggagcagatgtggagactgaccgccgagagagagctgatgggcatgctgagcaccagcctggccgaccaggacatcttcaacgccgtgatcaagcagaaccccttcctggtgtaccagctgccctgcttctggaacgtgcagctgagcgaccacaccagaagcgagcagtgctacagagacgtgagcgacctgaagctgcagaagcagctgagcgagctggacgaggacgacctgtgctacgagttcagaagagagagattcaccgtgcacagaacccacctgtacttcctgcactacgagtacgagcccgccgccgacagcaccgacgtgaccctggtggcccagctgagcatggacagactgcagatgctggaggccatctgcaagcactgggagggccccatcagcctggccctgtacctgagcgacgccgaggcccagcagttcctgagatacgcccagggcagcgaggtgctgatgagcagacacaacgtgggctaccacatcgtgtacaaggagggccagttctaccccgtgaacctgctgagaaacgtggccatgaagcacatcagcaccccctacatgttcctgagcgacatcgacttcctgcccatgtacggcctgtacgagtacctgagaaagagcgtgatccagctggacctggccaacaccaagaaggccatgatcgtgcccgccttcgagaccctgagatacagactgagcttccccaagagcaaggccgagctgctgagcatgctggacatgggcaccctgttcaccttcagataccacgtgtggaccaagggccacgcccccaccaacttcgccaagtggagaaccgccaccaccccctacagagtggagtgggaggccgacttcgagccctacgtggtggtgagaagagactgccccgagtacgacagaagattcgtgggcttcggctggaacaaggtggcccacatcatggagctggacgtgcaggagtacgagttcatcgtgctgcccaacgcctacatgatccacatgccccacgcccccagcttcgacatcaccaagttcagaagcaacaagcagtacagaatctgcctgaagaccctgaaggaggagttccagcaggacatgagcagaagatacggcttcgccgccctgaagtacctgaccgccgagaacaacagctag

SEQ ID NO: 277682 - DNA, 2271 bp, Artificial Sequence
  derived and/or modified sequence
atgctgggcatctgcagaggcagaagaaagttcctggccgccagcctgagcctgctgtgcatccccgccatcacctggatctacctgttcagcggcagcttcgaggacggcaagcccgtgagcctgagccccctggagagccaggcccacagccccagatacaccgccagcagccagagagagagagagagcctggaggtgagaatgagagaggtggaggaggagaacagagccctgagaagacagctgagcctggcccagggcagagcccccagccacagaagaggcaaccacagcaagacctacagcatggaggagggcaccggcgacagcgagaacctgagagccggcatcgtggccggcaacagcagcgagtgcggccagcagcccgtggtggagaagtgcgagaccatccacgtggccatcgtgtgcgccggctacaacgccagcagagacgtggtgaccctggtgaagagcgtgctgttccacagaagaaaccccctgcacttccacctgatcgccgacagcatcgccgagcagatcctggccaccctgttccagacctggatggtgcccgccgtgagagtggacttctacaacgccgacgagctgaagagcgaggtgagctggatccccaacaagcactacagcggcatctacggcctgatgaagctggtgctgaccaagaccctgcccgccaacctggagagagtgatcgtgctggacaccgacatcaccttcgccaccgacatcgccgagctgtgggccgtgttccacaagttcaagggccagcaggtgctgggcctggtggagaaccagagcgactggtacctgggcaacctgtggaagaaccacagaccctggcccgccctgggcagaggctacaacaccggcgtgatcctgctgctgctggacaagctgagaaagatgaagtgggagcagatgtggagactgaccgccgagagagagctgatgggcatgctgagcaccagcctggccgaccaggacatcttcaacgccgtgatcaagcagaaccccttcctggtgtaccagctgccctgcttctggaacgtgcagctgagcgaccacaccagaagcgagcagtgctacagagacgtgagcgacctgaaggtgatccactggaacagccccaagaagctgagagtgaagaacaagcacgtggagttcttcagaaacctgtacctgaccttcctggagtacgacggcaacctgctgagaagagagctgttcggctgccccagcgaggccgacgtgaacagcgagaacctgcagaagcagctgagcgagctggacgaggacgacctgtgctacgagttcagaagagagagattcaccgtgcacagaacccacctgtacttcctgcactacgagtacgagcccgccgccgacagcaccgacgtgaccctggtggcccagctgagcatggacagactgcagatgctggaggccatctgcaagcactgggagggccccatcagcctggccctgtacctgagcgacgccgaggcccagcagttcctgagatacgcccagggcagcgaggtgctgatgagcagacacaacgtgggctaccacatcgtgtacaaggagggccagttctaccccgtgaacctgctgagaaacgtggccatgaagcacatcagcaccccctacatgttcctgagcgacatcgacttcctgcccatgtacggcctgtacgagtacctgagaaagagcgtgatccagctggacctggccaacaccaagaaggccatgatcgtgcccgccttcgagaccctgagatacagactgagcttccccaagagcaaggccgagctgctgagcatgctggacatgggcaccctgttcaccttcagataccacgtgtggaccaagggccacgcccccaccaacttcgccaagtggagaaccgccaccaccccctacagagtggagtgggaggccgacttcgagccctacgtggtggtgagaagagactgccccgagtacgacagaagattcgtgggcttcggctggaacaaggtggcccacatcatggagctggacgtgcaggagtacgagttcatcgtgctgcccaacgcctacatgatccacatgccccacgcccccagcttcgacatcaccaagttcagaagcaacaagcagtacagaatctgcctgaagaccctgaaggaggagttccagcaggacatgagcagaagatacggcttcgccgccctgaagtacctgaccgccgagaacaacagctag

SEQ ID NO: 277683 - DNA, 2124 bp, Artificial Sequence
  derived and/or modified sequence
atgctgggcatctgcagaggcagaagaaagttcctggccgccagcctgagcctgctgtgcatccccgccatcacctggatctacctgttcagcggcagcttcgaggacggcaagcccgtgagcctgagccccctggagagccaggcccacagccccagatacaccgccagcagccagagagagagagagagcctggaggtgagaatgagagaggtggaggaggagaacagagccctgagaagacagctgagcctggcccagggcagagcccccagccacagaagaggcaaccacagcaagacctacagcatggaggagggcaccggcgacagcgagaacctgagagccggcatcgtggccggcaacagcagcgagtgcggccagcagcccgtggtggagaagtgcgagaccatccacgtggccatcgtgtgcgccggctacaacgccagcagagacgtggtgaccctggtgaagagcgtgctgttccacagaagaaaccccctgcacttccacctgatcgccgacagcatcgccgagcagatcctggccaccctgttccagacctggatggtgcccgccgtgagagtggacttctacaacgccgacgagctgaagagcgaggtgagctggatccccaacaagcactacagcggcatctacggcctgatgaagctggtgctgaccaagaccctgcccgccaacctggagagagtgatcgtgctggacaccgacatcaccttcgccaccgacatcgccgagctgtgggccgtgttccacaagttcaagggccagcaggtgctgggcctggtggagaaccagagcgactggtacctgggcaacctgtggaagaaccacagaccctggcccgccctgggcagaggctacaacaccggcgtgatcctgctgctgctggacaagctgagaaagatgaagtgggagcagatgtggagactgaccgccgagagagagctgatgggcatgctgagcaccagcctggccgaccaggacatcttcaacgccgtgatcaagcagaaccccttcctggtgtaccagctgccctgcttctggaacgtgcagctgagcgaccacaccagaagcgagcagtgctacagagacgtgagcgacctgaaggtgatccactggaacagccccaagaagctgagagtgaagaacaagcacgtggagttcttcagaaacctgtacctgaccttcctggagtacgacggcaacctgctgagaagagagctgttcggctgccccagcgaggccgacgtgaacagcgagaacctgcagaagcagctgagcgagctggacgaggacgacctgtgctacgagttcagaagagagagattcaccgtgcacagaacccacctgtacttcctgcactacgagtacgagcccgccgccgacagcaccgacgtgaccctggtggcccagctgagcatggacagactgcagatgctggaggccatctgcaagcactgggagggccccatcagcctggccctgtacctgagcgacgccgaggcccagcagttcctgagatacgcccagggcagcgaggtgctgatgagcagacacaacgtgggctaccacatcgtgtacaaggagggccagttctaccccgtgaacctgctgagaaacgtggccatgaagcacatcagcaccccctacatgttcctgagcgacatcgacttcctgcccatgtacggcctgtacgagtacctgagataccacgtgtggaccaagggccacgcccccaccaacttcgccaagtggagaaccgccaccaccccctacagagtggagtgggaggccgacttcgagccctacgtggtggtgagaagagactgccccgagtacgacagaagattcgtgggcttcggctggaacaaggtggcccacatcatggagctggacgtgcaggagtacgagttcatcgtgctgcccaacgcctacatgatccacatgccccacgcccccagcttcgacatcaccaagttcagaagcaacaagcagtacagaatctgcctgaagaccctgaaggaggagttccagcaggacatgagcagaagatacggcttcgccgccctgaagtacctgaccgccgagaacaacagctag

SEQ ID NO: 277684 - protein, 898 aa, Artificial Sequence
  derived and/or modified sequence
MAAGTWAAAAAAAAADYFVLVAFGPHPRGSGEGQGQILQRFPEKDWEDNPFPQGIELFCQPSGWQLCPERNPPTFFVAVLTDINSERHYCACLTFWEPAEPSQQETTRVEDATEREEEGDEGGQTHLSPTAPAPSAQLFAPKTLVLVSRLDHTEVFRNSLGLIYAIHVEGLNVCLENVIGNLLTCTVPLAGGSQRTISLGAGDRQVIQTPLADSLPVSRCSVALLFRQLGITNVLSLFCAALTEHKVLFLSRSYQRLADACRGLLALLFPLRYSFTYVPILPAQLLEVLSTPTPFIIGVNAAFQAETQELLDVIVADLDGGTVTIPECVHIPPLPEPLQSQTHSVLSMVLDPELELADLAFPPPTTSTSSLKMQDKELRAVFLRLFAQLLQGYRWCLHVVRIHPEPVIRFHKAAFLGQRGLVEDDFLMKVLEGMAFAGFVSERGVPYRPTDLFDELVAHEVARMRADENHPQRVLRHVQELAEQLYKNENPYPAVAMHKVQRPGESSHLRRVPRPFPRLDEGTVQWIVDQAAAKMQGAPPAVKAERRTTVPSGPPMTAILERCSGLHVNSARRLEVVRNCISYVFEGKMLEAKKLLPAVLRALKGRAARRCLAQELHLHVQQNRAVLDHQQFDFVVRMMNCCLQDCTSLDEHGIAAALLPLVTAFCRKLSPGVTQFAYSCVQEHVVWSTPQFWEAMFYGDVQTHIRALYLEPTEDLAPAQEVGEAPSQEDERSALDVASEQRRLWPTLSREKQQELVQKEESTVFSQAIHYANRMSYLLLPLDSSKSRLLRERAGLGDLESASNSLVTNSMAGSVAESYDTESGFEDAETCDVAGAVVRFINRFVDKVCTESGVTSDHLKGLHVMVPDIVQMHIETLEAVQRESRRLPPIQKPKLLRP

SEQ ID NO: 277685 - DNA, 2697 bp, Artificial Sequence
  derived and/or modified sequence
atggccgccggaacttgggctgcagccgctgcagctgcagctgccgactatttcgtcctggtggcctttgggccgcatccccgagggtccggtgagggacaaggacaaatcctgcagcgttttcccgagaaggactgggaggacaatcctttcccccagggcatcgagctgttctgccagccctcaggttggcagttgtgcccggaacgtaatccaccgaccttcttcgttgccgtactcaccgacattaatagcgagcggcactactgcgcgtgcctgaccttttgggaacccgcagagccctcacagcaggaaaccactcgcgtcgaggatgcgactgagcgcgaggaagaaggagacgagggcgggcaaactcacctttcccccacagctcctgcacccagtgcgcagttgttcgccccgaaaacgttggtccttgtgagccggctggaccacacggaggtgttcagaaacagtctgggcctcatctacgctatccacgtggaaggccttaatgtttgcctggaaaacgtcatcggaaacctcctgacctgtacagttcctctcgctggtggcagccagcgtaccattagtttgggcgccggagacaggcaggtaattcagacccccttggcagacagcctgccggtatcacgttgctctgtggccctcctcttccggcagctcggtatcactaatgtgctctctcttttctgcgctgccctgactgaacataaggtgctgttcctgtcacggtcttatcagcgcttggccgacgcttgcagaggactgctagccctcctgttccctctgagatacagtttcacttacgtgcctatactccccgcgcagctgttggaggtactctcaacgcccactccattcataattggagtgaacgcggcttttcaggcggagacacaggagttattagacgtgatcgttgccgacttagatggaggtacagttactattccagagtgtgtgcacatccctccccttccggagccattgcagagccagactcatagcgttctgtctatggtgctggatcccgagctggagcttgctgacctcgccttcccccctccaaccacgtctacttccagcctaaaaatgcaagacaaagaacttagggccgtgttcctgaggctgttcgcccaacttctgcagggttatcgctggtgtttgcacgttgttcggatccatcccgagccagttatccggttccacaaagccgccttcctgggtcaacgggggctcgtcgaggatgattttctgatgaaggtgttagagggaatggcctttgccggctttgttagcgagaggggtgttccttatcgccctacagacctgttcgacgagttggttgctcatgaggtggcacgcatgagggccgatgaaaatcacccacaacgggtcttacgacatgtgcaagaactagcagagcagttgtataagaacgagaacccgtatcctgctgttgccatgcataaggtgcaacgcccgggcgagtcttcccatctacgccgggttcctcgaccgtttcctagactcgacgaaggtacagtgcagtggatcgtggatcaagctgccgcaaagatgcagggtgcgcctcccgcagtgaaggctgagagaaggaccacggtgccatccggcccacccatgaccgctattctggaacgttgtagcggcttacacgtaaactccgcccgcaggctcgaagtggtcagaaattgtatctcatatgtatttgaaggaaagatgctcgaagctaaaaagttgctgcctgcagttttgcgagcccttaagggtcgagcagcgagacgctgtttagcccaggagctccatttacacgtgcagcagaaccgtgctgttctcgatcaccagcagttcgacttcgtcgtgaggatgatgaattgctgcctacaggattgcacctccctggacgagcacggcattgctgcagcactactacctctggtcacagcattctgccggaaactgagtccaggtgtcacacaattcgcctactcttgcgtgcaagaacacgtcgtctggtcaacgccacaattttgggaggccatgttttacggcgacgtgcaaacgcacatccgggccctgtacttagaacccaccgaagatttggctcctgctcaggaggtgggcgaagcccctagtcaagaggatgagcggagcgctctggacgtggcctcggagcagcggcgtctctggccaactctcagtcgggaaaagcaacaggagttggttcagaaagaagaaagtacggtcttcagccaggcgatacactatgcgaaccgcatgtcctacttgctgcttcccctcgactccagcaaatcacgcctgctcagggaacgcgctggtcttggggacttggagagcgcgtctaatagcctggtcaccaattcgatggcggggagcgtcgctgagtcatacgataccgaaagcggcttcgaggacgcagaaacttgcgacgtggcaggagcagtggtgaggtttataaataggttcgtggataaagtatgcacagagagcggggtcacctcagatcacctgaaggggcttcacgttatggtgcctgatatcgtccagatgcacatagaaaccttagaggctgttcagcgagagtctagacggctccctcctatccagaaacctaaactactccggccttag

SEQ ID NO: 277686 - DNA, 2697 bp, Artificial Sequence
  derived and/or modified sequence
atggctgctggcacctgggccgctgctgctgctgctgctgctgctgactactttgtgctggtggccttcggcccccacccccggggcagcggggagggccagggccagatcctgcagcgcttccctgagaaggactgggaggacaaccccttcccccagggcatcgagctgttctgccagcccagcggctggcagctgtgcccagagaggaacccccccaccttctttgtggccgtgctgacagacatcaacagcgagcggcactactgtgcctgcctgaccttctgggagcctgctgagcccagccagcaggagaccaccagggtggaggatgccacagagcgggaggaggagggagatgagggcggccagacccacctgagccccacagccccagcccccagcgcccagctgtttgcccccaagaccctggtgctggtgtcccggctggaccacacagaggtgttcaggaacagcctgggcctcatctatgccatccacgtggagggcctgaatgtgtgcctggagaatgtgattggcaacctgctgacctgcaccgtgcccctggccggcggcagccagaggaccatcagcctgggcgctggggaccggcaggtgatccagacccccctggccgacagcctgcctgtgagccgctgcagcgtggccctgctcttccggcagctgggcatcaccaacgtgctgagcctcttctgtgccgccctgacagagcacaaggtgctcttcctgagccgcagctaccagaggctggctgatgcctgccggggcctgctggccctgctcttccccctgcgctacagcttcacctacgtgcccatcctgcctgcccagctgctggaggtgctgagcacccccacccccttcatcattggagtgaatgctgccttccaggccgagacccaggagctgctggatgtgattgtggccgacctggatggcggcaccgtgaccatcccagaatgtgtgcacatcccccccctgcctgagcccctgcagagccagacccacagcgtgctgtccatggtgctggaccctgagctggagctggccgacctggccttccccccacccaccaccagcaccagcagcctgaagatgcaggacaaggagctgcgggctgtgttcctgcggctgtttgcccagctgctgcagggctaccgctggtgcctgcacgtggtgcgcatccaccctgagcccgtcatccgcttccacaaggccgccttcctgggccagaggggcctggtggaggatgacttcctgatgaaggtgctggagggcatggcctttgctggctttgtgtctgagcggggcgtgccctaccggcccacagacctgtttgatgagctggtggcccacgaggtggccaggatgagagcagatgagaaccacccccagagggtgctgcggcacgtgcaggagctggccgagcagctgtacaagaatgaaaacccctacccagctgtggccatgcacaaggtgcagaggcctggagagagcagccacctgcggcgggtgccccggcccttcccccggctggatgagggcaccgtgcagtggatcgtggaccaggccgccgccaagatgcagggcgcccctcctgctgtgaaggccgagaggaggaccaccgtgcccagcggcccccccatgacagccatcctggagcgctgcagcggcctgcacgtgaacagcgcccggcggctggaggtggtgaggaactgcatctcctatgtgtttgagggcaagatgctggaggccaagaagctgctgcctgctgtgctgcgggccctgaagggccgggccgcccggcgctgcctggcccaggagctgcacctgcacgtgcagcagaacagagctgtgctggaccaccagcagtttgattttgtggtgaggatgatgaactgctgcctgcaggactgcaccagcctggatgagcacggcattgctgctgccctgctgcccctggtgacagccttctgcaggaagctgagccctggggtgacccagtttgcctacagctgtgtgcaggagcacgtggtgtggagcaccccccagttctgggaggccatgttttatggagatgtgcagacccacatccgggccctgtacctggagcccacagaggacctggccccagcccaggaggtgggggaggcccccagccaggaggatgagaggtctgccctggatgtggccagcgagcagaggcggctgtggcccaccctgagccgggagaagcagcaggagctggtgcagaaggaggagagcacagtgttcagccaggccatccactacgccaacaggatgagctacctgctgctgcccctggacagcagcaagagccggctgctgcgggagcgggccggcctgggggacctggagagcgccagcaacagcctggtgaccaacagcatggccggctctgtggccgagagctatgacacagaaagtggctttgaagatgctgagacctgtgatgtggccggggctgtggtgcgcttcatcaacagatttgtggacaaggtgtgcacagagagcggcgtgaccagtgaccacctgaagggcctgcacgtgatggtgcctgacatcgtgcagatgcacatcgagaccctggaggccgtgcagcgggagagccggcggctgccccccatccagaagcccaagctgctgcggccctag

SEQ ID NO: 277687 - DNA, 2697 bp, Artificial Sequence
  derived and/or modified sequence
atggccgccggcacctgggccgccgccgccgccgccgccgccgccgattactttgttctggttgccttcgggccacacccacgggggagcggcgaggggcaggggcagatcctgcagcgcttcccagaaaaagactgggaggataacccatttccccagggtattgaactgttttgtcagccttccggctggcagctgtgcccggagcgaaatccccctactttctttgtggctgtcttgacagatatcaacagcgagaggcactactgtgcctgcctgaccttctgggagccggccgagccctcccagcaggaaactacacgcgtcgaggacgcaacagaaagggaagaagagggggatgaaggcggacagactcacttaagcccaaccgcgccggccccctctgcccaactgtttgcgccaaaaactctggtgttagtcagccgacttgaccataccgaggtgtttcggaattccctcggactcatttatgcaatccatgtggaagggttgaatgtctgccttgagaatgtcattggcaacctgttgacgtgcactgttcctttggcaggcggctcacagcggaccatttcactcggggccggagatcgccaagttatccagacccccctggcagattcgctccctgtctcccggtgttctgtagccttgctgtttaggcaattggggatcacaaatgtcctgtctttgttctgtgcagctctgacggaacacaaggtgctgttcttaagccggtcataccagagactggctgatgcctgtaggggcttgctggctcttctgttcccgttgagatattcctttacttacgttcccatactgcccgctcagctccttgaggtcctgagcacacccacgccttttataataggagtgaatgctgccttccaggcagagactcaagaactgttagacgtgattgttgcagacttagatggtggcacagttacaatcccagagtgcgtgcacatccctcccctgcctgaaccgctccaaagccaaacacacagcgtcctcagcatggtgctggacccagaattagagctggctgatttggcttttccgcctccaacaacctccacttcctcactcaagatgcaggataaggagctcagagctgtcttcttgcgcctgttcgcacaattgttgcagggataccggtggtgcctacatgtggtgcgaatacacccagaacccgtcattagattccacaaggccgcttttctcggacagcgcggtctcgttgaagacgatttcctgatgaaggttctggaaggtatggctttcgccgggttcgtgagcgagagaggggtgccctatcggccgactgatctcttcgatgagttggtagcacatgaggtggctaggatgagagccgacgaaaatcatccccagcgagtgttacggcatgttcaggagctcgccgagcagctctacaagaacgagaacccttaccctgcagtcgccatgcacaaggtgcagagacctggcgagagcagccacctgaggcgtgtgcccaggccattccctaggctggacgagggaactgtgcagtggattgtcgatcaggctgccgccaagatgcaaggtgctccacccgccgtgaaggcagagcggcgtactacagtcccatctgggcctccaatgacagccatcctggaacggtgctctggcttacacgtgaacagcgccaggcggcttgaggttgtgcggaactgcatttcttatgtcttcgagggcaagatgctcgaggcgaagaaactgctgcctgccgtccttcgcgcactgaaaggacgagccgctaggaggtgtctggctcaggagctgcacttgcatgtgcaacagaatcgggcggtgcttgaccatcagcaattcgacttcgtagtcaggatgatgaattgctgtctgcaggactgcacgtctctggacgaacacggcattgctgcagccctgttacctctggtaacagccttttgccggaaattgtcacctggcgtcacccagtttgcatatagttgtgtccaggaacacgtcgtgtggagcacccctcaattctgggaggccatgttctatggagacgtgcaaactcacatacgcgctctatacctcgaaccaacagaggacctcgcgcctgcccaggaggttggagaagctccgagtcaggaggatgaaaggtccgcgctggatgtcgcctcagaacaacggcgcttgtggcctacccttagccgggaaaagcaacaggagctggtacagaaggaggaatcgaccgtcttctcacaggcaattcactacgcaaaccggatgagttacctgctcctacctctggactcatccaagtccagactgcttcgggaacgtgccgggctgggggacctggagagcgcatccaatagtcttgttactaacagcatggccggcagtgtagcggagtcatatgataccgagtccggcttcgaggatgctgagacctgtgatgtcgctggcgcagttgtcaggttcataaaccgtttcgtggataaggtctgcacagagagcggagtgacatcagaccacttaaaggggctacacgtgatggtgcccgatatcgttcagatgcacattgaaactctggaagccgttcagagagagagcaggagactgcccccaatacagaagccaaagctcctgcgaccttag

SEQ ID NO: 277688 - DNA, 2697 bp, Artificial Sequence
  derived and/or modified sequence
atggcagcgggtacatgggctgctgctgcagccgcagctgcggcagactacttcgtcctcgtagccttcgggcctcaccctcgaggttccggggaagggcagggccaaattctccagcggtttcctgaaaaagattgggaggataatcctttccctcagggaatcgaactgttctgtcagccgtctggctggcagctgtgccccgagagaaacccacccactttctttgtggccgttctgacagacatcaactctgagcgtcactattgtgcctgcctaacattctgggaaccagcggagccctcccagcaggaaacaacaagagtggaagatgcaactgagcgtgaagaagagggggacgaaggcggacaaacacatttaagccccactgcgccagcgcctagcgcacagctcttcgctccaaaaactctggtgttggtctcccgtttggatcataccgaggtgttcagaaattccctcgggctaatctatgctattcatgttgaaggcttaaatgtctgtctggaaaacgtcattggtaacctgctgacttgtaccgtgcccctggccggtgggtcacagcggactatatcattgggggctggagatagacaggttatccagactcccctcgccgattccctacctgtgagcagatgttccgtggcccttctgttccggcagctgggcatcaccaatgtgctgagcctattttgtgcggcacttaccgagcataaagtactcttcttgtccaggagttaccagaggttggccgatgcatgcaggggactgctcgccctgttatttccactgcgatactcctttacgtatgtgcctattttgccggcacagttgctcgaggttttgtccacacctacccctttcattattggagtgaacgctgcctttcaggcagagacacaagaacttctggacgtgatcgtcgctgacttggacggaggaaccgtcaccattcctgagtgtgtgcacattcctccgctgcctgagccactgcaatcgcagacccatagcgtgctgtcaatggtcctggatcctgaactagaactcgctgacctggcctttccaccgccaacgaccagcaccagctctttgaaaatgcaggataaagaacttcgggcagtctttctgagattgttcgcccagctcctccaaggctaccgctggtgtttgcacgtggttagaatccaccccgaaccagtgatcaggtttcataaagccgcttttctaggacagaggggcctggtggaggacgatttcctgatgaaggtgctcgagggtatggcatttgccggttttgtcagtgaaagaggagtcccctaccgccctaccgatttgtttgacgaactggttgctcacgaggtcgcccgtatgcgggcagatgagaaccacccccagagggtcttgaggcatgtgcaggagctcgcagagcagctttataagaatgagaacccttacccagctgtggccatgcacaaagttcagcggcctggtgagagtagccacttaaggcgcgtgcccagacctttcccaagactcgatgaggggaccgttcagtggattgtggaccaggccgcagctaagatgcagggagcaccgcctgctgttaaggcggaacggagaaccacggtcccctccgggccacccatgacagccattcttgaaagatgtagcggcttgcatgtgaactcagcacgccgtctcgaagtggtgaggaactgcatctcctacgttttcgaggggaaaatgctggaagccaaaaaactgctgcctgctgtccttagagcgttgaaggggagggctgccagacgttgccttgcccaggagctgcatctgcacgtgcagcagaatcgcgctgtcctggatcaccagcaatttgatttcgtggtgcggatgatgaattgttgcctccaggactgcacatccctcgatgagcacgggattgcagccgcattattaccccttgtcactgccttctgtcgcaaactgtcccccggagtgactcagtttgcctactcctgcgttcaggagcatgtcgtatggtccacacctcaattttgggaggctatgttctatggagatgtccagacacacattagggccctctaccttgagcccaccgaagacctggccccagctcaggaggtaggagaggcgcctagccaggaagatgagcggtcagccctggatgtcgccagtgaacagaggcgcctgtggccgactttgtctcgggaaaagcaacaggaacttgtccagaaggaggagtctaccgtcttctctcaggccattcactacgctaacagaatgtcttacctgttacttccgctggacagtagcaagtccaggcttcttcgggagagggctggactgggggacttggaaagcgcttccaactcacttgtcacaaactccatggccggatctgtcgcagaatcctatgacactgaaagcggcttcgaagacgcagagacatgcgacgtggcgggtgcggtcgtgaggtttataaacagattcgttgataaagtttgcaccgagagtggcgtgacgagcgatcacctaaaaggcttgcacgtgatggttccagacatcgtccaaatgcacatcgagaccttggaagccgtgcagcgcgagagcagacggctgccaccaattcagaaacccaagttactgcgcccttag

SEQ ID NO: 277689 - DNA, 3090 bp, Artificial Sequence
  derived and/or modified sequence
gggcgggccggctggctgggaagatggcggcgggaacctgggccgccgccgccgccgccgccgccgcggactacttcgtgctggtggcgttcgggccgcacccgcgcgggagtggggaaggccagggccagattctgcagcgcttcccagagaaggactgggaggacaacccattcccccagggcatcgagctgttttgccagcccagcgggtggcagctgtgtcccgagaggaatccaccgaccttctttgttgctgtcctcaccgacatcaactccgagcgccactactgcgcctgcttgaccttctgggagccagcggagccttcacagcaggaaacgacgcgcgtggaggatgccacagagagggaggaagagggggatgagggaggccagacccacctgtctcccacagcacctgccccatctgcccagctgtttgcaccgaagacgctggtactggtgtcgcgactcgaccacacggaggtgttcaggaacagccttggcctcatctatgccatccacgtggagggcctgaatgtgtgcctggagaacgtgattgggaacctgctgacgtgcactgtgcccctggctgggggctcgcagaggacgatctctttgggggctggtgaccggcaggtcatccagactccactggccgactcgctgcccgtcagccgctgcagcgtggccctgctcttccgccagctaggcatcaccaacgtgctgtctttgttctgtgccgccctcacggagcacaaggttctcttcctgtcccggagctaccagcggctcgccgatgcctgtaggggcctcctggcactgctgtttcctctcagatacagcttcacctatgtgcccatcctgccggctcagctgctggaggtcctcagcacacccacgcccttcatcattggggtcaacgcggccttccaggcagagacccaggagctgctcgatgtgattgttgctgatctggatggagggacggtcaccattcctgagtgtgtgcacattccacccttgccagagccactgcagagtcagacgcacagtgtgctgagcatggtcctggacccggagctggagttggctgacctcgccttccctccgcccacgacatccacctcctccctgaagatgcaggacaaggagctgcgcgcggtcttcctgcggctgttcgctcagctgctgcagggctatcgctggtgcctgcacgtcgtgcgcatccacccggagcctgtcatccgcttccataaggcagccttcctgggccagcgtgggctggtagaggacgatttcctgatgaaggtgctggagggcatggcctttgctggctttgtgtcagagcgtggggtcccataccgccctacggacctgttcgatgagctggtggcccacgaggtggcaaggatgcgggcggatgagaaccacccccagcgtgtcctgcgtcacgtccaggaactggcagagcagctctacaagaacgagaacccgtacccagccgtggcgatgcacaaggtacagaggcccggtgagagcagccacctgcgacgggtgccccgacccttcccccggctggatgagggcaccgtgcagtggatcgtggaccaggctgcagccaagatgcagggtgcacccccagctgtgaaggccgagaggaggaccaccgtgccctcagggccccccatgactgccatactggagcggtgcagtgggctgcatgtcaacagcgcccggcggctggaggttgtgcgcaactgcatctcctacgtgtttgaggggaaaatgcttgaggccaagaagctgctcccagccgtgttgagggccctgaaggggcgagctgcccgccgctgcctcgcccaggagctgcacctgcatgtgcagcagaaccgtgcggtcctggaccaccagcagtttgactttgtcgtccgtatgatgaactgctgcctgcaggactgcacttctctggacgagcatggcattgcggcggctctgctgcctctggtcacagccttctgccggaagctgagcccgggggtgacgcagtttgcatacagctgtgtgcaggagcacgtggtgtggagcacgccacagttctgggaggccatgttctatggggatgtgcagactcacatccgggccctctacctggagcccacggaggacctggcccccgcccaggaggttggggaggcaccttcccaggaggacgagcgctctgccctagacgtggcttctgagcagcggcgcttgtggccaactctgagtcgtgagaagcagcaggagctggtgcagaaggaggagagcacggtgttcagccaggccatccactatgccaaccgcatgagctacctcctcctgcccctggacagcagcaagagccgcctacttcgggagcgtgccgggctgggcgacctggagagcgccagcaacagcctggtcaccaacagcatggctggcagtgtggccgagagctatgacacggagagcggcttcgaggatgcagagacctgcgacgtagctggggctgtggtccgcttcatcaaccgctttgtggacaaggtctgcacggagagtggggtcaccagcgaccacctcaaggggctgcatgtcatggtgccagacattgtccagatgcacatcgagaccctggaggccgtgcagcgggagagccggaggctgccgcccatccagaagcccaagctgctgcggccgcgcctgctgccgggtgaggagtgtgtgctggacggcctgcgcgtctacctgctgccggatgggcgtgaggagggcgcggggggcagtgctgggggaccagcattgctcccagctgagggcgccgtcttcctcaccacgtaccgggtcatcttcacggggatgcccacggaccccctggttggggagcaggtggtggtccgctccttcccggtggctgcgctgaccaaggagaagcgcatcagcgtccagacccctgtggaccagctcctgcaggacgggctccagctgcgctcctgcacattccaggtgctggtccagccagcggctgcaggcgagtttctagaaccagagtctatataaagagagaactaac

SEQ ID NO: 277690 - DNA, 2697 bp, Artificial Sequence
  derived and/or modified sequence
atggccgccggcacctgggccgccgccgccgccgccgccgccgccgactacttcgtgctggtggccttcggcccccaccccagaggcagcggcgagggccagggccagatcctgcagagattccccgagaaggactgggaggacaaccccttcccccagggcatcgagctgttctgccagcccagcggctggcagctgtgccccgagagaaacccccccaccttcttcgtggccgtgctgaccgacatcaacagcgagagacactactgcgcctgcctgaccttctgggagcccgccgagcccagccagcaggagaccaccagagtggaggacgccaccgagagagaggaggagggcgacgagggcggccagacccacctgagccccaccgcccccgcccccagcgcccagctgttcgcccccaagaccctggtgctggtgagcagactggaccacaccgaggtgttcagaaacagcctgggcctgatctacgccatccacgtggagggcctgaacgtgtgcctggagaacgtgatcggcaacctgctgacctgcaccgtgcccctggccggcggcagccagagaaccatcagcctgggcgccggcgacagacaggtgatccagacccccctggccgacagcctgcccgtgagcagatgcagcgtggccctgctgttcagacagctgggcatcaccaacgtgctgagcctgttctgcgccgccctgaccgagcacaaggtgctgttcctgagcagaagctaccagagactggccgacgcctgcagaggcctgctggccctgctgttccccctgagatacagcttcacctacgtgcccatcctgcccgcccagctgctggaggtgctgagcacccccacccccttcatcatcggcgtgaacgccgccttccaggccgagacccaggagctgctggacgtgatcgtggccgacctggacggcggcaccgtgaccatccccgagtgcgtgcacatcccccccctgcccgagcccctgcagagccagacccacagcgtgctgagcatggtgctggaccccgagctggagctggccgacctggccttccccccccccaccaccagcaccagcagcctgaagatgcaggacaaggagctgagagccgtgttcctgagactgttcgcccagctgctgcagggctacagatggtgcctgcacgtggtgagaatccaccccgagcccgtgatcagattccacaaggccgccttcctgggccagagaggcctggtggaggacgacttcctgatgaaggtgctggagggcatggccttcgccggcttcgtgagcgagagaggcgtgccctacagacccaccgacctgttcgacgagctggtggcccacgaggtggccagaatgagagccgacgagaaccacccccagagagtgctgagacacgtgcaggagctggccgagcagctgtacaagaacgagaacccctaccccgccgtggccatgcacaaggtgcagagacccggcgagagcagccacctgagaagagtgcccagacccttccccagactggacgagggcaccgtgcagtggatcgtggaccaggccgccgccaagatgcagggcgccccccccgccgtgaaggccgagagaagaaccaccgtgcccagcggcccccccatgaccgccatcctggagagatgcagcggcctgcacgtgaacagcgccagaagactggaggtggtgagaaactgcatcagctacgtgttcgagggcaagatgctggaggccaagaagctgctgcccgccgtgctgagagccctgaagggcagagccgccagaagatgcctggcccaggagctgcacctgcacgtgcagcagaacagagccgtgctggaccaccagcagttcgacttcgtggtgagaatgatgaactgctgcctgcaggactgcaccagcctggacgagcacggcatcgccgccgccctgctgcccctggtgaccgccttctgcagaaagctgagccccggcgtgacccagttcgcctacagctgcgtgcaggagcacgtggtgtggagcaccccccagttctgggaggccatgttctacggcgacgtgcagacccacatcagagccctgtacctggagcccaccgaggacctggcccccgcccaggaggtgggcgaggcccccagccaggaggacgagagaagcgccctggacgtggccagcgagcagagaagactgtggcccaccctgagcagagagaagcagcaggagctggtgcagaaggaggagagcaccgtgttcagccaggccatccactacgccaacagaatgagctacctgctgctgcccctggacagcagcaagagcagactgctgagagagagagccggcctgggcgacctggagagcgccagcaacagcctggtgaccaacagcatggccggcagcgtggccgagagctacgacaccgagagcggcttcgaggacgccgagacctgcgacgtggccggcgccgtggtgagattcatcaacagattcgtggacaaggtgtgcaccgagagcggcgtgaccagcgaccacctgaagggcctgcacgtgatggtgcccgacatcgtgcagatgcacatcgagaccctggaggccgtgcagagagagagcagaagactgccccccatccagaagcccaagctgctgagaccctag

SEQ ID NO: 277691 - protein, 1867 aa, Artificial Sequence
  derived and/or modified sequence
MARLADYFVLVAFGPHPRGSGEGQGQILQRFPEKDWEDNPFPQGIELFCQPSGWQLCPERNPPTFFVAVLTDINSERHYCACLTFWEPAEPSQETTRVEDATEREEEGDEGGQTHLSPTAPAPSAQLFAPKTLVLVSRLDHTEVFRNSLGLIYAIHVEGLNVCLENVIGNLLTCTVPLAGGSQRTISLGAGDRQVIQTPLADSLPVSRCSVALLFRQLGITNVLSLFCAALTEHKVLFLSRSYQRLADACRGLLALLFPLRYSFTYVPILPAQLLEVLSTPTPFIIGVNAAFQAETQELLDVIVADLDGGTVTIPECVHIPPLPEPLQSQTHSVLSMVLDPELELADLAFPPPTTSTSSLKMQDKELRAVFLRLFAQLLQGYRWCLHVVRIHPEPVIRFHKAAFLGQRGLVEDDFLMKVLEGMAFAGFVSERGVPYRPTDLFDELVAHEVARMRADENHPQRVLRHVQELAEQLYKNENPYPAVAMHKVQRPGESSHLRRVPRPFPRLDEGTVQWIVDQAAAKMQGAPPAVKAERRTTVPSGPPMTAILERCSGLHVNSARRLEVVRNCISYVFEGKMLEAKKLLPAVLRALKGRAARRCLAQELHLHVQQNRAVLDHQQFDFVVRMMNCCLQDCTSLDEHGIAAALLPLVTAFCRKLSPGVTQFAYSCVQEHVVWSTPQFWEAMFYGDVQTHIRALYLEPTEDLAPAQEVGEAPSQEDERSALDVASEQRRLWPTLSREKQQELVQKEESTVFSQAIHYANRMSYLLLPLDSSKSRLLRERAGLGDLESASNSLVTNSMAGSVAESYDTESGFEDAETCDVAGAVVRFINRFVDKVCTESGVTSDHLKGLHVMVPDIVQMHIETLEAVQRESRRLPPIQKPKLLRPRLLPGEECVLDGLRVYLLPDGREEGAGGSAGGPALLPAEGAVFLTTYRVIFTGMPTDPLVGEQVVVRSFPVAALTKEKRISVQTPVDQLLQDGLQLRSCTFQLLKMAFDEEVGSDSAELFRKQLHKLRYPPDIRATFAFTLGSAHTPGRPPRVTKDKGPSLRTLSRNLVKNAKKTIGRQHVTRKKYNPPSWEHRGQPPPEDQEDEISVSEELEPSTLTPSSALKPSDRMTMSSLVERACCRDYQRLGLGTLSSSLSRAKSEPFRISPVNRMYAICRSYPGLLIVPQSVQDNALQRVSRCYRQNRFPVVCWRSGRSKAVLLRSGGLHGKGVVGLFKAQNAPSPGQSQADSSSLEQEKYLQAVVSSMPRYADASGRNTLSGFSSAHMGSHGKWGSVRTSGRSSGLGTDVGSRLAGRDALAPPQANGGPPDPGFLRPQRAALYILGDKAQLKGVRSDPLQQWELVPIEVFEARQVKASFKKLLKACVPGCPAAEPSPASFLRSLEDSEWLIQIHKLLQVSVLVVELLDSGSSVLVGLEDGWDITTQVVSLVQLLSDPFYRTLEGFRLLVEKEWLSFGHRFSHRGAHTLAGQSSGFTPVFLQFLDCVHQVHLQFPMEFEFSQFYLKFLGYHHVSRRFRTFLLDSDYERIELGLLYEEKGERRGQVPCRSVWEYVDRLSKRTPVFHNYMYAPEDAEVLRPYSNVSNLKVWDFYTEETLAEGPPYDWELAQGPPEPPEEERSDGGAPQSRRRVVWPCYDSCPRAQPDAISRLLEELQRLETELGQPAERWKDTWDRVKAAQRLEGRPDGRGTPSSLLVSTAPHHRRSLGVYLQEGPVGSTLSLSLDSDQSSGSTTSGSRQAARRSTSTLYSQFQTAESENRSYEGTLYKKGAFMKPWKARWFVLDKTKHQLRYYDHRVDTECKGVIDLAEVEAVAPGTPTMGAPKTVDEKAFFDVKTTRRVYNFCAQDVPSAQQWVDRIQSCLSDA

SEQ ID NO: 277692 - DNA, 5604 bp, Artificial Sequence
  derived and/or modified sequence
atggcccgactggccgattactttgttctggtagccttcggcccacaccctcgggggagtggggagggacaaggccagatactgcagcggttcccagagaaggactgggaagataacccatttcctcaggggatagaactcttctgccagccatccgggtggcaactttgtccggagaggaatccacctacattctttgtcgcagtgctcacagatatcaacagtgagagacattactgcgcgtgtctgaccttctgggagccggctgaaccttcacaggagacaacccgagtagaggatgcaaccgagagagaggaggaaggagatgaaggtggccaaactcatctcagccccactgcccccgcccccagcgcccagctgtttgctcccaagacattggtgttggtctccaggctggaccacactgaggtcttcaggaacagcctgggacttatttatgccatccacgtggagggtctaaatgtatgccttgagaacgtgatcggcaatcttctcacctgcacagtaccacttgccggaggctcacaaaggaccatatctctaggtgcaggagatcggcaggtgatccaaacacccctggctgactccctgcctgtgagtcgttgtagtgttgctctgcttttccgtcagttagggatcaccaatgtccttagtttgttctgtgcagcactcactgaacacaaagtgctgtttttgtcaagaagctaccagcggctggcggatgcctgtaggggcctgctggccttgctgtttccattaaggtacagctttacgtatgtaccaatactacccgcccagctattggaagtactgagcacccctaccccattcatcataggcgtcaatgcagcttttcaggccgagacacaggaactgctagatgtaatcgtggccgacctggatgggggaactgtcaccatacctgagtgtgtacatatcccccctctgccagagccgctgcagagtcagacccactcggttctgtccatggtattggacccagagttggaactggcagacctggcttttcctccacctactacctccactagttctctgaaaatgcaggacaaggaactgcgggccgtttttctccggctttttgcccagttactgcagggctatcgatggtgcctgcatgttgtcagaattcaccccgagcctgtcattcgatttcacaaagctgcttttttggggcagagaggtctggtagaagacgattttctcatgaaggtcctggaagggatggcctttgctgggtttgtgtccgagcgtggggtgccctaccgccccactgatctgttcgacgaacttgtcgctcatgaagtggctcggatgcgtgctgacgagaatcatccccagagagtactcaggcacgtgcaggaacttgctgagcagctgtataagaatgagaacccataccctgctgttgcgatgcataaggtgcagcggcccggggaatcgtcccatctgcgcagagtgcctcggccctttcctcgcttggacgaagggacagtgcagtggattgtggatcaagctgccgcgaagatgcagggggctccccctgccgtcaaagcagagagacggactactgtgcctagcggccctcctatgaccgctatcttggaacggtgctctggcctgcacgtgaatagcgcgaggcgcctggaggttgtaagaaactgcatctcctacgtgttcgaaggcaaaatgctggaagcaaagaagttacttcctgccgtgcttcgcgctctgaaaggtcgcgcagctcgccgatgtctggctcaggagttacatctacatgtccagcagaacagggcagtgctcgatcatcagcaatttgacttcgtggtcaggatgatgaattgctgcctacaagattgtacatcattagatgaacatggcatcgcagcagctttactgcccctggtgactgccttctgtcggaagctcagccccggagtgactcagttcgcgtactcctgcgttcaggagcacgtcgtttggtctaccccacagttctgggaggccatgttctatggcgatgtccagactcatatccgcgctctgtacctcgagccaactgaagacctggctccagcgcaggaagtgggtgaagctccaagccaggaagacgagagaagtgccctggacgtagctagtgagcaaagacggctatggcccactctctcgcgggagaagcagcaggagctggttcagaaagaagagtccaccgtcttctctcaggcgattcattacgcgaaccgcatgagttatctgctgctgcctctggactcctctaagagccggctcctaagggaacgagctgggctgggtgatcttgaatccgcatcaaatagtttagtgaccaactcaatggcgggctctgtggccgagagttacgatacagaaagtgggttcgaggatgcggaaacttgcgatgtggccggagcggtggtccgtttcatcaaccggttcgtggataaggtgtgcactgaatccggcgtgactagcgaccatctcaaggggctgcacgtcatggtgcccgacattgttcagatgcacattgaaactctggaagcagtgcagagggagtcgcggcgactgccgcctatacaaaaacccaagctgctccggcctaggttacttcctggagaggagtgcgtccttgacgggctcagagtgtacctgttgccagacggtagagaggaaggggccggcggcagcgccggcggacctgcgctactgcctgccgagggggccgtgttcttgacaacttatcgggtgatcttcaccggtatgccaacagatcccttggtgggagagcaggtcgtcgtgcgcagcttccctgtggcggcacttacaaaagagaagcggatctccgtacagactcctgtggaccaactactccaggatgggctccagttgcggtcttgtacttttcagctgctgaagatggcctttgacgaggaggtgggaagcgattctgcggaattgtttcgcaagcagctgcataagcttaggtaccctccagacataagggcgacctttgctttcacattaggaagtgcccacacccctggcagacccccaagggtaaccaaggataaaggcccgtctctgcgcacactctccaggaatctggttaagaatgccaagaaaaccattggcagacagcacgtcaccaggaaaaaatacaaccctccttcttgggagcaccgaggccagcccccacctgaagaccaggaagacgagatatcagtctccgaggagttagagccttcaaccctcaccccatcatccgccctcaaacccagtgatcgtatgactatgtcaagcttggtggagagagcctgttgcagagactatcaacgccttgggctgggaactttaagtagcagcctttcacgagcaaaaagcgaacccttccggatatctcccgttaaccgcatgtacgccatatgcagatcttacccaggattactgatagtgccacagagcgttcaggacaatgccctgcagcgggtttctagatgttaccggcagaataggtttcctgtcgtgtgttggcgcagcggacgcagcaaagcagtgctgctcaggtccggaggattacacggcaagggggttgtgggactgtttaaagcacagaacgctccatcacccggtcagagccaagccgactcatccagcttagaacaggagaaatacttgcaggcggtggtttcctccatgcccaggtacgctgacgcctcagggcgcaataccctgtccggattttcatccgctcacatgggctctcacggaaaatggggatctgtgcgcacgtccggtaggagcagcggccttggcacggatgttgggagccgcctggccggacgcgatgccctcgcacccccccaggccaatgggggtccgccagaccctggattcctgcggccacagcgagcggcactctacattctcggagataaggctcaactcaagggagttaggagtgaccctctccagcagtgggagctcgtgccaattgaggtgtttgaagccagacaggtgaaagccagctttaaaaagcttctaaaggcgtgtgtgccaggttgtccagcggccgaaccatcccctgcctctttcctgcggagtctggaagactctgaatggctcatccagattcacaaactgctgcaagtttccgtactggttgtggagctacttgacagtggatcgagtgtgctggttggccttgaggatggatgggatatcactacccaggtggtgagtctggtgcaactcctctcagaccctttctaccgcacactcgagggctttaggctgctcgtggagaaagagtggctgagttttggtcacaggtttagccaccgtggcgcccataccctagctggacaatcctccgggtttaccccagtcttccttcagtttctggattgcgtccatcaagttcacttacagttcccaatggaatttgaatttagccagttctacctgaagtttctcggctatcaccacgtgagtaggaggttccggaccttccttcttgattccgattatgagagaattgaactcggactgctctatgaggaaaagggtgagcgccgaggccaggtcccctgccgatcggtctgggagtacgttgaccgactcagtaaacgaacgcctgttttccacaattacatgtatgcccctgaggacgccgaggtgttacggccctactcaaatgtttccaacctgaaggtctgggacttttacactgaggaaaccctggctgaaggacctccttacgactgggagctcgcccaaggccccccggagccaccggaagaggaaagatctgatgggggagcaccgcagtcccggcggcgagtggtgtggccttgttatgactcctgtccacgggcccaacctgacgcgatttcacggctgctggaggagctacagcgattagagacagagctcggccagcctgctgagagatggaaggatacatgggatcgagtcaaagctgcgcagcgactcgagggtcgcccggatgggcggggcaccccgtcctctctccttgtcagcacggctccccaccacaggaggtcactgggcgtctaccttcaggagggacccgtgggttcaaccctctccctgtccctggattctgatcagtcgtccggatccaccactagcggttcccggcaggctgcccgacgctccacttcaactctgtattcacagtttcaaaccgcggagagcgaaaatagatcctacgaagggactctgtacaagaagggcgcttttatgaagccatggaaggctcggtggttcgtgctggacaagacaaaacaccagctgcgatactacgatcatcgcgtggacaccgaatgtaaaggagtgatcgacctcgccgaagtggaggccgtagcgcctggcacccccacgatgggagccccgaagacggtcgatgagaaggccttttttgacgtgaaaacgactaggcgggtgtacaatttctgtgcgcaagacgtgcctagcgcccagcagtgggtggatagaatacagagctgtctctccgacgcctag

SEQ ID NO: 277693 - DNA, 5604 bp, Artificial Sequence
  derived and/or modified sequence
atggcccggctggccgactactttgtgctggtggccttcggcccccacccccggggcagcggggagggccagggccagatcctgcagcgcttccctgagaaggactgggaggacaaccccttcccccagggcatcgagctgttctgccagcccagcggctggcagctgtgcccagagaggaacccccccaccttctttgtggccgtgctgacagacatcaacagcgagcggcactactgtgcctgcctgaccttctgggagcctgctgagcccagccaggagaccaccagggtggaggatgccacagagcgggaggaggagggagatgaaggaggccagacccacctgagccccacagccccagcccccagcgcccagctgtttgcccccaagaccctggtgctggtgtcccggctggaccacacagaggtgttcaggaacagcctgggcctcatctatgccatccacgtggagggcctgaatgtgtgcctggagaatgtcatcggcaacctgctgacctgcaccgtgcccctggccggcggcagccagaggaccatcagcctgggcgctggggaccggcaggtgatccagacccccctggccgacagcctgcctgtgagccgctgcagcgtggccctgctcttccggcagctgggcatcaccaacgtgctgagcctcttctgtgccgccctgacagagcacaaggtgctcttcctgagccgcagctaccagaggctggctgatgcctgccggggcctgctggccctgctcttccccctgcgctacagcttcacctacgtgcccatcctgcctgcccagctgctggaggtgctgagcacccccacccccttcatcatcggcgtgaatgctgccttccaggccgagacccaggagctgctggatgtgattgtggccgacctggatggcggcaccgtgaccatcccagaatgtgtgcacatcccccccctgcctgagcccctgcagagccagacccacagcgtgctgtccatggtgctggaccctgagctggagctggccgacctggccttccccccacccaccaccagcaccagcagcctgaagatgcaggacaaggagctgcgggctgtgttcctgcggctgtttgcccagctgctgcagggctaccgctggtgcctgcacgtggtgcgcatccaccctgagcctgtgatccgcttccacaaggccgccttcctgggccagaggggcctggtggaggatgacttcctgatgaaggtgctggagggcatggcctttgctggctttgtgtctgagcggggcgtgccctaccggcccacagacctgtttgatgagctggtggcccacgaggtggccaggatgagagcagatgagaaccacccccagagggtgctgcggcacgtgcaggagctggccgagcagctgtacaagaatgaaaacccctacccagctgtggccatgcacaaggtgcagaggcctggagagagcagccacctgcggcgggtgccccggcccttcccccggctggatgagggcaccgtgcagtggatcgtggaccaggccgccgccaagatgcagggcgcccccccagctgtgaaggccgagaggaggaccaccgtgcccagcggcccccccatgacagccatcctggagcgctgcagcggcctgcacgtgaacagcgcccggcggctggaggtggtgaggaactgcatctcctatgtgtttgagggcaagatgctggaggccaagaagctgctgcctgctgtgctgcgggccctgaagggccgggccgcccggcgctgcctggcccaggagctgcacctgcacgtgcagcagaacagagctgtgctggaccaccagcagtttgattttgtggtgaggatgatgaactgctgcctgcaggactgcaccagcctggatgaacatggaattgctgctgccctgctgcccctggtgacagccttctgcaggaagctgagccctggggtgacccagtttgcctacagctgtgtgcaggagcacgtggtgtggagcaccccccagttctgggaggccatgttttatggagatgtgcagacccacatccgggccctgtacctggagcccacagaggacctggccccagcccaggaggtgggggaggcccccagccaggaggatgagaggtctgccctggatgtggccagcgagcagaggcggctgtggcccaccctgagccgggagaagcagcaggagctggtgcagaaggaggagagcaccgtcttcagccaggccatccactacgccaacaggatgagctacctgctgctgcccctggacagcagcaagagccggctgctgcgggagagagctggcctgggggacctggagagcgccagcaacagcctggtgaccaacagcatggccggctctgtggccgagagctatgacacagagagcggctttgaagatgctgagacctgtgatgtggccggggctgtggtgcgcttcatcaacagatttgtggacaaggtgtgcacagaaagtggagtgaccagtgaccacctgaagggcctgcacgtgatggtgcctgacatcgtgcagatgcacatcgagaccctggaggccgtgcagcgggagagccggcggctgccccccatccagaagcccaagctgctgcggccccggctgctgcctggagaggagtgtgtgctggatggcctgcgggtgtacctgctgcctgatggccgggaggagggcgccggcggcagcgctgggggccctgccctgctgcctgctgagggcgctgtgttcctgaccacctacagagtcatcttcaccggcatgcccacagaccccctggtgggggagcaggtggtggtgcgctccttccctgtggccgccctgaccaaggagaagaggatctctgtgcagacccctgtggaccagctgctgcaggacggcctgcagctgcggagctgcaccttccagctgctgaagatggcctttgatgaggaggtgggcagtgacagcgctgagctgttcaggaagcagctgcacaagctgcgctaccccccagacatccgggccacctttgccttcaccctgggcagcgcccacaccccaggccggcccccccgggtgaccaaggacaagggccccagcctgcggaccctgagcaggaacctggtgaagaatgccaagaagaccatcggccggcagcacgtgaccaggaagaagtacaaccccccatcctgggagcaccggggccagcccccacctgaggaccaggaggatgagatctctgtgtctgaggagctggagcccagcaccctgacccccagcagcgccctgaagcccagcgacaggatgaccatgagcagcctggtggagcgggcctgctgccgggactaccagaggctgggcctgggcaccctgagcagcagcctgagccgggccaagtctgagcccttccgcatcagccctgtgaacaggatgtatgccatctgccgcagctacccaggcctgctgattgtgccccagagcgtgcaggacaatgccctgcagagggtgagccgctgctaccggcagaaccgcttccctgtggtgtgctggaggagcggccgcagcaaggctgtgctgctgcggagcggcggcctgcatggaaaaggagtggtgggcctcttcaaggcccagaatgcccccagccctggccagagccaggccgacagcagcagcctggagcaggagaagtacctgcaggccgtggtgtcctccatgcccaggtatgcagatgccagcggcaggaacaccctgagcggcttcagcagcgcccacatgggcagccacggcaagtggggctctgtgaggaccagcggccgcagcagcggcctgggcacagatgtgggcagccggctggccggcagagatgccctggccccaccccaggccaacggcggccccccagaccccggcttcctgcggccccagagagctgccctgtacatcctgggggacaaggcccagctgaagggcgtgcggagtgaccccctgcagcagtgggagctggtgcccatcgaggtgtttgaggcccggcaggtgaaggccagcttcaagaagctgctgaaggcctgtgtgcccggctgcccagctgctgagcccagccctgccagcttcctgcggagcctggaggacagcgagtggctgatccagatccacaagctgctgcaggtgtctgtgctggtggtggagctgctggacagcggcagctctgtgctggtgggcctggaggatggctgggacatcaccacccaggtggtgtccctggtgcagctgctgagtgaccccttctaccgcaccctggagggcttccggctgctggtggagaaggagtggctgagctttggccaccgcttcagccacagaggagcccacaccctggccggccagagcagcggcttcacccctgtgttcctgcagttcctggactgtgtgcaccaggtgcacctgcagttccccatggagtttgagttcagccagttctacctgaagttcctgggctaccaccacgtgagccgccgcttccgcaccttcctgctggacagcgactatgagcgcatcgagctgggcctgctgtatgaggagaagggggagcggcggggccaggtgccctgccgctctgtgtgggagtatgtggaccggctgagcaagaggacccctgtgttccacaactacatgtatgccccagaagatgctgaggtgctgcggccctacagcaatgtgagcaacctgaaggtgtgggacttctacacagaggagaccctggccgagggccccccctatgactgggagctggcccagggccccccagagcccccagaggaggagaggagtgatggaggagccccccagagcagaagaagagtggtgtggccctgctatgacagctgcccccgggcccagccagatgccatcagccggctgctggaggagctgcagaggctggagacagagctgggccagcctgctgagcgctggaaggacacctgggacagagtgaaggccgcccagaggctggagggccgcccagatggccggggcacccccagcagcctgctggtgtccacagccccccaccaccggcgcagcctgggcgtgtacctgcaggagggccctgtgggcagcaccctgagcctgagcctggacagcgaccagagcagcggcagcaccaccagcggcagccggcaggccgcccggcgcagcaccagcaccctgtacagccagttccagacagctgagagcgagaacagaagctatgagggcaccctgtacaagaagggggccttcatgaagccctggaaggcccgctggtttgtgctggacaagaccaagcaccagctgcgctactatgaccaccgggtggacacagagtgcaagggcgtgattgacctggccgaggtggaggccgtggcccctggcacccccaccatgggcgcccccaagacagtggatgagaaggccttctttgatgtgaagaccacccggcgggtgtacaacttctgtgcccaggatgtgcccagcgcccagcagtgggtggaccgcatccagagctgcctgagtgatgcctag

SEQ ID NO: 277694 - DNA, 5604 bp, Artificial Sequence
  derived and/or modified sequence
atggcccggctggccgactacttcgtgctggtggccttcggcccccatccacggggatccggggaagggcaagggcaaatacttcaacggttccctgagaaggactgggaggacaaccctttcccacaggggatcgagctcttctgtcaaccctcaggctggcaattatgtcccgaacgtaatcctccgacctttttcgttgccgtactaactgacatcaattctgagcgtcattattgcgcctgtctgacgttctgggaaccagcagaaccctctcaagaaaccactcgtgtggaggacgcaacagagagagaagaggagggtgacgaggggggtcagacccacttgagccccactgccccagcaccttctgctcagctcttcgcaccgaaaacgctggtcctagtctcccgtttagaccacacggaggtcttccgaaatagtttgggattaatctacgccattcatgtcgaaggcctgaatgtgtgcttggagaatgtgattggtaatcttcttacgtgtacagttcctttggccggtggttcacagagaaccatctcactcggggctggtgaccgacaggttatccagacacccctggcggattcactccccgtatctcgatgcagtgtggcactgttgtttagacagttgggaattacaaacgtgctctctctgttctgtgcagccttgacagagcacaaggtcctgttcctaagccggagttaccagcggctggccgatgcctgccggggccttctggccctccttttcccattgcgctactctttcacatacgtgcccattctcccagcccaactccttgaagtccttagtacacccaccccattcataattggcgttaacgccgcatttcaggcagaaacccaggagttgttagatgtcatcgtggctgacttagatgggggcaccgtaactatccccgagtgtgttcatatccccccactcccagagccgcttcagtcccagactcattcagtactctcaatggtcctggatcctgaactcgagctggcagacctcgcttttcctccaccaacaacttcaaccagctcactgaagatgcaagacaaagagctgcgcgctgttttcctgagattgtttgcgcagctcctgcaggggtatagatggtgcctgcatgtggtgcgtatccatcccgagccagtaatcagatttcataaggccgctttcttaggccagcggggacttgttgaggacgacttcctgatgaaagtcctcgaaggcatggcatttgcaggatttgtgagtgaaaggggcgtgccctataggccaacagatttgtttgatgagctggtcgcgcacgaagtcgcacggatgcgggcggatgaaaaccacccacaacgtgttcttcgacatgtgcaggaactagcggaacagctttacaaaaacgaaaatccttacccggccgtcgccatgcacaaagtgcagcgtcccggcgaaagttcccacctgcggagggtccctagaccttttccaagactggatgagggcacagtccagtggattgttgaccaggccgccgcaaaaatgcagggggctcctcccgcagtgaaagccgagagaagaactacggtgcccagcggcccccctatgaccgcgatcctggaacgctgtagtggcctgcatgtgaacagcgcgaggaggctggaggttgtgagaaactgcatttcttacgttttcgaaggcaagatgctggaagcaaaaaaacttctcccagccgtgctacgcgccctgaagggacgtgctgccaggcgctgtctggcacaggagctccacttgcacgtgcaacagaacagagcagtgctggatcatcaacagttcgatttcgtggtccggatgatgaattgttgcctccaagattgcacttcactggacgagcatggtatcgcagcggccctgttacccctcgtcaccgccttttgtaggaaactctcgccgggcgtgacccagtttgcctattcttgcgtgcaggagcacgtggtgtggtcaacgccgcaattttgggaagctatgttctatggggacgtgcagacccatattcgcgcactgtacctagaacccaccgaggacctcgcacctgctcaagaagttggggaagccccgagtcaggaggatgagcggtcagcgttagacgtagcttccgaacagcggcgtctctggccaacactctcccgagagaaacagcaggaattagtccagaaagaggaaagtacagtgttctcccaggctatccactatgcgaaccgtatgagttatttattgttgccactggattccagcaagtcgaggctgcttcgtgagcgcgccggcctcggggaccttgagagtgcgtctaacagcttagtcaccaatagcatggcaggatctgtggctgaatcatacgacactgagtccggcttcgaggatgctgagacctgcgacgtagcgggggctgtggtccgctttattaacaggttcgtggataaggtgtgcaccgagagtggggtgacgtctgaccacctgaaaggactgcatgttatggtgcctgacattgtacaaatgcatatcgagaccttagaggctgtgcagcgggaatcccggcggctaccacccattcaaaaacctaaactcctacgccctaggttgctaccgggagaagagtgtgtgctggatggtcttagagtgtatctgctgcctgacggcagggaggaaggcgcgggaggaagcgctgggggaccagcactgctgcccgcagaaggggccgtgttcctgacaacttacagggttatcttcactgggatgccaaccgaccccttagttggggaacaggtggtcgtcaggagcttccctgtcgctgccctgaccaaagaaaagcgcattagcgtacagacacccgtagatcagctactgcaggacgggctgcagctccgctcctgcaccttccagctgttgaaaatggcgtttgatgaggaagtcgggtctgattccgcagaattattcaggaaacaactccataagctgcggtaccctccggacatacgcgccaccttcgccttcacattagggagcgcccacacacccgggaggcccccacgggtcacaaaggataaagggccctctctgaggacgctgtcacgaaacctagttaagaatgcaaaaaagacaatcggcaggcagcacgtgacgcgcaagaaatataatccaccatcatgggaacaccgcggacagcctccccctgaggatcaagaggacgaaattagcgtatctgaggagttagaaccctctacactcacgcctagttctgctctcaagccatccgatcgtatgactatgagcagcctcgtcgagcgcgcatgttgcagagactaccagaggcttggcctgggcaccctgagcagcagccttagtagggctaaatctgaacccttcaggatttcccccgtgaacaggatgtatgctatttgccgctcgtatccaggcctgctgattgttccacagtctgtgcaggacaacgcactgcagcgcgtctcacgctgctatcggcagaaccgatttcctgtggtctgttggaggagtggccggtccaaagccgtccttttacggtctgggggactgcacggcaagggtgtcgtaggtctgtttaaggcacagaatgcgccatcccccggacagtcccaggcggacagttctagtcttgaacaggaaaagtacctgcaggccgtcgtctcttcgatgccccggtacgcagacgcatccggtcggaataccttgtcagggttctctagtgcacatatgggaagccatgggaagtggggcagcgttcgaacctcaggtcggtcttctgggctgggcactgatgtgggttcccgactggccggtcgcgacgcactggcccccccacaagcaaacggtggcccccctgacccaggatttctacggccccagagggctgcactctacatactgggggacaaggcgcaattaaaaggggtaaggagtgaccctttgcagcagtgggagcttgtccctattgaggtatttgaggcccgccaggtcaaagccagcttcaagaagcttctcaaggcctgtgttccgggatgccctgccgccgagccaagtcccgctagcttcctacgcagcttggaagattcagagtggcttatacagattcacaagctgctccaggtgtccgtgctcgtcgtggagctactggatagcggtagtagcgtcctggtgggtctggaggacgggtgggacatcaccactcaggtcgtgtccttggtgcaactccttagtgaccctttttaccggaccctggaagggtttagactgctagtcgagaaagagtggctgtctttcggccaccggttctctcaccgcggcgcacatacactggcagggcagtctagtggcttcacacctgttttcctgcagtttcttgattgcgtccatcaggttcatctgcagttccccatggaatttgaattctctcagttctaccttaagtttctgggctaccatcatgtgtcacggcgtttcaggaccttcttgctggattcagactatgagcgcatagagctagggttgctttacgaagagaaaggcgaacgcagaggacaagtaccctgccgatccgtttgggaatatgtggatcggctttctaagcggactcccgtctttcacaattacatgtacgctcccgaggacgcggaagtactgaggccctatagtaacgtgtctaatctcaaagtctgggacttctataccgaggaaaccttggcggaaggaccgccatatgattgggagctggcgcagggcccaccagagccccccgaggaggagcggtctgacgggggggcaccccaatctcggagaagggtcgtgtggccttgctatgatagctgcccaagggcccaacccgatgcaatttctagactgttagaggaacttcagcgactggaaacagaacttggccagcccgctgagaggtggaaagacacatgggaccgtgttaaggctgcccagcgactggaggggaggcccgacggtcgggggacgcctagttccctgctcgtgtccacagcgccccaccaccgtaggagcctgggggtctacctccaggagggaccagtgggttcaacactctccttgagtctcgattccgaccagagttccggttccacaacctctggaagtcgacaggctgcccgacgcagtacaagtaccctgtacagccagtttcagacagctgagtccgaaaatagatcttacgaagggacactttacaagaagggggcctttatgaaaccctggaaggctagatggttcgtgctggacaagacaaagcatcaactacgctactacgatcaccgggtggataccgagtgtaagggcgtgatcgacctcgcggaggtagaggccgtcgcccctggcacaccaacaatgggtgctcctaagacggtcgacgagaaggccttcttcgacgtgaaaaccactaggcgggtctataacttctgcgcccaggacgtcccatcagcccaacagtgggtcgatcggattcagagctgtctgtccgatgcctag

SEQ ID NO: 277695 - DNA, 5603 bp, Artificial Sequence
  derived and/or modified sequence
atggctcgcctggccgattactttgtgctggtggcgtttggaccccatcctcgaggatccggggaaggccagggtcagatacttcagagattccctgagaaagactgggaggacaacccgttccctcaaggtatcgagttgttttgtcagccatcaggatggcagctgtgcccagagaggaaccctcctacattcttcgtggcggtgctcaccgacatcaattcagaacggcattactgtgcctgtcttacattttgggaacctgcagagccgtctcaggagaccacccgagtggaagatgctactgaaagggaggaagaaggagacgagggtggacagacccatctgtcacccaccgcgccagcccctagcgctcagctttttgctcctaagaccctcgtgctcgtcagcagattagaccatactgaagtgtttagaaacagtctcggtctcatctatgcaatacacgttgaaggcttgaatgtctgtttggaaaacgtcatcggtaatctcctgacctgtactgtgcctctcgccggaggatcacagcggacaatatcgctcggcgcaggtgatagacaggtcattcagacacccctggccgattcactaccggtttcacgctgtagtgtggcactgctcttcagacagctgggcatcaccaatgtgttaagtctgttctgtgctgccctgacagagcacaaagtgctgtttctctcccgtagctaccaacgtttagccgatgcctgcaggggactcctcgctctgctgttcccgttgcgctacagcttcacgtacgtcccaatattgccggctcaattgctagaagtgctgagcacccctaccccgttcatcatcggtgtgaacgctgctttccaggctgagacgcaggaactgctggatgtgatcgtcgcagacctggatggcggaaccgtaacaatacccgagtgcgttcatatccctccacttcccgagcctcttcagtcacagacacatagtgtcctatccatggtattggaccctgaactggaactggctgatttagccttccccccaccaacgacaagcacctcctctctcaagatgcaagataaggagcttagagctgtgttcctgcgtctgtttgcccagcttctccagggctaccggtggtgtctgcatgtagtccgcatccaccctgagccagttattagatttcataaagccgctttcctcggacaacggggtttggtggaagacgactttctcatgaaagtgctggagggcatggcctttgctggatttgtgagcgaacgcggagtcccctatagacctactgacctgttcgatgagctggtcgcccacgaggtggcacgcatgcgggctgacgaaaatcaccctcagcgtgtcttgcgccacgttcaggagttagcagaacaactctataagaatgaaaatccctatcccgcagttgccatgcacaaggtccagaggccaggcgagtcttcacatctccgaagggttcctagacctttcccccgactggacgaaggcaccgtgcaatggatcgtggaccaggctgccgcaaagatgcagggtgcgccaccagccgtgaaggcagagcggagaactacggtgcctagtggtcctcctatgacagctattctggaacgttgttctggcctgcacgtgaactcagccagaagactggaggtggtccgcaactgtatctcctatgtgtttgaggggaagatgctcgaggccaaaaaactgcttcctgctgtcctcagggcactaaaaggcagagcagcgaggagatgcctggcccaagaactgcatctccacgtccagcagaacagagcggtgttagatcatcagcagttcgacttcgttgtgcgcatgatgaactgctgcctgcaggattgcacttccctggatgagcatggcatagccgctgccttactccccctcgtaacagctttttgtcgcaagctcagtcccggtgtcacacagttcgcatatagctgtgtgcaggagcacgtggtgtggagtaccccccaattttgggaagccatgttctacggcgatgtccagactcacatcagggcgctgtatttggaaccaactgaagacttggctccagcacaggaggtgggtgaagccccttcccaggaggacgagcgaagcgcgctggatgtggcctccgagcaacgtaggctctggccaacactctcccgggaaaaacagcaagagctggtgcaaaaggaggagtccaccgttttttcacaggccatccactatgctaatagaatgagttacctactcttgccgctggactccagtaagagccggttgctgagggaaagagctggactgggcgatttggaatctgcctcaaacagtttagttaccaattccatggccggaagcgttgcagaaagctatgataccgaaagcggattcgaggacgccgaaacttgtgacgtggcgggtgctgttgtgagattcatcaatcggtttgtcgataaggtttgtactgaaagtggagtgacaagcgaccatctaaagggtctccacgtcatggtcccagacatcgtccagatgcatatagaaactttggaggctgtgcaacgggagtctagaaggttgccccctatacaaaaacccaaacttttgcgcccacgactgctccctggggaagaatgcgtgctggacgggctccgtgtatatctgctccccgatggccgtgaggaaggagccggaggcagtgccggaggacccgctctgctccccgctgagggcgcagtgttcctgactacgtacagggttatcttcaccggcatgccaacggaccccctggtgggagagcaggtggttgtcagaagcttcccagtggcagcacttacaaaggagaagaggatcagtgtacagacacctgtggatcaacttttacaagacggtttgcagcttaggtcctgcacgttccagctcttaaagatggctttcgacgaagaagtggggagcgacagtgctgagctgtttagaaagcagctccataagctgagatacccccctgatataagagcaacctttgcattcacactggggtctgcccataccccagggagacctcccagagtgaccaaggacaaggggccaagcctgagaacactctctcggaacctggtcaagaatgccaagaagacaattggcaggcagcacgttacacgaaagaaatacaatcccccatcttgggaacataggggtcagcctcccccagaggaccaggaggacgaaatttctgtgtctgaagaactggagcccagtaccctcacacccagtagtgccctgaagccctccgaccgcatgaccatgtcatcactggtagagcgagcttgctgccgggattaccagcgtctcggcctgggcaccctttcttcttcgctttccagagcgaaatcagagcctttcaggatcagtccagtgaaccggatgtatgctatctgtaggtcatacccaggcctgctaattgtgccccagagcgtgcaagacaatgcgttgcaaagagtgagtcgttgttacaggcagaatcggtttcccgtggtgtgctggcgctcaggcagaagtaaggcagtgttactgagaagtggcggattgcacggaaaaggtgtggtgggacttttcaaagcacagaacgcaccgtcaccaggccaaagtcaggctgatagttcttctctggaacaggaaaaatatctccaagccgtggtatcaagcatgcccaggtatgcagatgcatcaggacggaatactctgtctggcttcagcagtgcgcatatggggtcccacggcaaatggggtagtgttagaacgtctggaagatctagtggactcgggacagatgtggggagcagactggccggtcgagacgctcttgcgcctcctcaggcgaatggaggaccccctgaccccggatttctgcgccctcagcgggctgctctttacatccttggagataaagcccaactcaagggcgtgagatctgaccctctccaacagtgggagcttgttccaatcgaggtgtttgaagctcggcaagtaaaggcctcttttaaaaagctactgaaggcatgtgtgccaggatgccctgccgctgaaccttcacctgctagctttcttaggagtttagaggacagcgagtggctgatccagatccacaagctgctgcaggtgagtgtgttagtcgtggaactgctagactccggtagtagtgtgctcgtcggtctggaggatggatgggacataacaacccaggttgtcagcttggtgcaactgctgagcgatcccttttatcgaacccttgagggatttcggcttcttgttgagaaggagtggttatcattcggacacagattctcgcacagaggagcccacaccctggccggtcaaagtagcggttttactccagtgtttctccaattcttggattgcgtccatcaagtgcacttacaattcccaatggagttcgagttttcacaattttacctgaaatttttgggttaccaccacgtttctaggagatttagaacattcctgcttgactcagactatgaacgcattgagttgggtcttctttacgaggagaaaggagagcggcgaggccaggtcccctgccgatccgtatgggagtacgtggacagactctccaagaggactcctgttttccacaattatatgtacgcccctgaggatgccgaggttctccgcccttactccaacgtttccaacttaaaagtctgggatttctacaccgaagagacactagctgagggacccccatacgattgggaactagctcagggtccacccgagccgcctgaagaggaacggtctgacggtggcgctcctcagtccaggcggagagtcgtctggccgtgctatgatagttgtccacgcgctcagcccgacgccatctcgcgtctgctcgaagaactccagcgtctggagaccgagttagggcagcccgcagagcggtggaaggacacctgggaccgggtaaaggccgctcagaggttggaaggccgacccgacggcagaggtactccgtcctctctgctggtgtctaccgcccctcaccataggcggtccctgggggtctatctccaagagggacccgtgggctcgacactgtctctgagtctcgactctgatcagtcctcaggcagcacaacatccggctctcgtcaggctgctcgcaggtcaacaagtaccctgtatagccaatttcagacggccgaatcagagaatcgctcctacgagggaacgctgtacaagaagggtgccttcatgaaaccatggaaagcgaggtggttcgtgctcgacaaaacaaaacatcaacttagatattatgaccatcgcgtggacactgagtgtaagggggtgatcgacctggccgaggtggaagcggtggccccaggcacccctacgatgggtgctcccaagaccgttgatgagaaggccttcttcgatgttaaaaccactaggagagtgtacaacttctgtgcccaggatgtaccaagtgcccagcaatgggtcgatcggatccagtcttgccttagtgatgctta

SEQ ID NO: 277696 - DNA, 5789 bp, Artificial Sequence
  derived and/or modified sequence
gctggctgggaagatggcggcgggaacctgggccgccgccgccgccgccgccgccgccgcggagcgaaccaggggtgtccggggtgcgcggtccagggccggggccgggccatgagcgcgccgtcctcgagtccccgagccgcggagcccgcccgcgcccctcgggccgccccgcgtccctcgccatggcgcggctcgcggactacttcgtgctggtggcgttcgggccgcacccgcgcgggagtggggaaggccagggccagattctgcagcgcttcccagagaaggactgggaggacaacccattcccccagggcatcgagctgttttgccagcccagcgggtggcagctgtgtcccgagaggaatccaccgaccttctttgttgctgtcctcaccgacatcaactccgagcgccactactgcgcctgcttgaccttctgggagccagcggagccttcacaggaaacgacgcgcgtggaggatgccacagagagggaggaagagggggatgagggaggccagacccacctgtctcccacagcacctgccccatctgcccagctgtttgcaccgaagacgctggtactggtgtcgcgactcgaccacacggaggtgttcaggaacagccttggcctcatctatgccatccacgtggagggcctgaatgtgtgcctggagaacgtgattgggaacctgctgacgtgcactgtgcccctggctgggggctcgcagaggacgatctctttgggggctggtgaccggcaggtcatccagactccactggccgactcgctgcccgtcagccgctgcagcgtggccctgctcttccgccagctaggcatcaccaacgtgctgtctttgttctgtgccgccctcacggagcacaaggttctcttcctgtcccggagctaccagcggctcgccgatgcctgtaggggcctcctggcactgctgtttcctctcagatacagcttcacctatgtgcccatcctgccggctcagctgctggaggtcctcagcacacccacgcccttcatcattggggtcaacgcggccttccaggcagagacccaggagctgctcgatgtgattgttgctgatctggatggagggacggtcaccattcctgagtgtgtgcacattccacccttgccagagccactgcagagtcagacgcacagtgtgctgagcatggtcctggacccggagctggagttggctgacctcgccttccctccgcccacgacatccacctcctccctgaagatgcaggacaaggagctgcgcgcggtcttcctgcggctgttcgctcagctgctgcagggctatcgctggtgcctgcacgtcgtgcgcatccacccggagcctgtcatccgcttccataaggcagccttcctgggccagcgtgggctggtagaggacgatttcctgatgaaggtgctggagggcatggcctttgctggctttgtgtcagagcgtggggtcccataccgccctacggacctgttcgatgagctggtggcccacgaggtggcaaggatgcgggcggatgagaaccacccccagcgtgtcctgcgtcacgtccaggaactggcagagcagctctacaagaacgagaacccgtacccagccgtggcgatgcacaaggtacagaggcccggtgagagcagccacctgcgacgggtgccccgacccttcccccggctggatgagggcaccgtgcagtggatcgtggaccaggctgcagccaagatgcagggtgcacccccagctgtgaaggccgagaggaggaccaccgtgccctcagggccccccatgactgccatactggagcggtgcagtgggctgcatgtcaacagcgcccggcggctggaggttgtgcgcaactgcatctcctacgtgtttgaggggaaaatgcttgaggccaagaagctgctcccagccgtgttgagggccctgaaggggcgagctgcccgccgctgcctcgcccaggagctgcacctgcatgtgcagcagaaccgtgcggtcctggaccaccagcagtttgactttgtcgtccgtatgatgaactgctgcctgcaggactgcacttctctggacgagcatggcattgcggcggctctgctgcctctggtcacagccttctgccggaagctgagcccgggggtgacgcagtttgcatacagctgtgtgcaggagcacgtggtgtggagcacgccacagttctgggaggccatgttctatggggatgtgcagactcacatccgggccctctacctggagcccacggaggacctggcccccgcccaggaggttggggaggcaccttcccaggaggacgagcgctctgccctagacgtggcttctgagcagcggcgcttgtggccaactctgagtcgtgagaagcagcaggagctggtgcagaaggaggagagcacggtgttcagccaggccatccactatgccaaccgcatgagctacctcctcctgcccctggacagcagcaagagccgcctacttcgggagcgtgccgggctgggcgacctggagagcgccagcaacagcctggtcaccaacagcatggctggcagtgtggccgagagctatgacacggagagcggcttcgaggatgcagagacctgcgacgtagctggggctgtggtccgcttcatcaaccgctttgtggacaaggtctgcacggagagtggggtcaccagcgaccacctcaaggggctgcatgtcatggtgccagacattgtccagatgcacatcgagaccctggaggccgtgcagcgggagagccggaggctgccgcccatccagaagcccaagctgctgcggccgcgcctgctgccgggtgaggagtgtgtgctggacggcctgcgcgtctacctgctgccggatgggcgtgaggagggcgcggggggcagtgctgggggaccagcattgctcccagctgagggcgccgtcttcctcaccacgtaccgggtcatcttcacggggatgcccacggaccccctggttggggagcaggtggtggtccgctccttcccggtggctgcgctgaccaaggagaagcgcatcagcgtccagacccctgtggaccagctcctgcaggacgggctccagctgcgctcctgcacattccagctgctgaaaatggcctttgacgaggaggtggggtctgacagcgccgagctcttccgtaagcagctgcataagctgcggtacccgccggacatcagggccacctttgcgttcaccttgggctctgcccacacacctggccggccaccgcgagtcaccaaggacaagggtccttccctcagaaccctgtcccggaacctggtcaagaacgccaagaagaccatcgggcggcagcatgtcactcgcaagaagtacaacccccccagctgggagcaccggggccagccgccccctgaggaccaggaggacgagatctcagtgtcggaggagctggagcccagcacgctgaccccgtcctcagccctgaagccctccgaccgcatgaccatgagcagcctggtggaaagggcttgctgtcgcgactaccagcgcctcggtctgggcaccctgagcagcagcctgagccgggccaagtctgagcccttccgcatttctccggtcaaccgcatgtatgccatctgccgcagctacccagggctgctgatcgtgccccagagtgtccaggacaacgccctgcagcgcgtgtcccgctgctaccgccagaaccgcttccccgtggtctgctggcgcagcgggcggtccaaggcggtgctgctgcgctctggaggcctgcatggcaaaggtgtcgtcggcctcttcaaggcccagaacgcaccttctccaggccagtcccaggcggactcgagtagcctggagcaggagaagtacctgcaggctgtggtcagctccatgccccgctacgccgacgcgtcgggacgcaacacgcttagcggcttctcctcagcccacatgggcagtcacggtaagtggggcagtgtccggaccagtggacgcagcagtggccttggcaccgatgtgggctcccggctagctggcagagacgcgctggccccaccccaggccaacgggggccctcccgacccgggcttcctgcgtccgcagcgagcagccctctatatccttggggacaaagcccagctcaagggtgtgcggtcagaccccctgcagcagtgggagctggtgcccattgaggtattcgaggcacggcaggtgaaggctagcttcaagaagctgctgaaagcatgtgtcccaggctgccccgctgctgagcccagcccagcctccttcctgcgctcactggaggactcagagtggctgatccagatccacaagctgctgcaggtgtctgtgctggtggtggagctcctggattcaggctcctccgtgctggtgggcctggaggatggctgggacatcaccacccaggtggtatccttggtgcagctgctctcagaccccttctaccgcacgctggagggctttcgcctgctggtggagaaggagtggctgtccttcggccatcgcttcagccaccgtggagctcacaccctggccgggcagagcagcggcttcacacccgtcttcctgcagttcctggactgcgtacaccaggtccacctgcagttccccatggagtttgagttcagccagttctacctcaagttcctcggctaccaccatgtgtcccgccgtttccggaccttcctgctcgactctgactatgagcgcattgagctggggctgctgtatgaggagaagggggaacgcaggggccaggtgccgtgcaggtctgtgtgggagtatgtggaccggctgagcaagaggacgcctgtgttccacaattacatgtatgcgcccgaggacgcagaggtcctgcggccctacagcaacgtgtccaacctgaaggtgtgggacttctacactgaggagacgctggccgagggccctccctatgactgggaactggcccaggggccccctgaacccccagaggaagaacggtctgatggaggcgctccccagagcaggcgccgcgtggtgtggccctgttacgacagctgcccgcgggcccagcctgacgccatctcacgcctgctggaggagctgcagaggctggagacagagttgggccaacccgctgagcgctggaaggacacctgggaccgggtgaaggctgcacagcgcctcgagggccggccagacggccgtggcacccctagctccctccttgtgtccaccgcaccccaccaccgtcgctcgctgggtgtgtacctgcaggaggggcccgtgggctccaccctgagcctcagcctggacagcgaccagagtagtggctcaaccacatccggctcccgtcaggctgcccgccgcagcaccagcaccctgtacagccagttccagacagcagagagtgagaacaggtcctacgagggcactctgtacaagaagggggccttcatgaagccttggaaggcccgctggttcgtgctggacaagaccaagcaccagctgcgctactacgaccaccgtgtggacacagagtgcaagggtgtcatcgacttggcggaggtggaggctgtggcacctggcacgcccactatgggtgcccctaagactgtggacgagaaggccttctttgacgtgaagacaacgcgtcgcgtttacaacttctgtgcccaggacgtgccctcggcccagcagtgggtggaccggatccagagctgcctgtcggacgcctga

SEQ ID NO: 277697 - DNA, 5604 bp, Artificial Sequence
  derived and/or modified sequence
atggccagactggccgactacttcgtgctggtggccttcggcccccaccccagaggcagcggcgagggccagggccagatcctgcagagattccccgagaaggactgggaggacaaccccttcccccagggcatcgagctgttctgccagcccagcggctggcagctgtgccccgagagaaacccccccaccttcttcgtggccgtgctgaccgacatcaacagcgagagacactactgcgcctgcctgaccttctgggagcccgccgagcccagccaggagaccaccagagtggaggacgccaccgagagagaggaggagggcgacgagggcggccagacccacctgagccccaccgcccccgcccccagcgcccagctgttcgcccccaagaccctggtgctggtgagcagactggaccacaccgaggtgttcagaaacagcctgggcctgatctacgccatccacgtggagggcctgaacgtgtgcctggagaacgtgatcggcaacctgctgacctgcaccgtgcccctggccggcggcagccagagaaccatcagcctgggcgccggcgacagacaggtgatccagacccccctggccgacagcctgcccgtgagcagatgcagcgtggccctgctgttcagacagctgggcatcaccaacgtgctgagcctgttctgcgccgccctgaccgagcacaaggtgctgttcctgagcagaagctaccagagactggccgacgcctgcagaggcctgctggccctgctgttccccctgagatacagcttcacctacgtgcccatcctgcccgcccagctgctggaggtgctgagcacccccacccccttcatcatcggcgtgaacgccgccttccaggccgagacccaggagctgctggacgtgatcgtggccgacctggacggcggcaccgtgaccatccccgagtgcgtgcacatcccccccctgcccgagcccctgcagagccagacccacagcgtgctgagcatggtgctggaccccgagctggagctggccgacctggccttccccccccccaccaccagcaccagcagcctgaagatgcaggacaaggagctgagagccgtgttcctgagactgttcgcccagctgctgcagggctacagatggtgcctgcacgtggtgagaatccaccccgagcccgtgatcagattccacaaggccgccttcctgggccagagaggcctggtggaggacgacttcctgatgaaggtgctggagggcatggccttcgccggcttcgtgagcgagagaggcgtgccctacagacccaccgacctgttcgacgagctggtggcccacgaggtggccagaatgagagccgacgagaaccacccccagagagtgctgagacacgtgcaggagctggccgagcagctgtacaagaacgagaacccctaccccgccgtggccatgcacaaggtgcagagacccggcgagagcagccacctgagaagagtgcccagacccttccccagactggacgagggcaccgtgcagtggatcgtggaccaggccgccgccaagatgcagggcgccccccccgccgtgaaggccgagagaagaaccaccgtgcccagcggcccccccatgaccgccatcctggagagatgcagcggcctgcacgtgaacagcgccagaagactggaggtggtgagaaactgcatcagctacgtgttcgagggcaagatgctggaggccaagaagctgctgcccgccgtgctgagagccctgaagggcagagccgccagaagatgcctggcccaggagctgcacctgcacgtgcagcagaacagagccgtgctggaccaccagcagttcgacttcgtggtgagaatgatgaactgctgcctgcaggactgcaccagcctggacgagcacggcatcgccgccgccctgctgcccctggtgaccgccttctgcagaaagctgagccccggcgtgacccagttcgcctacagctgcgtgcaggagcacgtggtgtggagcaccccccagttctgggaggccatgttctacggcgacgtgcagacccacatcagagccctgtacctggagcccaccgaggacctggcccccgcccaggaggtgggcgaggcccccagccaggaggacgagagaagcgccctggacgtggccagcgagcagagaagactgtggcccaccctgagcagagagaagcagcaggagctggtgcagaaggaggagagcaccgtgttcagccaggccatccactacgccaacagaatgagctacctgctgctgcccctggacagcagcaagagcagactgctgagagagagagccggcctgggcgacctggagagcgccagcaacagcctggtgaccaacagcatggccggcagcgtggccgagagctacgacaccgagagcggcttcgaggacgccgagacctgcgacgtggccggcgccgtggtgagattcatcaacagattcgtggacaaggtgtgcaccgagagcggcgtgaccagcgaccacctgaagggcctgcacgtgatggtgcccgacatcgtgcagatgcacatcgagaccctggaggccgtgcagagagagagcagaagactgccccccatccagaagcccaagctgctgagacccagactgctgcccggcgaggagtgcgtgctggacggcctgagagtgtacctgctgcccgacggcagagaggagggcgccggcggcagcgccggcggccccgccctgctgcccgccgagggcgccgtgttcctgaccacctacagagtgatcttcaccggcatgcccaccgaccccctggtgggcgagcaggtggtggtgagaagcttccccgtggccgccctgaccaaggagaagagaatcagcgtgcagacccccgtggaccagctgctgcaggacggcctgcagctgagaagctgcaccttccagctgctgaagatggccttcgacgaggaggtgggcagcgacagcgccgagctgttcagaaagcagctgcacaagctgagatacccccccgacatcagagccaccttcgccttcaccctgggcagcgcccacacccccggcagaccccccagagtgaccaaggacaagggccccagcctgagaaccctgagcagaaacctggtgaagaacgccaagaagaccatcggcagacagcacgtgaccagaaagaagtacaacccccccagctgggagcacagaggccagcccccccccgaggaccaggaggacgagatcagcgtgagcgaggagctggagcccagcaccctgacccccagcagcgccctgaagcccagcgacagaatgaccatgagcagcctggtggagagagcctgctgcagagactaccagagactgggcctgggcaccctgagcagcagcctgagcagagccaagagcgagcccttcagaatcagccccgtgaacagaatgtacgccatctgcagaagctaccccggcctgctgatcgtgccccagagcgtgcaggacaacgccctgcagagagtgagcagatgctacagacagaacagattccccgtggtgtgctggagaagcggcagaagcaaggccgtgctgctgagaagcggcggcctgcacggcaagggcgtggtgggcctgttcaaggcccagaacgcccccagccccggccagagccaggccgacagcagcagcctggagcaggagaagtacctgcaggccgtggtgagcagcatgcccagatacgccgacgccagcggcagaaacaccctgagcggcttcagcagcgcccacatgggcagccacggcaagtggggcagcgtgagaaccagcggcagaagcagcggcctgggcaccgacgtgggcagcagactggccggcagagacgccctggcccccccccaggccaacggcggcccccccgaccccggcttcctgagaccccagagagccgccctgtacatcctgggcgacaaggcccagctgaagggcgtgagaagcgaccccctgcagcagtgggagctggtgcccatcgaggtgttcgaggccagacaggtgaaggccagcttcaagaagctgctgaaggcctgcgtgcccggctgccccgccgccgagcccagccccgccagcttcctgagaagcctggaggacagcgagtggctgatccagatccacaagctgctgcaggtgagcgtgctggtggtggagctgctggacagcggcagcagcgtgctggtgggcctggaggacggctgggacatcaccacccaggtggtgagcctggtgcagctgctgagcgaccccttctacagaaccctggagggcttcagactgctggtggagaaggagtggctgagcttcggccacagattcagccacagaggcgcccacaccctggccggccagagcagcggcttcacccccgtgttcctgcagttcctggactgcgtgcaccaggtgcacctgcagttccccatggagttcgagttcagccagttctacctgaagttcctgggctaccaccacgtgagcagaagattcagaaccttcctgctggacagcgactacgagagaatcgagctgggcctgctgtacgaggagaagggcgagagaagaggccaggtgccctgcagaagcgtgtgggagtacgtggacagactgagcaagagaacccccgtgttccacaactacatgtacgcccccgaggacgccgaggtgctgagaccctacagcaacgtgagcaacctgaaggtgtgggacttctacaccgaggagaccctggccgagggccccccctacgactgggagctggcccagggcccccccgagccccccgaggaggagagaagcgacggcggcgccccccagagcagaagaagagtggtgtggccctgctacgacagctgccccagagcccagcccgacgccatcagcagactgctggaggagctgcagagactggagaccgagctgggccagcccgccgagagatggaaggacacctgggacagagtgaaggccgcccagagactggagggcagacccgacggcagaggcacccccagcagcctgctggtgagcaccgccccccaccacagaagaagcctgggcgtgtacctgcaggagggccccgtgggcagcaccctgagcctgagcctggacagcgaccagagcagcggcagcaccaccagcggcagcagacaggccgccagaagaagcaccagcaccctgtacagccagttccagaccgccgagagcgagaacagaagctacgagggcaccctgtacaagaagggcgccttcatgaagccctggaaggccagatggttcgtgctggacaagaccaagcaccagctgagatactacgaccacagagtggacaccgagtgcaagggcgtgatcgacctggccgaggtggaggccgtggcccccggcacccccaccatgggcgcccccaagaccgtggacgagaaggccttcttcgacgtgaagaccaccagaagagtgtacaacttctgcgcccaggacgtgcccagcgcccagcagtgggtggacagaatccagagctgcctgagcgacgcctag

SEQ ID NO: 277698 - protein, 4374 aa, Artificial Sequence
  derived and/or modified sequence
MKVDRTKLKKTPTEAPADCRALIDKLKVCNDEQLLLELQQIKTWNIGKCELYHWVDLLDRFDGILADAGQTVENMSWMLVCDRPEREQLKMLLLAVLNFTALLIEYSFSRHLYSSIEHLTTLLASSDMQVVLAVLNLLYVFSKRSNYITRLGSDKRTPLLTRLQHLAESWGGKENGFGLAECCRDLHMMKYPPSATTLHFEFYADPGAEVKIEKRTTSNTLHYIHIEQLDKISESPSEIMESLTKMYSIPKDKQMLLFTHIRLAHGFSNHRKRLQAVQARLHAISILVYSNALQESANSILYNGLIEELVDVLQITDKQLMEIKAASLRTLTSIVHLERTPKLSSIIDCTGTASYHGFLPVLVRNCIQAMIDPSMDPYPHQFATALFSFLYHLASYDAGGEALVSCGMMEALLKVIKFLGDEQDQITFVTRAVRVVDLITNLDMAAFQSHSGLSIFIYRLEHEVDLCRKECPFVIKPKIQRPNTTQEGEEMETDMDGVQCIPQRAALLKSMLNFLKKAIQDPAFSDGIRHVMDGSLPTSLKHIISNAEYYGPSLFLLATEVVTVFVFQEPSLLSSLQDNGLTDVMLHALLIKDVPATREVLGSLPNVFSALCLNARGLQSFVQCQPFERLFKVLLSPDYLPAMRRRRSSDPLGDTASNLGSAVDELMRHQPTLKTDATTAIIKLLEEICNLGRDPKYICQKPSIQKADGTATAPPPRSNHAAEEASSEDEEEEEVQAMQSFNSTQQNETEPNQQVVGTEERIPIPLMDYILNVMKFVESILSNNTTDDHCQEFVNQKGLLPLVTILGLPNLPIDFPTSAACQAVAGVCKSILTLSHEPKVLQEGLLQLDSILSSLEPLHRPIESPGGSVLLRELACAGNVADATLSAQATPLLHALTAAHAYIMMFVHTCRVGQSEIRSISVNQWGSQLGLSVLSKLSQLYCSLVWESTVLLSLCTPNSLPSGCEFGQADMQKLVPKDEKAGTTQGGKRSDGEQDGAAGSMDASTQGLLEGIGLDGDTLAPMETDEPTASDSKGKSKITPAMAARIKQIKPLLSASSRLGRALAELFGLLVKLCVGSPVRQRRSHHAASTTTAPTPAARSTASALTKLLTKGLSWQPPPYTPTPRFRLTFFICSVGFTSPMLFDERKYPYHLMLQKFLCSGGHNALFETFNWALSMGGKVPVSEGLEHSDLPDGTGEFLDAWLMLVEKMVNPTTVLESPHSLPAKLPGGVQNFPQFSALRFLVVTQKAAFTCIKNLWNRKPLKVYGGRMAESMLAILCHILRGEPVIRERLSKEKEGSRGEEDTGQEEGGSRREPQVNQQQLQQLMDMGFTREHAMEALLNTSTMEQATEYLLTHPPPIMGGVVRDLSMSEEDQMMRAIAMSLGQDIPMDQRAESPEEVACRKEEEERKAREKQEEEEAKCLEKFQDADPLEQDELHTFTDTMLPGCFHLLDELPDTVYRVCDLIMTAIKRNGADYRDMILKQVVNQVWEAADVLIKAALPLTTSDTKTVSEWISQMATLPQASNLATRILLLTLLFEELKLPCAWVVESSGILNVLIKLLEVVQPCLQAAKEQKEVQTPKWITPVLLLIDFYEKTAISSKRRAQMTKYLQSNSNNWRWFDDRSGRWCSYSASNNSTIDSAWKSGETSVRFTAGRRRYTVQFTTMVQVNEETGNRRPVMLTLLRVPRLNKNSKNSNGQELEKTLEESKEMDIKRKENKGNDTPLALESTNTEKETSLEETKIGEILIQGLTEDMVTVLIRACVSMLGVPVDPDTLHATLRLCLRLTRDHKYAMMFAELKSTRMILNLTQSSGFNGFTPLVTLLLRHIIEDPCTLRHTMEKVVRSAATSGAGSTTSGVVSGSLGSREINYILRVLGPAACRNPDIFTEVANCCIRIALPAPRGSGTASDDEFENLRIKGPNAVQLVKTTPLKPSPLPVIPDTIKEVIYDMLNALAAYHAPEEADKSDPKPGVMTQEVGQLLQDMGDDVYQQYRSLTRQSSDFDTQSGFSINSQVFAADGASTETSASGTSQGEASTPEESRDGKKDKEGDRASEEGKQKGKGSKPLMPTSTILRLLAELVRSYVGIATLIANYSYTVGQSELIKEDCSVLAFVLDHLLPHTQNAEDKDTPALARLFLASLAAAGSGTDAQVALVNEVKAALGRALAMAESTEKHARLQAVMCIISTIMESCPSTSSFYSSATAKTQHNGMNNIIRLFLKKGLVNDLARVPHSLDLSSPNMANTVNAALKPLETLSRIVNQPSSLFGSKSASSKNKSEQDAQGASQDSSSNQQDPGEPGEAEVQEEDHDVTQTEVADGDIMDGEAETDSVVIAGQPEVLSSQEMQVENELEDLIDELLERDGGSGNSTIIVSRSGEDESQEDVLMDEAPSNLSQASTLQANREDSMNILDPEDEEEHTQEEDSSGSNEDEDDSQDEEEEEEEDEEDDQEDDEGEEGDEDDDDDGSEMELDEDYPDMNASPLVRFERFDREDDLIIEFDNMFSSATDIPPSPGNIPTTHPLMVRHADHSSLTLGSGSSTTRLTQGIGRSQRTLRQLTANTGHTIHVHYPGNRQPNPPLILQRLLGPSAAADILQLSSSLPLQSRGRARLLVGNDDVHIIARSDDELLDDFFHDQSTATSQAGTLSSIPTALTRWTEECKVLDAESMHDCVSVVKVSIVNHLEFLRDEELEERREKRRKQLAEEETKITDKGKEDKENRDQSAQCTASKSNDSTEQNLSDGTPMPDSYPTTPSSTDAATSESKETLGTLQSSQQQPTLPTPPALGEVPQELQSPAGEGGSSTQLLMPVEPEELGPTRPSGEAETTQMELSPAPTITSLSPERAEDSDALTAVSSQLEGSPMDTSSLASCTLEEAVGDTSAAGSSEQPRAGSSTPGDAPPAVAEVQGRSDGSGESAQPPEDSSPPASSESSSTRDSAVAISGADSRGILEEPLPSTSSEEEDPLAGISLPEGVDPSFLAALPDDIRREVLQNQLGIRPPTRTAPSTNSSAPAVVGNPGVTEVSPEFLAALPPAIQEEVLAQQRAEQQRRELAQNASSDTPMDPVTFIQTLPSDLRRSVLEDMEDSVLAVMPPDIAAEAQALRREQEARQRQLMHERLFGHSSTSALSAILRSPAFTSRLSGNRGVQYTRLAVQRGGTFQMGGSSSHNRPSGSNVDTLLRLRGRLLLDHEALSCLLVLLFVDEPKLNTSRLHRVLRNLCYHAQTRHWVIRSLLSILQRSSESELCIETPKLTTSEEKGKKSSKSCGSSSHENRPLDLLHKMESKSSNQLSWLSVSMDAALGCRTNIFQIQRSGGRKHTEKHASGGSTVHIHPQAAPVVCRHVLDTLIQLAKVFPSHFTQQRTKETNCESDRERGNKACSPCSSQSSSSGICTDFWDLLVKLDNMNVSRKGKNSVKSVPVSAGGEGETSPYSLEASPLGQLMNMLSHPVIRRSSLLTEKLLRLLSLISIALPENKVSEAQANSGSGASSTTTATSTTSTTTTTAASTTPTPPTAPTPVTSAPALVAATAISTIVVAASTTVTTPTTATTTVSISPTTKGSKSPAKVSDGGSSSTDFKMVSSGLTENQLQLSVEVLTSHSCSEEGLEDAANVLLQLSRGDSGTRDTVLKLLLNGARHLGYTLCKQIGTLLAELREYNLEQQRRAQCETLSPDGLPEEQPQTTKLKGKMQSRFDMAENVVIVASQKRPLGGRELQLPSMSMLTSKTSTQKFFLRVLQVIIQLRDDTRRANKKAKQTGRLGSSGLGSASSIQAAVRQLEAEADAIIQMVREGQRARRQQQAATSESSQSEASVRREESPMDVDQPSPSAQDTQSIASDGTPQGEKEKEERPPELPLLSEQLSLDELWDMLGECLKELEESHDQHAVLVLQPAVEAFFLVHATERESKPPVRDTRESQLAHIKDEPPPLSPAPLTPATPSSLDPFFSREPSSMHISSSLPPDTQKFLRFAETHRTVLNQILRQSTTHLADGPFAVLVDYIRVLDFDVKRKYFRQELERLDEGLRKEDMAVHVRRDHVFEDSYRELHRKSPEEMKNRLYIVFEGEEGQDAGGLLREWYMIISREMFNPMYALFRTSPGDRVTYTINPSSHCNPNHLSYFKFVGRIVAKAVYDNRLLECYFTRSFYKHILGKSVRYTDMESEDYHFYQGLVYLLENDVSTLGYDLTFSTEVQEFGVCEVRDLKPNGANILVTEENKKEYVHLVCQMRMTGAIRKQLAAFLEGFYEIIPKRLISIFTEQELELLISGLPTIDIDDLKSNTEYHKYQSNSIQIQWFWRALRSFDQADRAKFLQFVTGTSKVPLQGFAALEGMNGIQKFQIHRDDRSTDRLPSAHTCFNQLDLPAYESFEKLRHMLLLAIQECSEGFGLA

SEQ ID NO: 277699 - protein, 1672 aa, Artificial Sequence
  derived and/or modified sequence
MKVDRTKLKKTPTEAPADCRALIDKLKVCNDEQLLLELQQIKTWNIGKCELYHWVDLLDRFDGILADAGQTVENMSWMLVCDRPEREQLKMLLLAVLNFTALLIEYSFSRHLYSSIEHLTTLLASSDMQVVLAVLNLLYVFSKRSNYITRLGSDKRTPLLTRLQHLAESWGGKENGFGLAECCRDLHMMKYPPSATTLHFEFYADPGAEVKIEKRTTSNTLHYIHIEQLDKISESPSEIMESLTKMYSIPKDKQMLLFTHIRLAHGFSNHRKRLQAVQARLHAISILVYSNALQESANSILYNGLIEELVDVLQITDKQLMEIKAASLRTLTSIVHLERTPKLSSIIDCTGTASYHGFLPVLVRNCIQAMIDPSMDPYPHQFATALFSFLYHLASYDAGGEALVSCGMMEALLKVIKFLGDEQDQITFVTRAVRVVDLITNLDMAAFQSHSGLSIFIYRLEHEVDLCRKECPFVIKPKIQRPNTTQEGEEMETDMDGVQCIPQRAALLKSMLNFLKKAIQDPAFSDGIRHVMDGSLPTSLKHIISNAEYYGPSLFLLATEVVTVFVFQEPSLLSSLQDNGLTDVMLHALLIKDVPATREVLGSLPNVFSALCLNARGLQSFVQCQPFERLFKVLLSPDYLPAMRRRRSSDPLGDTASNLGSAVDELMRHQPTLKTDATTAIIKLLEEICNLGRDPKYICQKPSIQKADGTATAPPPRSNHAAEEASSEDEEEEEVQAMQSFNSTQQNETEPNQQVVGTEERIPIPLMDYILNVMKFVESILSNNTTDDHCQEFVNQKGLLPLVTILGLPNLPIDFPTSAACQAVAGVCKSILTLSHEPKVLQEGLLQLDSILSSLEPLHRPIESPGGSVLLRELACAGNVADATLSAQATPLLHALTAAHAYIMMFVHTCRVGQSEIRSISVNQWGSQLGLSVLSKLSQLYCSLVWESTVLLSLCTPNSLPSGCEFGQADMQKLVPKDEKAGTTQGGKRSDGEQDGAAGSMDASTQGLLEGIGLDGDTLAPMETDEPTASDSKGKSKITPAMAARIKQIKPLLSASSRLGRALAELFGLLVKLCVGSPVRQRRSHHAASTTTAPTPAARSTASALTKLLTKGLSWQPPPYTPTPRFRLTFFICSVGFTSPMLFDERKYPYHLMLQKFLCSGGHNALFETFNWALSMGGKVPVSEGLEHSDLPDGTGEFLDAWLMLVEKMVNPTTVLESPHSLPAKLPGGVQNFPQFSALRFLVVTQKAAFTCIKNLWNRKPLKVYGGRMAESMLAILCHILRGEPVIRERLSKEKEGSRGEEDTGQEEGGSRREPQVNQQQLQQLMDMGFTREHAMEALLNTSTMEQATEYLLTHPPPIMGGVVRDLSMSEEDQMMRAIAMSLGQDIPMDQRAESPEEVACRKEEEERKAREKQEEEEAKCLEKFQDADPLEQDELHTFTDTMLPGCFHLLDELPDTVYRVCDLIMTAIKRNGADYRDMILKQVVNQVWEAADVLIKAALPLTTSDTKTVSEWISQMATLPQASNLATRILLLTLLFEELKLPCAWVVESSGILNVLIKLLEVVQPCLQAAKEQKEVQTPKWITPVLLLIDFYEKTAISSKRRAQMTKYLQSNSNNWRWFDDRSGRWCSYSASNNSTIDSAWKSGETSVRFTAGRRRYTVQFTTMVQGTSAE

SEQ ID NO: 277700 - DNA, 13125 bp, Artificial Sequence
  derived and/or modified sequence
atgaaggtggacagaaccaagctgaagaagacccccaccgaggcccccgccgactgcagagccctgatcgacaagctgaaggtgtgcaacgacgagcagctgctgctggagctgcagcagatcaagacctggaacatcggcaagtgcgagctgtaccactgggtggacctgctggacagattcgacggcatcctggccgacgccggccagaccgtggagaacatgagctggatgctggtgtgcgacagacccgagagagagcagctgaagatgctgctgctggccgtgctgaacttcaccgccctgctgatcgagtacagcttcagcagacacctgtacagcagcatcgagcacctgaccaccctgctggccagcagcgacatgcaggtggtgctggccgtgctgaacctgctgtacgtgttcagcaagagaagcaactacatcaccagactgggcagcgacaagagaacccccctgctgaccagactgcagcacctggccgagagctggggcggcaaggagaacggcttcggcctggccgagtgctgcagagacctgcacatgatgaagtacccccccagcgccaccaccctgcacttcgagttctacgccgaccccggcgccgaggtgaagatcgagaagagaaccaccagcaacaccctgcactacatccacatcgagcagctggacaagatcagcgagagccccagcgagatcatggagagcctgaccaagatgtacagcatccccaaggacaagcagatgctgctgttcacccacatcagactggcccacggcttcagcaaccacagaaagagactgcaggccgtgcaggccagactgcacgccatcagcatcctggtgtacagcaacgccctgcaggagagcgccaacagcatcctgtacaacggcctgatcgaggagctggtggacgtgctgcagatcaccgacaagcagctgatggagatcaaggccgccagcctgagaaccctgaccagcatcgtgcacctggagagaacccccaagctgagcagcatcatcgactgcaccggcaccgccagctaccacggcttcctgcccgtgctggtgagaaactgcatccaggccatgatcgaccccagcatggacccctacccccaccagttcgccaccgccctgttcagcttcctgtaccacctggccagctacgacgccggcggcgaggccctggtgagctgcggcatgatggaggccctgctgaaggtgatcaagttcctgggcgacgagcaggaccagatcaccttcgtgaccagagccgtgagagtggtggacctgatcaccaacctggacatggccgccttccagagccacagcggcctgagcatcttcatctacagactggagcacgaggtggacctgtgcagaaaggagtgccccttcgtgatcaagcccaagatccagagacccaacaccacccaggagggcgaggagatggagaccgacatggacggcgtgcagtgcatcccccagagagccgccctgctgaagagcatgctgaacttcctgaagaaggccatccaggaccccgccttcagcgacggcatcagacacgtgatggacggcagcctgcccaccagcctgaagcacatcatcagcaacgccgagtactacggccccagcctgttcctgctggccaccgaggtggtgaccgtgttcgtgttccaggagcccagcctgctgagcagcctgcaggacaacggcctgaccgacgtgatgctgcacgccctgctgatcaaggacgtgcccgccaccagagaggtgctgggcagcctgcccaacgtgttcagcgccctgtgcctgaacgccagaggcctgcagagcttcgtgcagtgccagcccttcgagagactgttcaaggtgctgctgagccccgactacctgcccgccatgagaagaagaagaagcagcgaccccctgggcgacaccgccagcaacctgggcagcgccgtggacgagctgatgagacaccagcccaccctgaagaccgacgccaccaccgccatcatcaagctgctggaggagatctgcaacctgggcagagaccccaagtacatctgccagaagcccagcatccagaaggccgacggcaccgccaccgcccccccccccagaagcaaccacgccgccgaggaggccagcagcgaggacgaggaggaggaggaggtgcaggccatgcagagcttcaacagcacccagcagaacgagaccgagcccaaccagcaggtggtgggcaccgaggagagaatccccatccccctgatggactacatcctgaacgtgatgaagttcgtggagagcatcctgagcaacaacaccaccgacgaccactgccaggagttcgtgaaccagaagggcctgctgcccctggtgaccatcctgggcctgcccaacctgcccatcgacttccccaccagcgccgcctgccaggccgtggccggcgtgtgcaagagcatcctgaccctgagccacgagcccaaggtgctgcaggagggcctgctgcagctggacagcatcctgagcagcctggagcccctgcacagacccatcgagagccccggcggcagcgtgctgctgagagagctggcctgcgccggcaacgtggccgacgccaccctgagcgcccaggccacccccctgctgcacgccctgaccgccgcccacgcctacatcatgatgttcgtgcacacctgcagagtgggccagagcgagatcagaagcatcagcgtgaaccagtggggcagccagctgggcctgagcgtgctgagcaagctgagccagctgtactgcagcctggtgtgggagagcaccgtgctgctgagcctgtgcacccccaacagcctgcccagcggctgcgagttcggccaggccgacatgcagaagctggtgcccaaggacgagaaggccggcaccacccagggcggcaagagaagcgacggcgagcaggacggcgccgccggcagcatggacgccagcacccagggcctgctggagggcatcggcctggacggcgacaccctggcccccatggagaccgacgagcccaccgccagcgacagcaagggcaagagcaagatcacccccgccatggccgccagaatcaagcagatcaagcccctgctgagcgccagcagcagactgggcagagccctggccgagctgttcggcctgctggtgaagctgtgcgtgggcagccccgtgagacagagaagaagccaccacgccgccagcaccaccaccgcccccacccccgccgccagaagcaccgccagcgccctgaccaagctgctgaccaagggcctgagctggcagccccccccctacacccccacccccagattcagactgaccttcttcatctgcagcgtgggcttcaccagccccatgctgttcgacgagagaaagtacccctaccacctgatgctgcagaagttcctgtgcagcggcggccacaacgccctgttcgagaccttcaactgggccctgagcatgggcggcaaggtgcccgtgagcgagggcctggagcacagcgacctgcccgacggcaccggcgagttcctggacgcctggctgatgctggtggagaagatggtgaaccccaccaccgtgctggagagcccccacagcctgcccgccaagctgcccggcggcgtgcagaacttcccccagttcagcgccctgagattcctggtggtgacccagaaggccgccttcacctgcatcaagaacctgtggaacagaaagcccctgaaggtgtacggcggcagaatggccgagagcatgctggccatcctgtgccacatcctgagaggcgagcccgtgatcagagagagactgagcaaggagaaggagggcagcagaggcgaggaggacaccggccaggaggagggcggcagcagaagagagccccaggtgaaccagcagcagctgcagcagctgatggacatgggcttcaccagagagcacgccatggaggccctgctgaacaccagcaccatggagcaggccaccgagtacctgctgacccaccccccccccatcatgggcggcgtggtgagagacctgagcatgagcgaggaggaccagatgatgagagccatcgccatgagcctgggccaggacatccccatggaccagagagccgagagccccgaggaggtggcctgcagaaaggaggaggaggagagaaaggccagagagaagcaggaggaggaggaggccaagtgcctggagaagttccaggacgccgaccccctggagcaggacgagctgcacaccttcaccgacaccatgctgcccggctgcttccacctgctggacgagctgcccgacaccgtgtacagagtgtgcgacctgatcatgaccgccatcaagagaaacggcgccgactacagagacatgatcctgaagcaggtggtgaaccaggtgtgggaggccgccgacgtgctgatcaaggccgccctgcccctgaccaccagcgacaccaagaccgtgagcgagtggatcagccagatggccaccctgccccaggccagcaacctggccaccagaatcctgctgctgaccctgctgttcgaggagctgaagctgccctgcgcctgggtggtggagagcagcggcatcctgaacgtgctgatcaagctgctggaggtggtgcagccctgcctgcaggccgccaaggagcagaaggaggtgcagacccccaagtggatcacccccgtgctgctgctgatcgacttctacgagaagaccgccatcagcagcaagagaagagcccagatgaccaagtacctgcagagcaacagcaacaactggagatggttcgacgacagaagcggcagatggtgcagctacagcgccagcaacaacagcaccatcgacagcgcctggaagagcggcgagaccagcgtgagattcaccgccggcagaagaagatacaccgtgcagttcaccaccatggtgcaggtgaacgaggagaccggcaacagaagacccgtgatgctgaccctgctgagagtgcccagactgaacaagaacagcaagaacagcaacggccaggagctggagaagaccctggaggagagcaaggagatggacatcaagagaaaggagaacaagggcaacgacacccccctggccctggagagcaccaacaccgagaaggagaccagcctggaggagaccaagatcggcgagatcctgatccagggcctgaccgaggacatggtgaccgtgctgatcagagcctgcgtgagcatgctgggcgtgcccgtggaccccgacaccctgcacgccaccctgagactgtgcctgagactgaccagagaccacaagtacgccatgatgttcgccgagctgaagagcaccagaatgatcctgaacctgacccagagcagcggcttcaacggcttcacccccctggtgaccctgctgctgagacacatcatcgaggacccctgcaccctgagacacaccatggagaaggtggtgagaagcgccgccaccagcggcgccggcagcaccaccagcggcgtggtgagcggcagcctgggcagcagagagatcaactacatcctgagagtgctgggccccgccgcctgcagaaaccccgacatcttcaccgaggtggccaactgctgcatcagaatcgccctgcccgcccccagaggcagcggcaccgccagcgacgacgagttcgagaacctgagaatcaagggccccaacgccgtgcagctggtgaagaccacccccctgaagcccagccccctgcccgtgatccccgacaccatcaaggaggtgatctacgacatgctgaacgccctggccgcctaccacgcccccgaggaggccgacaagagcgaccccaagcccggcgtgatgacccaggaggtgggccagctgctgcaggacatgggcgacgacgtgtaccagcagtacagaagcctgaccagacagagcagcgacttcgacacccagagcggcttcagcatcaacagccaggtgttcgccgccgacggcgccagcaccgagaccagcgccagcggcaccagccagggcgaggccagcacccccgaggagagcagagacggcaagaaggacaaggagggcgacagagccagcgaggagggcaagcagaagggcaagggcagcaagcccctgatgcccaccagcaccatcctgagactgctggccgagctggtgagaagctacgtgggcatcgccaccctgatcgccaactacagctacaccgtgggccagagcgagctgatcaaggaggactgcagcgtgctggccttcgtgctggaccacctgctgccccacacccagaacgccgaggacaaggacacccccgccctggccagactgttcctggccagcctggccgccgccggcagcggcaccgacgcccaggtggccctggtgaacgaggtgaaggccgccctgggcagagccctggccatggccgagagcaccgagaagcacgccagactgcaggccgtgatgtgcatcatcagcaccatcatggagagctgccccagcaccagcagcttctacagcagcgccaccgccaagacccagcacaacggcatgaacaacatcatcagactgttcctgaagaagggcctggtgaacgacctggccagagtgccccacagcctggacctgagcagccccaacatggccaacaccgtgaacgccgccctgaagcccctggagaccctgagcagaatcgtgaaccagcccagcagcctgttcggcagcaagagcgccagcagcaagaacaagagcgagcaggacgcccagggcgccagccaggacagcagcagcaaccagcaggaccccggcgagcccggcgaggccgaggtgcaggaggaggaccacgacgtgacccagaccgaggtggccgacggcgacatcatggacggcgaggccgagaccgacagcgtggtgatcgccggccagcccgaggtgctgagcagccaggagatgcaggtggagaacgagctggaggacctgatcgacgagctgctggagagagacggcggcagcggcaacagcaccatcatcgtgagcagaagcggcgaggacgagagccaggaggacgtgctgatggacgaggcccccagcaacctgagccaggccagcaccctgcaggccaacagagaggacagcatgaacatcctggaccccgaggacgaggaggagcacacccaggaggaggacagcagcggcagcaacgaggacgaggacgacagccaggacgaggaggaggaggaggaggaggacgaggaggacgaccaggaggacgacgagggcgaggagggcgacgaggacgacgacgacgacggcagcgagatggagctggacgaggactaccccgacatgaacgccagccccctggtgagattcgagagattcgacagagaggacgacctgatcatcgagttcgacaacatgttcagcagcgccaccgacatcccccccagccccggcaacatccccaccacccaccccctgatggtgagacacgccgaccacagcagcctgaccctgggcagcggcagcagcaccaccagactgacccagggcatcggcagaagccagagaaccctgagacagctgaccgccaacaccggccacaccatccacgtgcactaccccggcaacagacagcccaacccccccctgatcctgcagagactgctgggccccagcgccgccgccgacatcctgcagctgagcagcagcctgcccctgcagagcagaggcagagccagactgctggtgggcaacgacgacgtgcacatcatcgccagaagcgacgacgagctgctggacgacttcttccacgaccagagcaccgccaccagccaggccggcaccctgagcagcatccccaccgccctgaccagatggaccgaggagtgcaaggtgctggacgccgagagcatgcacgactgcgtgagcgtggtgaaggtgagcatcgtgaaccacctggagttcctgagagacgaggagctggaggagagaagagagaagagaagaaagcagctggccgaggaggagaccaagatcaccgacaagggcaaggaggacaaggagaacagagaccagagcgcccagtgcaccgccagcaagagcaacgacagcaccgagcagaacctgagcgacggcacccccatgcccgacagctaccccaccacccccagcagcaccgacgccgccaccagcgagagcaaggagaccctgggcaccctgcagagcagccagcagcagcccaccctgcccaccccccccgccctgggcgaggtgccccaggagctgcagagccccgccggcgagggcggcagcagcacccagctgctgatgcccgtggagcccgaggagctgggccccaccagacccagcggcgaggccgagaccacccagatggagctgagccccgcccccaccatcaccagcctgagccccgagagagccgaggacagcgacgccctgaccgccgtgagcagccagctggagggcagccccatggacaccagcagcctggccagctgcaccctggaggaggccgtgggcgacaccagcgccgccggcagcagcgagcagcccagagccggcagcagcacccccggcgacgccccccccgccgtggccgaggtgcagggcagaagcgacggcagcggcgagagcgcccagccccccgaggacagcagcccccccgccagcagcgagagcagcagcaccagagacagcgccgtggccatcagcggcgccgacagcagaggcatcctggaggagcccctgcccagcaccagcagcgaggaggaggaccccctggccggcatcagcctgcccgagggcgtggaccccagcttcctggccgccctgcccgacgacatcagaagagaggtgctgcagaaccagctgggcatcagaccccccaccagaaccgcccccagcaccaacagcagcgcccccgccgtggtgggcaaccccggcgtgaccgaggtgagccccgagttcctggccgccctgccccccgccatccaggaggaggtgctggcccagcagagagccgagcagcagagaagagagctggcccagaacgccagcagcgacacccccatggaccccgtgaccttcatccagaccctgcccagcgacctgagaagaagcgtgctggaggacatggaggacagcgtgctggccgtgatgccccccgacatcgccgccgaggcccaggccctgagaagagagcaggaggccagacagagacagctgatgcacgagagactgttcggccacagcagcaccagcgccctgagcgccatcctgagaagccccgccttcaccagcagactgagcggcaacagaggcgtgcagtacaccagactggccgtgcagagaggcggcaccttccagatgggcggcagcagcagccacaacagacccagcggcagcaacgtggacaccctgctgagactgagaggcagactgctgctggaccacgaggccctgagctgcctgctggtgctgctgttcgtggacgagcccaagctgaacaccagcagactgcacagagtgctgagaaacctgtgctaccacgcccagaccagacactgggtgatcagaagcctgctgagcatcctgcagagaagcagcgagagcgagctgtgcatcgagacccccaagctgaccaccagcgaggagaagggcaagaagagcagcaagagctgcggcagcagcagccacgagaacagacccctggacctgctgcacaagatggagagcaagagcagcaaccagctgagctggctgagcgtgagcatggacgccgccctgggctgcagaaccaacatcttccagatccagagaagcggcggcagaaagcacaccgagaagcacgccagcggcggcagcaccgtgcacatccacccccaggccgcccccgtggtgtgcagacacgtgctggacaccctgatccagctggccaaggtgttccccagccacttcacccagcagagaaccaaggagaccaactgcgagagcgacagagagagaggcaacaaggcctgcagcccctgcagcagccagagcagcagcagcggcatctgcaccgacttctgggacctgctggtgaagctggacaacatgaacgtgagcagaaagggcaagaacagcgtgaagagcgtgcccgtgagcgccggcggcgagggcgagaccagcccctacagcctggaggccagccccctgggccagctgatgaacatgctgagccaccccgtgatcagaagaagcagcctgctgaccgagaagctgctgagactgctgagcctgatcagcatcgccctgcccgagaacaaggtgagcgaggcccaggccaacagcggcagcggcgccagcagcaccaccaccgccaccagcaccaccagcaccaccaccaccaccgccgccagcaccacccccaccccccccaccgcccccacccccgtgaccagcgcccccgccctggtggccgccaccgccatcagcaccatcgtggtggccgccagcaccaccgtgaccacccccaccaccgccaccaccaccgtgagcatcagccccaccaccaagggcagcaagagccccgccaaggtgagcgacggcggcagcagcagcaccgacttcaagatggtgagcagcggcctgaccgagaaccagctgcagctgagcgtggaggtgctgaccagccacagctgcagcgaggagggcctggaggacgccgccaacgtgctgctgcagctgagcagaggcgacagcggcaccagagacaccgtgctgaagctgctgctgaacggcgccagacacctgggctacaccctgtgcaagcagatcggcaccctgctggccgagctgagagagtacaacctggagcagcagagaagagcccagtgcgagaccctgagccccgacggcctgcccgaggagcagccccagaccaccaagctgaagggcaagatgcagagcagattcgacatggccgagaacgtggtgatcgtggccagccagaagagacccctgggcggcagagagctgcagctgcccagcatgagcatgctgaccagcaagaccagcacccagaagttcttcctgagagtgctgcaggtgatcatccagctgagagacgacaccagaagagccaacaagaaggccaagcagaccggcagactgggcagcagcggcctgggcagcgccagcagcatccaggccgccgtgagacagctggaggccgaggccgacgccatcatccagatggtgagagagggccagagagccagaagacagcagcaggccgccaccagcgagagcagccagagcgaggccagcgtgagaagagaggagagccccatggacgtggaccagcccagccccagcgcccaggacacccagagcatcgccagcgacggcaccccccagggcgagaaggagaaggaggagagaccccccgagctgcccctgctgagcgagcagctgagcctggacgagctgtgggacatgctgggcgagtgcctgaaggagctggaggagagccacgaccagcacgccgtgctggtgctgcagcccgccgtggaggccttcttcctggtgcacgccaccgagagagagagcaagccccccgtgagagacaccagagagagccagctggcccacatcaaggacgagcccccccccctgagccccgcccccctgacccccgccacccccagcagcctggaccccttcttcagcagagagcccagcagcatgcacatcagcagcagcctgccccccgacacccagaagttcctgagattcgccgagacccacagaaccgtgctgaaccagatcctgagacagagcaccacccacctggccgacggccccttcgccgtgctggtggactacatcagagtgctggacttcgacgtgaagagaaagtacttcagacaggagctggagagactggacgagggcctgagaaaggaggacatggccgtgcacgtgagaagagaccacgtgttcgaggacagctacagagagctgcacagaaagagccccgaggagatgaagaacagactgtacatcgtgttcgagggcgaggagggccaggacgccggcggcctgctgagagagtggtacatgatcatcagcagagagatgttcaaccccatgtacgccctgttcagaaccagccccggcgacagagtgacctacaccatcaaccccagcagccactgcaaccccaaccacctgagctacttcaagttcgtgggcagaatcgtggccaaggccgtgtacgacaacagactgctggagtgctacttcaccagaagcttctacaagcacatcctgggcaagagcgtgagatacaccgacatggagagcgaggactaccacttctaccagggcctggtgtacctgctggagaacgacgtgagcaccctgggctacgacctgaccttcagcaccgaggtgcaggagttcggcgtgtgcgaggtgagagacctgaagcccaacggcgccaacatcctggtgaccgaggagaacaagaaggagtacgtgcacctggtgtgccagatgagaatgaccggcgccatcagaaagcagctggccgccttcctggagggcttctacgagatcatccccaagagactgatcagcatcttcaccgagcaggagctggagctgctgatcagcggcctgcccaccatcgacatcgacgacctgaagagcaacaccgagtaccacaagtaccagagcaacagcatccagatccagtggttctggagagccctgagaagcttcgaccaggccgacagagccaagttcctgcagttcgtgaccggcaccagcaaggtgcccctgcagggcttcgccgccctggagggcatgaacggcatccagaagttccagatccacagagacgacagaagcaccgacagactgcccagcgcccacacctgcttcaaccagctggacctgcccgcctacgagagcttcgagaagctgagacacatgctgctgctggccatccaggagtgcagcgagggcttcggcctggcctag

SEQ ID NO: 277701 - DNA, 13125 bp, Artificial Sequence
  derived and/or modified sequence
atgaaagtggatcgaaccaagctcaagaaaacacccacggaagcccctgctgactgcagggcattaatcgacaagctcaaggtgtgcaacgatgagcagctgctgctcgagctccaacagataaagacatggaatatcggaaaatgtgaactttatcactgggtggatctcctggatagattcgatgggatactggctgatgctgggcagaccgtggagaatatgtcatggatgctggtctgcgaccggcctgagagggaacagctgaagatgctgctcctggcagtccttaactttactgctctgttgatcgaatatagcttttctcgccatttatattcatccatcgagcatctaaccactctgttagcatcttcggatatgcaggttgtgttggccgtcctgaacctgctgtacgtgttctctaagcgcagcaactatattacacgactgggatcagacaagcgtacgccgctgttaacccggctgcagcatctggctgaaagttggggcggaaaggagaacggatttggactggcggagtgctgccgggatctccacatgatgaagtacccaccgtccgcaacaacactgcactttgagttctacgccgatccgggcgctgaggttaaaatcgaaaagcggactaccagtaataccctgcattacattcacatcgaacagctggacaaaataagtgagtctccttcggaaattatggagtcactaacaaagatgtacagcatccctaaagacaagcagatgctgctctttacccacatccgcttggcccacggattctccaatcatcggaagaggctgcaggcagtacaagcccggctccatgctatctccattctcgtgtacagcaacgcactccaggagagcgccaacagtatactgtacaatggactgatcgaggaacttgtggatgttctacaaatcaccgacaaacagttaatggagattaaagctgcgagtctgcgcaccttaaccagcatcgttcacttagagcgcactcccaaattatcttctatcatcgactgcacaggtactgcgagttaccacgggtttctgcctgtgcttgttcggaattgcattcaggccatgatagatccctccatggacccctatcctcatcagttcgctaccgccttgttttcctttttatatcatttagcctcatatgatgccggaggtgaggctttagtaagctgtgggatgatggaggcactgctaaaggttatcaaatttctaggagacgaacaggatcagatcacgtttgtgactcgggctgtccgggtggtggacctgataacaaacttggacatggcagctttccagtcacattcaggcctgtcaattttcatctataggctggaacatgaagttgacctgtgtcgcaaagaatgccccttcgtaatcaagccaaagatccagcggccaaacaccacacaggagggggaagagatggagacggacatggatggagtccagtgcattccgcaaagggccgccctgctcaagagtatgctcaacttcctcaagaaagcaatccaggaccctgccttcagcgacggaatacgccatgtcatggatggaagcctgcccacttctcttaagcacataatttccaacgcagaatattacggcccgagcttgttcctgctggccaccgaggtcgtgacagtgttcgtgttccaggagccctcactgctatctagtttgcaagacaatggccttacagacgtgatgctgcacgccctgctaattaaagatgtgcccgccactcgcgaggtgctagggtctcttcccaatgttttctcagctctttgccttaacgcaagggggctgcaatcattcgtccaatgtcagccattcgagagactctttaaggtgttattatctccagattacctacctgccatgaggagaagaaggagcagcgacccactgggggataccgcttccaatctgggatctgcggtggacgaacttatgcggcaccagccgactctgaaaactgatgcaaccactgccattattaagcttctcgaggaaatttgtaacttgggcagggatccgaagtacatctgtcagaaacccagcatacagaaggccgatggcacagccactgcgcccccccccagaagcaaccatgccgcggaggaggcctcttccgaagacgaagaggaagaggaggtccaggctatgcagtcgttcaattccacccaacagaacgagaccgaacctaatcagcaggtggttgggaccgaagagcgcattcctatacccctgatggactacatacttaacgtcatgaagttcgtcgaatcaatcctttctaacaacactacagatgatcattgccaggaatttgtcaaccagaaagggctgctcccgcttgtaacaattttgggccttcctaaccttcctattgacttccccacctccgctgcttgtcaggccgtcgcaggcgtatgtaaaagcatcctgacactatcccacgagcctaaggttcttcaggaaggtcttcttcagctggactcaatcttgagctccctggagccgctccacagacctattgaatcccctggaggttccgtcctgctgcgggaacttgcctgcgctggtaatgtcgcagatgcgaccctttctgctcaggcgacacccctgctccatgcattgacggcagcccacgcctacatcatgatgttcgtgcacacctgtagggtcggccagagcgaaatccgatcaattagcgtgaaccaatggggctcccagttagggctctccgttcttagtaaattatcacaactgtattgctcgctcgtatgggagagcactgtccttctctcgctgtgtactcccaactcactgccgagtggctgcgagttcgggcaggctgatatgcaaaaattggtgcctaaagacgaaaaagccggcacaacgcagggcggtaaacgctctgacggcgaacaggatggcgcagctggttctatggatgcctccacccaggggctgctcgaaggtattggtctcgacggtgataccctcgccccaatggagacagacgaacctactgctagcgattctaaaggcaagtcaaagattacacctgccatggcagcccgcataaagcagatcaaacccctgttgtcggcttcttcacggctgggccgggccctggccgagctgttcgggcttctagtcaagctctgcgtcggttcaccagtccgacagcgacgaagccaccatgctgccagtactaccaccgcccccacccctgccgcacgcagcactgcttccgccttgacaaaactgctcacaaaaggcctgtcatggcaaccccccccctatacccctaccccccggttcaggctgacttttttcatctgttcggttggtttcacatcacccatgttattcgacgagaggaagtatccctaccaccttatgctacaaaagtttctgtgttcgggaggacataacgctttgtttgaaacgtttaactgggctctctcgatggggggcaaagtaccagtgtcagagggcttagaacattccgatctgccagacggtactggggaatttctggacgcctggctgatgctggtcgagaagatggtaaaccctaccaccgtgctggagtccccacactccctaccggctaagctacctggaggggtgcagaactttccgcagttctctgccctccggttcctggttgtgacacagaaggccgcatttacttgcatcaaaaacctctggaataggaagcccctgaaagtgtacgggggcagaatggccgagtcaatgctcgctatattgtgccatattcttaggggcgagccagtgatccgtgaaaggctgagcaaagagaaggagggatctaggggagaggaagatactgggcaggaagagggcggctcgaggagagaaccccaagttaatcagcagcaactgcagcagttgatggatatgggttttacccgagagcacgccatggaggcgctactgaacacgtctactatggagcaggccacagaatatctgctcacgcacccccctcccattatggggggagttgtacgcgatttgtcaatgtcggaggaagatcagatgatgcgagcaatcgccatgtctctgggacaggatatcccgatggaccagcgggccgaaagtcccgaggaggtcgcctgtcggaaagaagaagaggagcggaaggcaagggaaaaacaggaggaggaagaagctaagtgtcttgagaaattccaagacgcagatcctcttgagcaggacgagctccacacttttactgacacgatgctaccgggctgttttcacctgctcgacgagttacccgataccgtctatcgcgtctgtgacctgataatgaccgcaattaaaaggaacggagctgattaccgagatatgattcttaagcaagttgtgaatcaggtgtgggaagcagcagacgtcctgattaaggctgcgcttcccttgaccacttctgacacaaagaccgtgagcgagtggatcagtcagatggccaccctaccacaggcatcaaacttggcgacgcgcatactgctcctcactctgctcttcgaagaactgaaactcccttgcgcctgggtagttgagagttccggaattctgaatgtcctgattaagctgctcgaggttgtgcagccctgtctgcaggctgctaaggagcaaaaggaagtgcagacccctaaatggataacccctgtcctgctgcttattgatttttatgagaagacagcaatttcaagcaaacggagggctcaaatgacgaaatatcttcagagtaacagcaacaattggcgttggtttgacgaccgctctggacgctggtgtagttactccgcctctaacaatagtacaatcgacagcgcttggaagagcggcgaaacaagcgtgcgcttcacggccggcagacggcggtacacagttcaatttaccactatggtgcaggtcaacgaggaaaccgggaatcgtcggcccgttatgctcacattgctgcgtgtaccaagacttaacaaaaattctaaaaatagtaatggccaggagctagaaaaaacactggaggagtcaaaggaaatggacatcaaaaggaaggaaaacaaaggcaacgacaccccgctcgcgctcgaaagcacaaatacagagaaggagacatcactagaggaaaccaagatcggcgaaatcctaatccaaggtttgaccgaggacatggtgactgttctcatcagggcctgcgtgtctatgctgggagtgccggttgaccccgacacactgcatgccaccttgcgactgtgcctgcgactgacgagggatcacaaatacgccatgatgtttgctgagctgaagtcaacacgcatgatcttaaacttgacccagagctcggggtttaacggcttcacccctctggttacccttctgctgcgacacataatcgaggacccttgtactttgcgacatacaatggagaaagtggttcggtcagcagcaacttcaggcgcaggcagcacgacttctggagtcgtgtcaggatccttgggcagccgggagattaactacatacttcgtgtcctgggccctgctgcctgtaggaaccccgacatctttaccgaagttgctaattgttgtattagaatcgcacttcctgcgccccgcggcagcggaacagccagtgatgatgaatttgagaatcttcgcatcaaaggaccaaacgctgtacagcttgtgaaaactaccccgctaaagccctctccactcccagttattcctgacaccattaaagaagtgatttacgatatgcttaacgccctggccgcctatcacgcccctgaggaggccgataaatctgaccccaagcccggtgtgatgacacaggaggttggccagttgcttcaggacatgggcgatgatgtctaccaacagtataggtcacttacacgccagtcatcggattttgatacccaatccggattctccattaacagccaggtgttcgcggctgatggtgcatctaccgaaacttcagccagtggaactagtcaaggtgaggcgtcaaccccggaggaatcccgggatggaaaaaaagacaaggaaggagaccgggcttctgaagagggcaagcaaaagggaaaaggatctaaaccattgatgccaacaagcacaatcctcagactactggcagagcttgtgcggagctatgtaggcatagccaccttgattgcaaattactcttacaccgtgggacagtcagaactgattaaggaagactgttcggtgctcgccttcgtgcttgaccacctgctgccccacacacagaatgctgaggataaggatactcctgctttggcccgcctattcttggcaagcctcgcagcggctggctcaggcaccgatgctcaggtggccttggtgaacgaggtcaaagccgccctgggaagagccttggccatggccgagagtaccgaaaagcacgctagactccaagctgtgatgtgtattatttccacaatcatggaaagttgtccctccacgtctagtttctatagctccgctactgcgaagacacagcataacggaatgaataatattattaggttattcctgaaaaaggggcttgttaacgacctagccagagtcccgcacagcttagacctgtcttctccgaacatggcgaacaccgtaaatgcagcactgaagcccctggaaactctgagccggatagtaaaccagccttcatccctatttgggagtaaaagcgccagcagtaaaaacaagtctgaacaggacgcacagggagccagtcaggactcctcctctaaccagcaggatccaggcgagcccggcgaagccgaggttcaggaagaggaccacgatgtcactcagaccgaagtggccgatggagacatcatggatggagaagctgagaccgactctgtggttattgccggacagccagaagtactgtcatctcaggagatgcaggtagagaacgagctggaagatctgattgatgaattattggagcgcgacggcggctccggcaactcgaccatcatagtaagcagatccggagaggatgaatcccaggaagacgtgctcatggatgaagcaccaagtaatctatcacaggcttccactctgcaggccaaccgcgaagattctatgaacatcttggaccctgaagacgaggaagagcacacacaggaggaagacagtagtggaagcaatgaagacgaagatgactcccaggatgaggaggaagaggaggaggaagacgaagaagatgaccaggaagacgatgagggggaggaaggggatgaagatgacgatgatgatggttccgagatggagctcgacgaagactaccccgacatgaacgcaagccccctcgtcaggtttgagcgttttgaccgcgaagatgaccttattattgagttcgacaatatgttttctagtgctaccgatatccctccaagccccgggaacatccccacaacacacccacttatggtcagacacgccgatcactcctctttgacgctggggagcgggtccagcacaacccggctgacccaggggatcgggagaagccagcggaccctgaggcagctgaccgctaacaccggccataccatccatgtgcactaccctgggaataggcagccaaatccccctctgatcctgcagcgattactgggccctagcgccgcagccgacatactccagctttcttccagcctaccgttgcagagcagaggacgagctcgtctccttgtgggaaacgacgatgtacatataattgcccggtcagacgatgagctgctagacgactttttccatgatcagtccaccgccaccagccaggcaggtacactgtcctctatcccgacagcccttacaaggtggactgaagaatgcaaagtcttggacgctgaaagtatgcacgactgtgtgagcgtcgttaaggtgagtattgtgaaccaccttgagtttctgagggacgaagaactggaagagcgaagagagaagcgtcgaaaacaattagcggaagaggaaaccaagatcacagataaaggcaaagaggacaaagagaatcgggatcaatccgcacagtgcactgccagtaaatcgaatgacagtacagagcagaacctgagcgatggtacccccatgccagatagttatcccacaactccatctagtaccgatgcagctacatccgagagtaaagagacactgggaacgctgcagagttcgcagcagcagcccaccctccctacaccaccagctcttggggaggtgccccaggagcttcagtcacctgccggagaggggggatcctcaacccagttgctcatgccagtcgaaccggaggagttgggtccaaccaggccttctggcgaagccgaaacaactcagatggagctgagccctgctcccactatcacaagccttagccccgaacgcgcggaagattcagacgcgctcaccgcggttagtagtcagttggagggtagcccaatggatactagttccctggcaagctgcacactcgaagaggcagtgggggacacatccgcagccggcagctcggagcagccaagagctggatcctccacgccgggggatgccccgccggccgtggccgaagtgcaaggaaggtccgatggttccggagagagcgcccagcctcccgaggattcctctccgcctgcctccagcgaaagcagcagtacaagagactccgctgttgcaatctccggcgcggactcaagggggattctggaggaaccgctcccttctacatcttcagaggaggaggatccactggccggtatctccctgcctgaaggggtagacccttcctttctcgcagcccttccggacgatatccggagagaagtgttgcagaatcaacttgggattagacctcccacacgaacagctccttccaccaacagcagcgctccagcagtggtgggaaaccctggcgtcactgaggtttcacccgagtttctggccgctcttccaccagctatccaagaagaggtcttggcccaacagcgggccgaacagcagagaagagagctcgcccaaaacgccagctccgacacacctatggatcccgtcactttcatccagaccttacccagtgatctgcgcagatcagttcttgaggacatggaggactctgtgttagctgtgatgccccccgacattgcagccgaagcacaggccctccgcagggagcaggaggcacgtcaaaggcagttgatgcacgagagactcttcgggcactcctctacgtctgccctgtctgccatcctgaggagtcctgccttcacctcacgactatcaggcaacaggggcgttcaatacactcgacttgctgtccaaagggggggcacctttcaaatgggaggctcttcatcacataatagaccttccggatctaacgttgacaccctgctcagactgagaggaagacttctgttggaccacgaggcactgtcatgtctgctcgtgcttctgttcgtagatgaacccaagctgaacacgagtaggctccaccgcgtcctccggaatctgtgctaccatgctcaaacgcgtcattgggtgatcaggagtctgctctcaattctccaacggagctccgagtcggagttgtgtattgagacaccgaagctcactacctccgaggagaagggaaagaaatcctccaaatcatgtggttctagctcccatgagaatagaccactcgatcttctgcataagatggagagcaagagtagtaatcaacttagttggctgtctgtgagtatggatgccgcactgggctgccggacgaacatttttcagattcagagatcgggcggccggaaacacaccgaaaagcacgctagtggaggatccactgtgcatatccatcctcaagcagctcccgtcgtctgtagacatgtgctcgataccctgatccagctcgctaaagtcttcccctcacactttacccaacagagaaccaaagagaccaattgcgaatccgacagggaaaggggtaataaagcatgcagcccctgctcgagtcaaagctcttcaagcggcatttgcaccgatttctgggacctgttagtgaaactggataatatgaatgtctcccgaaaaggtaaaaatagtgtgaaatcggtgcctgtgtcagctgggggggagggcgagactagcccatactcactcgaggcttctccactcggtcagctgatgaacatgctttctcacccagtgatcagacgcagcagcctgctcactgagaagctgctccgcctgctcagcctcatcagtatcgctctccctgaaaacaaggttagtgaggcacaggcaaactccggaagcggggcttcatctaccactaccgctacaagcaccacttccaccaccaccaccacagcggcgtccacaacccccacccctcccacggcgccgacacctgtcacaagcgcccctgcgctggtcgccgctacggctatttcaacgatcgtggtggcggctagtacgactgtaaccaccccaaccacagcgacaacaacggtttctatatccccaaccaccaaggggagtaagagtccggcaaaagtatctgatggcggcagctcgagcactgatttcaagatggtttcatcaggactgaccgaaaatcagctgcagttgagcgtagaggttctgacatcccatagttgctccgaagaaggactggaagacgccgccaacgtactcctgcagctgagccgcggagacagcgggacgagggataccgtactcaagttattgttgaacggagcacgtcacctcgggtataccttgtgcaaacagattggcacattacttgccgaacttcgcgagtacaatctggaacaacaacgcagagcccagtgcgaaacactgagccctgacgggctcccggaggaacagccccaaacaaccaaattgaaagggaagatgcagtcacgttttgacatggcggagaacgtcgtcatcgtcgcgagtcaaaaacgacccctgggggggagggaacttcagctgccatccatgtcaatgctcacaagcaaaacctccacgcagaaattcttcctccgggttctccaggtcatcatacaactgagggacgatacccgccgcgccaacaagaaagccaaacagacaggcaggcttggctctagcgggctgggtagtgccagttctattcaggccgctgtcagacaattagaggccgaggctgacgcgatcatccagatggttagagaagggcagagagcaaggcgtcagcaacaggcagctacctccgagagtagccaatctgaagcctccgttagaagagaagagtccccaatggacgtggatcagccttccccatcagcccaagacacacagagtattgcgagcgacggtaccccccagggcgaaaaggaaaaggaggagagacccccagagctccccttgttaagcgaacaactctcccttgatgagctgtgggatatgctgggcgagtgcctcaaggagctggaagagtcccatgaccagcatgctgttttggttctccagccagccgtggaagccttcttcctggtccacgccaccgaaagagagtccaagcctcctgtgagggacacccgtgagtcgcaattggcacatattaaggacgagccgcctcccctttctcccgcacctctcacccctgcaactccttctagtttagatccgtttttctctagggagcctagttccatgcatattagttccagccttcctcccgacacccaaaagtttctgaggtttgcagagactcatcgtaccgtgctcaatcagatactgcggcaatccacaacccaccttgccgacggaccgtttgctgttctggtggattatatccgcgtcctcgacttcgacgtcaaaagaaagtatttccggcaggaactggaaagactcgacgagggcctcagaaaagaggatatggcagtgcatgtgagaagagaccatgtctttgaagactcttatagagagctccatagaaagagcccggaagagatgaaaaaccggttatatatcgtattcgaaggggaagaaggccaggacgccggaggcttgctgcgggagtggtacatgattatatctcgcgaaatgtttaacccgatgtatgcccttttcagaacttccccaggtgatcgggtgacttacaccatcaatccttctagccattgtaatcccaatcacctgtcgtatttcaagttcgtaggccggatagtggctaaggctgtctacgacaatagactcctggaatgttatttcactcggagtttttacaaacatattctgggaaagtccgtcaggtacaccgatatggagtcggaagattatcatttttaccagggactcgtgtacctcctggagaacgatgtttcaacgctgggttatgacctcacgttcagcacagaagtgcaggagttcggtgtttgtgaagtcagggatttaaaaccaaacggggccaacattctggtcacagaggagaataaaaaagagtatgtccatctggtatgccagatgagaatgaccggcgccattcggaaacagctggcggctttcttagaggggttctatgagatcatacccaagaggctgatcagtattttcaccgagcaggaactcgagctgctgattagcggccttccgaccatagatatcgatgacctgaaatccaatacagaataccacaagtaccagtcaaactccattcagatccagtggttctggcgggcgctacgctccttcgaccaggccgatcgagccaaattcttgcagttcgtgaccggaacttccaaggtgcccctgcaggggtttgccgccttggaaggcatgaacgggattcagaagtttcaaattcacagagatgatcgtagcaccgaccgcttacccagcgcccatacgtgcttcaaccagctggatttgccggcctacgagtccttcgaaaaattgagacatatgctcctactggcaatacaagagtgctccgaaggatttggtctggcttag

SEQ ID NO: 277702 - DNA, 14716 bp, Artificial Sequence
  derived and/or modified sequence
gagtttgagctgagccgaagcgaggaggctttcgactgagggctagcgaggggagcagggctggagcagggctggagcagggctggagcagggctgaagcagggctgaagcagggccgcggaccccgcacgctcctgcgggccccgcggagccattgcggccgaggcctcggcaggcgccagcggagagctagccgcatcttcgggggcagcccggcagctgccggcggcgcggcgagagagcggctgacagaggggatgcgaggtcctccagcagcctgacctgagtgggttagtgatccagagaaaccagcaggccaacttggtcaggaaggttcgggaagctgttggagcagtgtggggaatttcccaccaggatgagtatgattggctgtgattttagatcgtaaagctgaaaattgaaatcatgaaagtagacaggactaaactgaagaagacacctactgaggctcctgcagactgcagagccttaatagacaaactcaaagtttgtaatgatgagcaacttctcttggaactgcagcagatcaaaacatggaacattggaaagtgcgagttatatcactgggtggacctgttggaccgcttcgatggaatactggcagatgctggacagacagtggagaatatgtcatggatgctcgtatgtgataggccagaaagagagcaactgaaaatgcttctcttggctgtgttgaacttcacagccttgctcattgagtacagcttttcccggcatctgtacagttccatagagcatttgacaactttattggcttcctctgatatgcaagtggtgctggcagtcctcaatctcctatatgtatttagcaaaagatcaaactacatcactcgtctgggatctgacaagaggaccccgctgctaactcggctacaacatttggcagagagctggggtggaaaggagaatggctttggacttgcagaatgttgcagagacttgcatatgatgaaatatccacccagtgcaactacactacactttgaattctatgcagatcctggggccgaggtcaaaattgagaaaaggacaactagtaacacactacattatattcacatagagcaacttgacaagatttcagaaagcccttctgaaatcatggaatctcttaccaaaatgtacagcattcctaaggataagcagatgctgttatttacacacatacgactggcccatggcttttctaatcacaggaagcgattgcaggcagttcaggccagactgcatgcaatatctatattagtgtattccaatgccttgcaggaatcagcaaacagtatcttgtataatggcttgatagaggagttggtagatgtccttcagataacggataagcagcttatggagattaaagcagcttctttacgaacattaacatcaattgtccacttggagagaactcccaaactcagcagtattattgactgtactggaactgcctcctaccatggatttttgccagtgcttgtaaggaactgtatccaggccatgattgatccttccatggatccataccctcaccagtttgccactgctctcttctcttttttataccatctggccagctacgatgctggtggtgaagccttggtctcctgtggaatgatggaagccttattgaaggtcataaagtttcttggcgatgaacaggaccagataacatttgtcaccagagccgtcagagtggttgaccttatcaccaacctggatatggcagcttttcaatcccatagtggactttctatcttcatttatagacttgagcatgaagtagatttgtgccgaaaagaatgtccgtttgtgatcaagccaaagatccagagacccaatactacacaagaaggagaggaaatggaaactgatatggatggagtccagtgtattccacaacgagcagcacttctgaaatccatgttgaatttcctcaagaaggccatccaagaccctgctttctcagatggcatacgacatgtgatggatggttctctgcctacctccctgaaacacatcatcagcaatgcagaatactatggcccatcactcttcctcctagctactgaagtggtgactgtgtttgtatttcaagaaccatcactgctctcctcactccaggacaatggattgacagatgtcatgctgcatgcactgcttatcaaagatgttcctgctacccgtgaagtccttggctccctcccaaatgtattcagtgcactctgtttgaatgcccgaggtcttcagtcttttgttcagtgtcagccttttgaacgcctcttcaaagttcttctgtctccagattacctcccagccatgcggaggaggagaagttctgatccccttggggatactgcatccaacctggggagtgctgtcgatgagctcatgagacatcagcccacccttaaaacagatgcaacgactgccatcatcaagttacttgaagaaatctgtaatcttggaagggaccccaaatacatctgtcagaagccatcaatccagaaggcagatggcactgccactgctcctcccccaaggtctaatcatgccgcagaagaagcctctagtgaggatgaggaggaagaggaagtacaggccatgcagagctttaattctacccagcaaaatgaaactgagcctaatcagcaggttgttggtacagaggaacgtattcctattcccctcatggattacatccttaatgtgatgaaatttgtggaatctattctgagcaacaatacaacagatgaccactgccaggaatttgtgaatcagaaaggactgttgcctttggttaccattttgggtcttcccaatctgcccattgactttcccacatctgctgcctgtcaggctgttgcaggtgtctgcaaatccatattgacactgtcacatgaacccaaagtccttcaagagggtctccttcagttggactccatcctctcctccctggagcccttacaccgccccattgaatcccctgggggctcagtgttgttgcgagaactggcttgcgcaggcaatgttgctgatgctaccctctcagcccaggccacacctctgctgcatgcactcactgctgcccatgcctacatcatgatgtttgttcatacttgcagagttggacagagtgaaattcgttccatctccgtaaaccagtggggctctcaattgggtctgagtgttttgagcaagctgagccagttatactgttccctggtgtgggaaagcactgtcctcctctctctgtgtaccccaaacagcctaccatctgggtgtgaatttggccaggcagatatgcagaaactggttccaaaggatgagaaggcaggtacgacccagggcggaaaaagatcagatggggaacaggatggagcagctggaagtatggatgcttctacccagggcttattagaaggcattgggctagatggtgacacattggctcccatggagacagatgaacctactgcttcagactctaagggcaaatctaaaatcacaccagcaatggctgccagaattaagcaaatcaagcctttgttatcagcttcctccagattaggccgagcacttgctgagctatttggacttcttgttaaactttgtgtgggatctcctgtccgccagagaaggagccatcatgctgccagcaccactacagcaccgacacctgccgcgcgatcaacagcctcagctctcactaagctcttgactaaggggttatcttggcagcccccaccatatacacctactccccgattcaggctgacattcttcatctgttcagttggtttcacatccccaatgctgtttgatgagaggaagtatccctaccacctcatgctgcaaaaatttctctgctccggaggccacaatgctctttttgaaactttcaactgggctctgtccatgggaggtaaagttcctgtttctgagggattggaacactcagacttgcctgatggcacaggagaattcctagatgcctggcttatgctggtggagaagatggtgaatcccaccacggtgcttgaatctccacattcgctgcctgccaaattgcctggaggtgtccagaactttccccagttcagtgcactgcgcttccttgtggtaactcagaaagcagcctttacttgcatcaaaaacttatggaaccggaaacccctgaaggtatatggtggacgaatggctgaatcgatgctggccattctatgccacatcctccgaggagaacctgtgattcgagagagactaagcaaggagaaggaggggtctcgaggagaagaggatacagggcaagaggaaggtggctcccgccgggaacctcaagtcaaccagcaacaactgcaacagctcatggacatgggcttcacaagggaacatgcaatggaggcactgttgaacaccagcaccatggagcaggccacagagtaccttttaacccaccctcctccaatcatgggaggagttgttcgggatctcagcatgtctgaagaggaccagatgatgagagcaattgctatgtctctgggacaggatattccaatggatcaaagggcagagtcacctgaggaagttgcttgccggaaggaggaagaggaacggaaagctcgggaaaagcaggaggaggaagaggctaaatgtctagagaagttccaggatgctgacccgttggaacaagatgagctccacactttcacagatactatgttgccaggctgcttccaccttcttgatgagctgccagacacagtataccgtgtgtgtgacctgatcatgacagcaatcaaacgtaatggagcagattatcgtgacatgattctgaagcaagtagtcaatcaggtgtgggaagctgctgatgtattgatcaaagctgctcttcccctgacaacaagtgacacaaaaaccgtgtcagagtggataagtcagatggccacactgccccaggcctccaatttggctactagaatcttgcttttaacgctactttttgaggagttgaagctaccttgtgcttgggtggttgaatcaagtggcatccttaatgtcctaatcaaactcttggaagtggttcagccctgcctccaggcagccaaggagcagaaggaagtccagaccccaaagtggatcacaccagtgttgctcctgattgatttctatgaaaagacagccatctcctcaaaaaggagagcccagatgactaagtacctgcaatccaacagcaacaactggcgctggtttgatgatcgctctgggcgttggtgtagttacagtgcaagcaacaatagcactattgattctgcctggaaatctggagagacaagcgtgcgattcactgcaggccgaagaagatacacggtccaattcactacaatggtgcaggttaatgaggaaacagggaaccgacgccctgtgatgctgactctcctcagggtacctcggctgaataaaaattcaaaaaacagcaatggacaggaactagagaagacgctggaagaaagcaaagaaatggatatcaaacgtaaagaaaataaaggcaatgatacccctttggccctagagagtacaaacactgaaaaggagacaagcctggaggaaacaaaaatcggggagatcctgatccagggcttgacagaagatatggtgactgttttaatccgggcctgcgtgagcatgctgggagtccctgtggacccagatactttgcatgccacccttcgtctctgtctgaggctcacccgggaccacaaatatgccatgatgtttgcagaactgaagagtacccgcatgatcttgaatttgacccagagctcaggcttcaatgggtttactcccctggtcacccttctcttaagacacatcattgaggacccctgtacccttcgtcataccatggaaaaggttgttcgctcagcagctacaagtggagctggtagcactacctctggtgttgtgtctggcagcctcggctctcgggagatcaactacatccttcgtgtccttgggccagccgcatgccgcaatccagacatattcacagaagtggccaactgctgtatccgcatcgcccttcctgcccctcgaggctcaggaactgcttcagatgatgaatttgagaatcttagaattaaaggccctaatgctgtacagctggtgaagaccacccctttgaagccctcacctctgcctgtcatccctgatactatcaaggaagtgatctatgatatgctgaatgctctggctgcataccatgctccagaggaagcagataaatctgatcctaaacctggggttatgacccaagaggttggccagctcctgcaagacatgggtgatgatgtataccagcagtaccggtcacttacgcgtcagagcagtgactttgatacgcagtcaggtttttccattaatagtcaggtctttgctgcagatggtgcctccactgagacttccgcatctgggacctcccaaggagaggcttcaactccagaggagtctcgagatgggaagaaagataaagaaggggaccgggcctctgaggaaggcaaacagaaaggcaagggcagcaaacctttaatgcctacctccactatccttcgtcttctggcagagttggtgaggtcctatgttggtattgctaccctgattgccaactacagctacactgtgggccagtctgaactgatcaaagaggactgcagtgtgctagcttttgttctggaccacctgctcccacatacccagaatgcagaagacaaggacacccctgccttggcccgcctgttcctcgcaagcctggctgctgcagggagtggcacagatgcccaggtggccctagtgaatgaagtaaaagcagcccttggacgggcactggctatggctgagagtacagagaaacatgccaggcttcaggcagtgatgtgtatcatcagtactatcatggagtcctgcccctccacctccagcttctacagcagtgccacagcgaagacccagcacaatggcatgaacaacatcattcggcttttcctgaagaagggactggttaatgacctggccagagtacctcacagcttagacctgtccagtcccaacatggccaacacagtcaatgctgctctgaagcctttggaaacactttcccggattgtgaaccagcccagtagcctttttggcagcaagagtgcttctagcaagaacaagtctgagcaggatgcccaaggagcctctcaagattccagtagcaaccagcaggacccaggcgagcctggggaagcagaagtgcaggaggaggatcatgatgtcactcagacagaggtggcagatggggatatcatggatggggaggctgaaaccgactcagtggtgattgctgggcagcctgaggtgctcagttcacaagagatgcaggttgagaatgagctggaggacctgatagatgagttgcttgagagggatggcggatctgggaacagtacaattatagtgagcagaagtggagaggatgaatcacaagaggacgtgctgatggatgaagctccttccaacctcagccaagcttccaccttgcaggccaaccgagaagattccatgaatatcctggaccctgaggatgaggaggagcacactcaggaagaggacagcagtggcagtaacgaggatgaggatgatagtcaggatgaagaggaggaggaggaggaagatgaggaagatgatcaggaggatgatgaaggtgaagagggagatgaagacgatgacgacgatggctctgagatggaattggatgaggattatcctgatatgaacgcttctcccttggtccgatttgagcgctttgaccgggaggatgatctcatcattgagtttgacaacatgttctccagtgctacagacatccccccatccccaggaaatatccctaccacccatccactgatggtgcgccatgcagaccacagttctctgacactgggcagtggctcttcaacaactcgtctcacccagggcatcgggcgcagtcagaggaccctaaggcagctgacggccaatactggccacaccattcatgttcactaccctgggaatcgccagcccaaccctcctcttatactgcagaggttgcttggtccctcagctgctgctgacatccttcagctgagcagcagccttcccctacaaagccggggtcgggcccgcctcctggtaggcaacgatgacgtccacatcatcgcccgttctgatgatgagctgctggatgactttttccatgatcagagcacagctaccagccaagcaggaaccctgtccagcatccccacagccctgacccgctggacagaagaatgcaaagttctcgatgctgagagcatgcatgactgtgtttcagtggttaaagtgtccattgtcaatcacctggaattcctgagggatgaggagctggaagaaaggcgagagaagcgcaggaaacaactggctgaggaagaaacaaagataactgataaaggcaaagaagataaggagaacagggatcagagtgcacagtgtactgcatctaagtcaaatgactccactgaacagaatctctcagatgggacgcctatgcctgacagctacccaacaaccccatcttcaactgatgcagctacatctgagtccaaggagacccttggcactctgcaatcctcacaacagcaaccaacactcccaaccccaccagctttgggagaggttcctcaggagctgcagtctccagctggagaagggggcagctctacacagctattgatgcctgtagagccagaggaattgggtcccacaaggccaagtggggaagcagaaacaactcagatggagttatccccagctcccactataacctcactttccccagagagagctgaggattctgatgcactgacggctgtcagcagtcagctagaaggctctcctatggatacaagcagcctggcttcctgtaccttagaggaggctgtgggtgacacttcagcagctggcagttctgagcagcccagagcaggcagctccactcctggggatgccccaccagctgtggcggaagtgcaaggcaggagtgatgggtcaggggaatctgcccagccacctgaggacagctccccacctgcatcctctgagagctcttccaccagagattctgccgtggccatttctggagcagattcccgaggaatcctagaagagccgttgccttcaacaagcagtgaagaagaagatccccttgcgggtatcagtctccctgaaggtgtggacccctcttttctggctgccctgcctgatgacatccgtcgggaagttctacagaaccagctaggcattcgtccaccaacccggactgccccctccacaaatagctcagcgcctgcagtggtggggaatcctggtgtgactgaagtgagccctgagtttctggctgccctgcctccagccattcaggaggaagtactggcacagcagagagctgagcagcagcgacgagaactagcacagaatgccagctcagacacccctatggaccctgtgaccttcatccagactctgccctcagacctgcgccgtagtgtcctagaggatatggaggacagtgtgttagctgtgatgccacctgacattgcagctgaggctcaagccctgagacgagagcaagaagcccggcagcgacagctcatgcatgagcgtctgtttgggcacagtagcacctccgcactctctgctattctccgaagcccggctttcaccagtcgcttaagtggcaaccgtggggtccagtatactcgccttgctgtgcagagaggtggcaccttccagatggggggtagcagcagccataacaggccttctggcagtaatgtagatactctcctccgcctccgaggacggctccttctggaccacgaagccctttcttgtctcttggtcctactttttgtggatgagccaaagctcaatactagccgtctacaccgagtactgagaaatctctgctaccatgcccagacccgccactgggtcatccgcagtctgctctccatcttgcagcgcagcagtgagagtgagctatgcattgaaacacccaaactcactacaagtgaggaaaagggcaaaaagtcgagcaagagctgtgggtcaagtagccatgagaaccgtcccctggacctgctacacaagatggagtcaaagagctccaaccagctttcctggctctcagtatccatggatgcagccctaggctgcaggactaatatatttcagatccagcgttcaggggggcgtaaacataccgagaagcatgcaagcggtggctccaccgtccacatccatccccaagctgctcctgttgtctgcagacacgttttggatacactcattcaattggccaaggtatttcccagccacttcacacagcagcggaccaaagaaacaaactgtgagagtgatcgggaaaggggcaataaggcctgtagcccatgctcctcacagtcctccagcagtggcatttgcacagacttctgggacttattggtaaaactggacaacatgaatgtcagccggaaaggcaagaactccgtgaagtcagtgccagtgagcgctggcggtgagggggaaacctctccatacagcctcgaggcctctccactggggcagctcatgaacatgttgtcacacccagtcatccgccggagctctctcttaactgagaaactcctcagactcctttctctcatctcaattgctctcccagaaaacaaggtgtcagaagcacaggctaattctggcagcggtgcttcctccaccaccactgccacctcaaccacatctaccaccaccaccactgccgcctccaccacgcccacaccccctactgcacccacccctgtcacttctgctccagccctggttgctgccacggctatttccaccattgtcgtagctgcttcgaccacagtgactacccccacgactgctaccactactgtttcaatttctcccactactaagggcagcaaatctccagcgaaggtgagtgatgggggcagcagcagtacagactttaagatggtgtcctctggcctcactgaaaaccagctacagctctctgtagaggtgttgacatcccactcttgttctgaggaaggcttagaggatgcagccaacgtactactgcagctctcccggggggactctgggacccgggacactgttctcaagctgctactgaatggagcccgccatctgggttataccctttgtaaacaaataggtaccctgctggccgagctgcgggaatacaacctcgagcagcagcggcgagcccaatgtgaaaccctctctcctgatggcctgcctgaggagcagccacagaccaccaagctgaagggcaaaatgcagagcaggtttgacatggctgagaatgtggtaattgtggcatctcagaagcgacctttgggtggccgggagctccagctgccttctatgtccatgttgacatccaagacatctacccagaagttcttcttgagggtactacaggtcatcatccagctccgggacgacacgcgccgggctaacaagaaagccaagcagacaggcaggctaggttcctccggtttaggctcagctagcagcatccaggcagctgttcggcagctggaggctgaggctgatgccattatacaaatggtacgtgagggtcaaagggcgcggagacagcaacaagcagcaacgtcggagtctagccagtcagaggcgtctgtccggagggaggaatcacccatggatgtggaccagccatctcccagtgctcaagatactcaatccattgcctccgatggaaccccacagggggagaaggaaaaggaagaaagaccacctgagttacccctgctcagcgagcagctgagtttggacgagctgtgggacatgcttggggagtgtctaaaggaactagaggaatcccatgaccagcatgcggtgctagtgctacagcctgctgtcgaggccttctttctggtccatgccacagagcgggagagcaagcctcctgtccgagacacccgtgagagccagctggcacacatcaaggacgagcctcctccactctcccctgcccccttaaccccagccacgccttcctcccttgacccattcttctcccgggagccctcatctatgcacatctcctcaagcctgccccctgacacacagaagttccttcgctttgcagagactcaccgcactgtgttaaaccagatcctacggcagtccacgacccaccttgctgatgggccttttgctgtcctggtagactacattcgtgtcctcgactttgatgtcaagcgcaaatatttccgccaagagctggagcgtttagatgaggggctccggaaagaagacatggctgtgcatgtccgtcgtgaccatgtgtttgaagactcctatcgtgagctgcatcgcaaatcccccgaagaaatgaagaatcgattgtatatagtatttgaaggagaagaagggcaggatgctggtgggctcctgcgggagtggtatatgatcatctctcgagagatgtttaaccctatgtatgccttgttccgtacctcacctggtgatcgagtcacctacaccatcaatccatcttcccactgcaaccccaaccacctcagctacttcaagtttgtcggacgcattgtggccaaagctgtatatgacaaccgtcttctggagtgctactttactcgatccttttacaaacacatcttgggcaagtcagtcagatatacagatatggagagtgaagattaccacttctaccaaggtctggtttatctgctggaaaatgatgtctccacactaggctatgacctcaccttcagcactgaggtccaagagtttggagtttgtgaagttcgtgacctcaaacccaatggggccaacatcttggtaacagaggagaataagaaggagtatgtacacctggtatgccagatgagaatgacaggagccatccgcaagcagttggcggctttcttagaaggcttctatgagatcattccaaagcgcctcatttccatcttcactgagcaggagttagagctgcttatatcaggactgcccaccattgacatcgatgatctgaaatccaacactgaataccacaagtaccagtccaactctattcagatccagtggttctggagagcattgcgttctttcgatcaagctgaccgtgccaagttcctccagtttgtcacaggtacttccaaggtacccctgcaaggctttgctgccctcgaaggcatgaatggcattcagaagtttcagatccatcgagatgacaggtccacagatcgcctgccttcagctcacacatgttttaatcagctggatctgcctgcctatgagagctttgagaagctccgccacatgctactgttggctatccaggagtgctctgaaggctttgggctggcctaataaggccctgcccaactccgtggggttttttttaccattgttggacctggggaggggggagttaaaaaaagaaccagaaagaaattgtcaaaaaccaataaatgaaatccaccaactcaccgtgtgtgtcccagctgccccatcttccccagcgcatacctgttcctcttctcattctctccccgccgcctgtttcctcaccttctctcccctttccatgccgtccatgatccccaccccatgtgttttaaaaaggcagtagcctttgcagggacctgtctgtcccaactgtttgaacagtgtgctcctcagattctgtgttcagaaggatttgctgcattgagacttgaaacctttggataggggaaaaaattatatatatatatatttttttgttctgtttgcatttcttaatttgtgcttggaatgtgttgatgtgcacagctaatgattcaatgcgagacaagattggcgtctgtgttgtggaggtttcaaataaagagcactcttcataactcacttttcacaatggagtttttttcaaacttaaaaaaaaaaacaaaaaactcttaagcacatgctaggcatctggagaaaagatggattctccaggaaaccatccctgccctacccgcttgcccacctgcctccaccactggtgcaacttcctccttcagagtcagtttctgcagtcaggagagatgagcagttcaccaggaattgggggtgggggcatctgttttttttttttagaatgggagctgcacttggggatggtgatggtgttagagattgcagcccaggacaaagcatcaccttgctcaaggggaacaaactgcagcaggttgtacaaaacattcagagagctcacttgacccaaccgagggttttacttggtgagcctttctagtagtcttgagtctggggctcagttttagatttttatttcattaatgtttgtttatttctaataaattttaataagcgagtaatttaactaggtcgccagaagaccattatttttgtttgtctatttttgttgtcgtcactccctctctcgtcatctgtctgccagtctgttcacagatcaccttgtagtcccttgtggtttttactccatccagtgcttaaagctgatctaaggacttcgatggttccagccttc

SEQ ID NO: 277703 - DNA, 13125 bp, Artificial Sequence
  derived and/or modified sequence
atgaaggtggacaggaccaagctgaagaagacccccacagaggccccagctgactgccgggccctgattgacaagctgaaggtgtgcaatgatgagcagctgctgctggagctgcagcagatcaagacctggaacatcggcaaatgtgagctgtaccactgggtggacctgctggacagatttgatggcatcctggctgatgctggccagacagtggagaacatgtcctggatgctggtgtgtgacaggcctgagcgggagcagctgaagatgctgctgctggccgtgctgaacttcaccgccctgctgattgagtacagcttcagccgccacctgtacagcagcattgagcacctgaccaccctgctggccagcagtgacatgcaggtggtgctggccgtgctgaacctgctgtatgtgttcagcaagaggagcaactacatcacccggctgggcagtgacaagaggacccccctgctgacccggctgcagcacctggccgagagctggggcggcaaggaaaatggatttggcctggccgagtgctgccgggacctgcacatgatgaagtacccacccagcgccaccaccctgcactttgagttctacgccgaccccggggctgaggtgaagattgagaagaggaccaccagcaacaccctgcactacatccacatcgagcagctggacaagatcagcgagagccccagcgagatcatggagagcctgaccaagatgtacagcatccccaaggacaagcagatgctgctcttcacccacatccggctggcccacggcttcagcaaccacaggaagaggctgcaggccgtgcaggcccggctgcacgccatcagcatcctggtgtacagcaatgccctgcaggagagcgccaacagcatcctgtacaacggcctcatcgaggagctggtggatgtgctgcagatcacagacaagcagctgatggagatcaaggccgccagcctgcggaccctgaccagcatcgtgcacctggagaggacccccaagctgagcagcatcatcgactgcaccggcacagccagctaccacggcttcctgcctgtgctggtgaggaactgcatccaggccatgattgaccccagcatggacccctacccccaccagtttgccacagccctcttctccttcctgtaccacctggccagctatgatgctggaggagaggccctggtgtcctgtggcatgatggaggccctgctgaaggtgatcaagttcctgggagatgagcaggaccagatcacctttgtgaccagggctgtgcgggtggtggacctgatcaccaacctggacatggccgccttccagagccacagcggcctgagcatcttcatctaccgcctggagcacgaggtggacctgtgcaggaaggagtgcccctttgtgatcaagcccaagatccagaggcccaacaccacccaggagggggaggagatggagacagacatggatggagtgcagtgcatcccccagagagctgccctgctgaagtccatgctgaacttcctgaagaaggccatccaggaccctgccttcagtgatggcatccgccacgtgatggatggcagcctgcccaccagcctgaagcacatcatcagcaatgctgagtactacggccccagcctcttcctgctggccacagaggtggtgacagtgtttgtgttccaggagcccagcctgctgagcagcctgcaggacaatggcctgacagatgtgatgctgcacgccctgctgatcaaggatgtgcctgccacccgggaggtgctgggcagcctgcccaacgtgttttctgccctgtgcctgaatgcccggggcctgcagagctttgtgcagtgccagccctttgagcggctcttcaaggtgctgctgagcccagactacctgcctgccatgagaagaagaagaagcagtgaccccctgggggacacagccagcaacctgggcagcgctgtggatgagctgatgaggcaccagcccaccctgaagacagatgccaccacagccatcatcaagctgctggaggagatctgcaacctgggccgggaccccaagtacatctgccagaagcccagcatccagaaggcagatggaacagccacagcccccccacccaggagcaaccacgccgctgaggaggccagcagtgaagatgaggaggaggaggaggtgcaggccatgcagagcttcaacagcacccagcagaatgaaacagagcccaaccagcaggtggtgggcacagaggagcgcatccccatccccctgatggactacatcctgaatgtgatgaagtttgtggagagcatcctgagcaacaacaccacagatgaccactgccaggagtttgtgaaccagaagggcctgctgcccctggtgaccatcctgggcctgcccaacctgcccatcgacttccccaccagcgctgcctgccaggccgtggccggcgtgtgcaagagcatcctgaccctgagccatgagcccaaggtgctgcaggagggcctgctgcagctggacagcatcctgagcagcctggagcccctgcaccggcccatcgagagccctgggggctctgtgctgctgcgggagctggcctgtgctggaaatgtggctgatgccaccctgagcgcccaggccacccccctgctgcacgccctgacagctgcccacgcctacatcatgatgtttgtgcacacctgccgggtgggccagagcgagatccgcagcatctctgtgaaccagtggggcagccagctgggcctgtctgtgctgagcaagctgagccagctgtactgcagcctggtgtgggagagcacagtgctgctgagcctgtgcacccccaacagcctgcccagcggctgtgaatttggccaggccgacatgcagaagctggtgcccaaggatgagaaggccggcaccacccagggcggcaagagaagtgatggagagcaggatggagctgctggctccatggatgccagcacccagggcctgctggagggcatcggcctggatggagacaccctggcccccatggagacagatgagcccacagccagtgacagcaagggcaagagcaagatcaccccagccatggccgcccgcatcaagcagatcaagcccctgctgagcgccagcagccggctgggccgggccctggccgagctgtttggcctgctggtgaagctgtgtgtgggcagccctgtgcggcagaggaggagccaccacgccgccagcaccaccacagcccccaccccagctgcccggagcacagccagcgccctgaccaagctgctgaccaagggcctgtcctggcagcccccaccctacacccccaccccccgcttccggctgaccttcttcatctgcagcgtgggcttcaccagccccatgctgtttgatgagaggaagtacccctaccacctgatgctgcagaagttcctgtgcagcggcggccacaatgccctgtttgagaccttcaactgggccctgtccatgggcggcaaggtgcctgtgtctgagggcctggagcacagcgacctgcctgatggcactggagagttcctggatgcctggctgatgctggtggagaagatggtgaaccccaccaccgtgctggagagcccccacagcctgcctgccaagctgcctggaggagtgcagaacttcccccagttcagcgccctgcgcttcctggtggtgacccagaaggccgccttcacctgcatcaagaacctgtggaacaggaagcccctgaaggtgtatggaggccgcatggccgagagcatgctggccatcctgtgccacatcctgcggggggagcctgtgatccgggagcggctgagcaaggagaaggagggcagcagaggagaggaggacaccggccaggaggagggcggcagccggcgggagccccaggtgaaccagcagcagctgcagcagctgatggacatgggcttcacccgggagcacgccatggaggccctgctgaacaccagcaccatggagcaggccacagagtacctgctgacccaccccccacccatcatgggcggcgtggtgcgggacctgtccatgtctgaggaggaccagatgatgagggccatcgccatgagcctgggccaggacatccccatggaccagagagctgagagccctgaggaggtggcctgcaggaaggaggaggaggagaggaaggcccgggagaagcaggaggaggaggaggccaagtgcctggagaagttccaggatgctgaccccctggagcaggatgagctgcacaccttcacagacaccatgctgcccggctgcttccacctgctggatgagctgcctgacacagtgtacagagtgtgtgacctgatcatgacagccatcaagagaaatggagctgactacagagacatgatcctgaagcaggtggtgaaccaggtgtgggaggccgcagatgtgctgatcaaggccgccctgcccctgaccaccagtgacaccaagacagtgtctgagtggatcagccagatggccaccctgccccaggccagcaacctggccacccgcatcctgctgctgaccctgctgtttgaggagctgaagctgccctgtgcctgggtggtggagagcagcggcatcctgaatgtgctgatcaagctgctggaggtggtgcagccctgcctgcaggccgccaaggagcagaaggaggtgcagacccccaagtggatcacccctgtgctgctgctgattgacttctatgagaagacagccatcagcagcaagaggcgggcccagatgaccaagtacctgcagagcaacagcaacaactggcgctggtttgatgacaggagcggccgctggtgcagctacagcgccagcaacaacagcaccatcgacagcgcctggaagagcggggagacctctgtgcgcttcaccgctggaagaagacgctacacagtgcagttcaccaccatggtgcaggtgaatgaggagaccggcaacagaagacctgtgatgctgaccctgctgcgggtgccccggctgaacaagaacagcaagaacagcaatggccaggagctggagaagaccctggaggagagcaaggagatggacatcaagaggaaggagaacaagggaaatgacacccccctggccctggagagcaccaacacagagaaggagaccagcctggaggagaccaagatcggggagatcctgatccagggcctgacagaggacatggtgacagtgctgatccgggcctgtgtgtccatgctgggcgtgcctgtggaccctgacaccctgcacgccaccctgcggctgtgcctgcggctgacccgggaccacaagtatgccatgatgtttgctgagctgaagagcaccaggatgatcctgaacctgacccagagcagcggcttcaacggcttcacccccctggtgaccctgctgctgcggcacatcatcgaggacccctgcaccctgcggcacaccatggagaaggtggtgcgctctgctgccaccagcggggccggcagcaccaccagcggcgtggtgtctggcagcctgggcagccgggagatcaactacatcctgcgggtgctgggccctgctgcctgcaggaacccagacatcttcacagaggtggccaactgctgcatcagaattgccctgcctgccccccggggcagcggcacagccagtgatgatgaatttgagaacctgcgcatcaagggccccaatgctgtgcagctggtgaagaccacccccctgaagcccagccccctgcccgtcatcccagacaccatcaaggaggtgatctatgacatgctgaatgccctggccgcctaccacgcccctgaggaggccgacaagagtgaccccaagccaggagtgatgacccaggaggtgggccagctgctgcaggacatgggagatgatgtgtaccagcagtaccgcagcctgacccggcagagcagtgactttgacacccagagcggcttcagcatcaacagccaggtgtttgctgctgatggagccagcacagagaccagcgccagcggcaccagccagggcgaggccagcaccccagaggagagcagagatggcaagaaggacaaggagggggaccgggccagcgaggagggcaagcagaagggcaagggcagcaagcccctgatgcccaccagcaccatcctgcggctgctggccgagctggtgcgctcctatgtgggcatcgccaccctgattgccaactacagctacacagtgggccagagcgagctgatcaaggaggactgcagcgtgctggcctttgtgctggaccacctgctgccccacacccagaatgctgaggacaaggacaccccagccctggcccggctcttcctggccagcctggccgccgccggcagcggcacagatgcccaggtggccctggtgaatgaggtgaaggccgccctgggccgggccctggccatggccgagagcacagagaagcacgcccggctgcaggccgtgatgtgcatcatcagcaccatcatggagagctgccccagcaccagcagcttctacagcagcgccacagccaagacccagcacaacggcatgaacaacatcatccgcctcttcctgaagaagggcctggtgaatgacctggcccgggtgccccacagcctggacctgagcagccccaacatggccaacacagtgaatgctgccctgaagcccctggagaccctgagccgcatcgtgaaccagcccagcagcctgtttggcagcaagagcgccagcagcaagaacaagtctgagcaggatgcccagggcgccagccaggacagcagcagcaaccagcaggaccctggagagcccggggaggccgaggtgcaggaggaggaccatgatgtgacccagacagaggtggctgatggagacatcatggatggagaggccgagacagattctgtggtgattgctggccagcctgaggtgctgagcagccaggagatgcaggtggagaatgagctggaggacctgattgatgagctgctggagagagatggcggcagcggcaacagcaccatcatcgtgagccgcagcggggaggatgagagccaggaggatgtgctgatggatgaggcccccagcaacctgagccaggccagcaccctgcaggccaacagagaagattccatgaacatcctggaccctgaagatgaggaggagcacacccaggaggaggacagcagcggcagcaatgaagatgaagatgacagccaggatgaggaggaggaggaggaggaggatgaagaagatgaccaggaggatgatgaaggagaggagggagatgaagatgatgatgatgatggcagcgagatggagctggatgaggactacccagacatgaatgccagccccctggtgcgctttgaaagatttgaccgggaggatgacctgatcattgaatttgacaacatgttcagcagcgccacagacatcccccccagccctggcaacatccccaccacccaccccctgatggtgagacatgctgaccacagcagcctgaccctgggcagcggcagcagcaccacccggctgacccagggcatcggccgcagccagaggaccctgcggcagctgacagccaacacaggccacaccatccacgtgcactacccaggcaaccggcagcccaaccccccactcatcctgcagaggctgctgggccccagcgctgctgctgacatcctgcagctgagcagcagcctgcccctgcagagccggggccgggcccggctgctggtgggcaatgatgatgtgcacatcatcgcccggagtgatgatgagctgctggatgacttcttccatgaccagagcacagccaccagccaggccggcaccctgagcagcatccccacagccctgacccgctggacagaggagtgcaaggtgctggatgctgagagcatgcatgactgtgtgtctgtggtgaaggtgtccatcgtgaaccacctggagttcctgagagatgaggagctggaggagcggcgggagaagaggaggaagcagctggccgaggaggagaccaagatcacagacaagggcaaggaggacaaggaaaatagagaccagagcgcccagtgcacagccagcaagagcaatgacagcacagagcagaacctgagtgatggcacccccatgccagacagctaccccaccacccccagcagcacagatgctgccaccagcgagagcaaggagaccctgggcaccctgcagagcagccagcagcagcccaccctgcccaccccaccagccctgggggaggtgccccaggagctgcagagccctgctggggagggcggcagcagcacccagctgctgatgcctgtggagcctgaggagctgggccccacccggcccagcggggaggccgagaccacccagatggagctgagccctgcccccaccatcaccagcctgagccctgagagagctgaggacagtgatgccctgacagctgtgagcagccagctggagggcagccccatggacaccagcagcctggccagctgcaccctggaggaggccgtgggggacaccagcgctgctggcagcagcgagcagcccagggctggcagcagcaccccaggagatgcccccccagctgtggccgaggtgcagggccgcagtgatggcagcggggagagcgcccagcccccagaggacagcagccccccagccagcagcgagagcagcagcacccgggacagcgctgtggccatcagcggggctgacagccggggcatcctggaggagcccctgcccagcaccagcagcgaggaggaggaccccctggccggcatcagcctgcctgagggcgtggaccccagcttcctggccgccctgcctgatgacatcagaagagaggtgctgcagaaccagctgggcatccggccccccaccaggacagcccccagcaccaacagcagcgccccagctgtggtgggcaaccctggggtgacagaggtgtccccagagttcctggccgccctgcccccagccatccaggaggaggtgctggcccagcagagagctgagcagcagaggcgggagctggcccagaatgccagcagtgacacccccatggaccctgtgaccttcatccagaccctgcccagcgacctgcggcgctctgtgctggaggacatggaggacagcgtgctggccgtgatgcccccagacattgctgctgaggcccaggccctgcggcgggagcaggaggcccggcagaggcagctgatgcatgagcggctgtttggccacagcagcaccagcgccctgagcgccatcctgcggagccctgccttcaccagccggctgagcggcaacagaggagtgcagtacacccggctggccgtgcagaggggcggcaccttccagatgggcggcagcagcagccacaaccggcccagcggcagcaatgtggacaccctgctgcggctgcggggccgcctgctgctggaccacgaggccctgagctgcctgctggtgctgctgtttgtggatgagcccaagctgaacaccagccggctgcaccgggtgctgaggaacctgtgctaccacgcccagaccaggcactgggtgatccgcagcctgctgagcatcctgcagaggagcagcgagagcgagctgtgcatcgagacccccaagctgaccaccagcgaggagaagggcaagaagagcagcaagagctgtggcagcagcagccatgaaaatcggcccctggacctgctgcacaagatggagagcaagagcagcaaccagctgtcctggctgtctgtgtccatggatgctgccctgggctgcaggaccaacatcttccagatccagaggtctgggggcaggaagcacacagagaagcacgccagcggcggcagcacagtgcacatccacccccaggccgcccctgtggtgtgcagacatgtgctggacaccctcatccagctggccaaggtgttccccagccacttcacccagcagaggaccaaggagaccaactgtgagagtgaccgggagcggggcaacaaggcctgcagcccctgcagcagccagagcagcagcagcggcatctgcacagacttctgggacctgctggtgaagctggacaacatgaatgtgtccaggaagggcaagaacagcgtgaagtctgtgcctgtgtctgctggaggagagggggagaccagcccctacagcctggaggccagccccctgggccagctgatgaacatgctgagccaccctgtgatccgccgcagcagcctgctgacagagaagctgctgcggctgctgagcctcatcagcatcgccctgcctgagaacaaggtgtctgaggcccaggccaacagcggcagcggggccagcagcaccaccacagccaccagcaccaccagcaccaccaccaccacagctgccagcaccacccccaccccacccacagcccccacccctgtgaccagcgccccagccctggtggccgccacagccatcagcaccatcgtggtggccgccagcaccaccgtgaccacccccaccacagccaccaccaccgtgtccatcagccccaccaccaagggcagcaagagccctgccaaggtgtctgatggcggcagcagcagcacagacttcaagatggtgagcagcggcctgacagagaaccagctgcagctgtctgtggaggtgctgaccagccacagctgcagcgaggagggcctggaggatgctgccaacgtgctgctgcagctgagcagaggagacagcggcacccgggacacagtgctgaagctgctgctgaatggagcccggcacctgggctacaccctgtgcaagcagatcggcaccctgctggccgagctgcgggagtacaacctggagcagcagaggcgggcccagtgtgagaccctgagcccagatggcctgcctgaggagcagccccagaccaccaagctgaagggcaagatgcagagcagatttgacatggccgagaatgtggtgattgtggccagccagaagaggcccctgggcggccgggagctgcagctgcccagcatgtccatgctgaccagcaagaccagcacccagaagttcttcctgcgggtgctgcaggtgatcatccagctgagagatgacacccggcgggccaacaagaaggccaagcagacaggccgcctgggcagcagcggcctgggcagcgccagcagcatccaggccgctgtgcggcagctggaggccgaggctgatgccatcatccagatggtgcgggagggccagagggcccggcggcagcagcaggccgccaccagcgagagcagccagagcgaggcctctgtgcggcgggaggagagccccatggatgtggaccagcccagccccagcgcccaggacacccagagcatcgccagtgatggcaccccccagggcgagaaggagaaggaggagaggcctcctgagctgcccctgctgtctgagcagctgagcctggatgagctgtgggacatgctgggggagtgcctgaaggagctggaggagagccatgaccagcacgctgtgctggtgctgcagcctgctgtggaggccttcttcctggtgcacgccacagagcgggagagcaagccccctgtgcgggacacccgggagagccagctggcccacatcaaggatgagcccccacccctgagccctgcccccctgaccccagccacccccagcagcctggaccccttcttcagccgggagcccagctccatgcacatcagcagcagcctgcccccagacacccagaagttcctgcgctttgctgagacccacaggacagtgctgaaccagatcctgcggcagagcaccacccacctggctgatggcccctttgctgtgctggtggactacatccgggtgctggactttgatgtgaagaggaagtacttccggcaggagctggagcggctggatgagggcctgaggaaagaagacatggctgtgcacgtgcggcgggaccacgtgtttgaggacagctaccgggagctgcacaggaagagccctgaggagatgaagaaccggctgtacatcgtgtttgaaggagaggagggccaggatgctgggggcctgctgcgggagtggtacatgatcatcagccgggagatgttcaaccccatgtatgccctcttccgcaccagccctggggacagagtgacctacaccatcaaccccagcagccactgcaaccccaaccacctgagctacttcaagtttgtgggcagaattgtggccaaggctgtgtatgacaaccggctgctggagtgctacttcaccaggagcttctacaagcacatcctgggcaagtctgtgcgctacacagacatggagagcgaggactaccacttctaccagggcctggtgtacctgctggagaatgatgtgtccaccctgggctatgacctgaccttcagcacagaggtgcaggagtttggagtgtgtgaggtgcgggacctgaagcccaacggggccaacatcctggtgacagaggagaacaagaaggagtatgtgcacctggtgtgccagatgaggatgaccggggccatcaggaagcagctggccgccttcctggagggcttctatgagatcatccccaagaggctcatcagcatcttcacagagcaggagctggagctgctgatcagcggcctgcccaccattgatattgatgacctgaagagcaacacagagtaccacaagtaccagagcaacagcatccagatccagtggttctggagggccctgcggagctttgaccaggccgaccgggccaagttcctgcagtttgtgacaggcaccagcaaggtgcccctgcagggctttgctgccctggagggcatgaatggcatccagaagttccagatccacagagatgacaggagcacagaccggctgcccagcgcccacacctgcttcaaccagctggacctgcctgcctatgagagctttgagaagctgcggcacatgctgctgctggccatccaggagtgcagcgagggcttcggcctggcctag

SEQ ID NO: 277704 - DNA, 13125 bp, Artificial Sequence
  derived and/or modified sequence
atgaaggtggaccggaccaagctgaagaagacccccaccgaggcccccgctgattgccgggccctaattgataagctgaaagtttgcaacgacgaacaactgctgttggagctacagcagatcaagacatggaacatcggcaaatgtgagctgtatcactgggtcgatcttctggaccggttcgatggcatactggctgatgcgggacagactgtggagaacatgagctggatgttggtgtgcgacaggcctgagagggaacaactgaaaatgctgctgcttgccgtgctgaactttacagccctgttgatagagtatagcttctcgcgtcacctttactcctccattgagcatctcaccaccctgctggccagtagcgacatgcaagtggtcctagctgttctgaaccttctctacgtgtttagcaagcgttccaactacataacccgacttgggtccgacaaacgtacccccctgctgacgagactccagcatctggccgagtcctggggcggcaaagagaatggattcggactggccgaatgttgtagagacctgcatatgatgaagtatcctccgtcagccaccaccctacatttcgaattctatgctgacccaggggccgaggtaaaaattgagaaacgaactacttctaacacactccactatatccatatagaacaacttgataagatttctgaatctcccagtgagattatggagagtctgaccaagatgtacagcattcctaaggacaagcagatgctccttttcactcacatccggttggcccacggattttcaaaccatcggaaaagactgcaagctgttcaagccaggctgcatgccatcagtattctcgtctacagtaatgccttgcaagagtctgctaactctattctttataacgggttgattgaggagttggttgacgtccttcaaataaccgacaaacagcttatggagatcaaggccgctagtcttcggactctaacctcaattgtgcacctcgaacgcacccctaaactatctagcatcatcgactgcactgggactgcgagctaccacggatttctccccgtactggtgaggaactgcatccaggcaatgatcgatccatccatggacccttatccgcaccagttcgcgactgctcttttttcttttctataccatttggcctcgtatgacgctggaggggaagccttagtaagctgtggtatgatggaggctctgctgaaggtcatcaaattcctcggggatgagcaggaccagattacattcgtgacccgggccgtgcgggtggtggacctgatcaccaacctcgatatggccgcctttcagtcacattcgggactgtctatcttcatttaccgtcttgaacacgaggtggacctgtgccgcaaggagtgtccgttcgtgatcaagccaaaaatacagcggccaaataccacacaggagggagaggagatggaaaccgatatggatggagtacagtgcataccccagagagccgctttactaaagtccatgctgaactttcttaagaaagcaatccaagatcctgccttcagcgacgggatccggcacgtcatggacggctccctgccaacttctcttaagcacatcattagtaatgccgagtactacggaccatcgttatttctgcttgccacagaagtggtaaccgtatttgttttccaggaaccttccttgttgagcagtttacaagataacggactgaccgacgtgatgttgcatgccctcttaatcaaggatgttccagccacccgtgaggtactcgggagcctgcccaacgttttttctgctctttgtttgaatgcccgagggttacaaagtttcgttcaatgtcagcctttcgaacggttgtttaaggtgctcttaagccccgactatctccccgcaatgcgcagacgccggagctctgatcccctgggcgacaccgcttcaaacctgggtagcgctgtggacgagctgatgaggcaccagccaactcttaagaccgacgccaccacggctataattaaactgttggaggagatctgtaatttaggacgggaccccaagtacatctgccagaagcctagcatacagaaagccgacgggaccgccaccgcccctcctccaaggagcaaccatgctgctgaagaggcttcgtccgaggatgaggaggaagaagaagtccaggcgatgcagtccttcaacagtacacagcagaatgaaactgaacctaatcagcaggtcgtaggcaccgaggagcggatccctattcccttgatggattacattcttaatgttatgaagttcgtggagagcattctgtcaaacaataccactgacgatcattgccaagagtttgttaatcagaagggacttctgcctttggtgactattcttgggcttcctaacttgcctattgattttccaactagcgccgcctgccaggctgtagccggtgtgtgcaaaagcattctcaccctttcgcacgagcctaaagtcctgcaggagggcctcctgcaactggactcaatcctttcctctttggaaccgcttcacaggccaattgaatcccctggcggttcagtcctgttgcgcgagttggcatgtgcaggaaatgtggccgatgctactctgagcgcacaggccacacctctgttacatgccctgacggcggctcacgcctacattatgatgttcgtgcacacatgtagagtaggacagtctgagatccgatctatatcagtcaatcagtggggctcgcaactgggactctcagtgctctcaaagctctctcaactgtactgctctctcgtgtgggagtctacggtgctcctgtctttatgcacaccaaacagcctgccctctggatgcgaatttgggcaagcagacatgcagaagctcgtccctaaggacgaaaaggcaggtaccacgcagggcggaaagcgatccgacggcgagcaggatggagctgcagggagcatggacgcaagcacacagggcctattggagggcataggcctggacggcgatactttggcccctatggaaacagacgagcctacagccagcgattccaaaggcaagtcaaagattaccccagccatggccgctaggattaagcagattaagcccctactttctgcatcttccagactgggcagagctcttgccgaattgtttggtctgctagtcaagctgtgcgtcggcagccccgtgcggcaacggcggtcacaccacgctgcctcgaccaccaccgcccccacacccgcagcaaggagtacagcttccgctctcacgaaactcctcactaaagggctctcatggcagccacctccatacactcccacacctcggtttcgccttacattcttcatctgtagtgtcggattcacaagtcccatgttgttcgacgagaggaagtacccttatcacctgatgttacaaaagtttctttgtagtggcggccacaatgctctgttcgagacctttaattgggctcttagtatgggaggtaaggtgccggtttctgaagggctggaacactctgacctgccagatggcacaggggagttcctcgatgcctggttaatgcttgtggagaagatggtaaatcctacgacggtcctggagtccccccattcgctacctgcaaaactgcccgggggggttcaaaatttcccccagttttctgcactacgtttcctagttgtcacacaaaaggcagcgtttacttgcataaagaatttgtggaaccggaaaccccttaaagtgtacggaggacgcatggccgaaagtatgctagccatcctgtgtcacatcctccgtggagagcccgtgataagagagcgcctcagtaaagagaaggagggatccagaggggaggaggatacaggccaggaagagggtggttcacgtcgggaacctcaggtgaaccaacagcaactacagcaactgatggatatgggctttacccgcgagcatgcaatggaagccctcctgaatacttcgaccatggaacaagctactgaatacctgctgacccacccccctccgatcatggggggagtggtcagggatctgagtatgagcgaggaagaccagatgatgagagcaattgcaatgtccctcggccaggatatcccgatggaccagagggccgaaagcccagaagaagtcgcctgccgcaaggaggaagaggagcgaaaggcacgggagaaacaggaggaggaagaagcaaagtgtcttgagaagtttcaggatgcagacccgctcgaacaagatgaactgcataccttcacagatactatgctgcctggctgtttccacctgctggacgagctgcccgacacagtctatagagtttgtgaccttattatgaccgccattaagcgtaacggtgcagattatcgcgatatgattctgaagcaagtggttaaccaggtttgggaagcagccgacgtactgatcaaggcagctctgcctctaacgacatccgataccaaaaccgtgtcagaatggatttctcagatggcaacgctgccccaggctagcaatctggctactagaatactactcttaaccctgttgttcgaggaactcaaattaccatgtgcttgggtggtcgagtcttctggtatcttgaatgtgctcatcaaactacttgaggttgtacagccgtgtcttcaagctgcaaaagagcagaaggaagtgcaaacccctaaatggatcacacctgtgttgttgcttatagacttctacgagaaaaccgccatttcctccaagcgcagggcacagatgacaaagtacctccagtcaaactcaaataactggagatggtttgatgatcggtccggtcgttggtgctcttactccgcatctaacaactcaactatcgactctgcttggaagagtggggaaactagcgtgaggttcacagccgggaggcgccggtatacagtacaatttacaaccatggtccaggtgaacgaagagactggaaacaggcgccccgttatgttgaccttattacgggtccctagactgaataaaaattcaaagaattctaacgggcaggaacttgagaagaccctcgaggaaagtaaagagatggatattaagcggaaagaaaataagggaaacgatactccgttagcattagagagcactaacacagagaaggagactagtcttgaggagacaaaaattggtgagattttgattcagggtctgaccgaagatatggtcacggttctgataagagcctgcgtgagtatgctcggcgtcccggtcgatcctgatactttacacgcaacactgcgtttgtgcttgcgtctgacacgcgaccacaagtacgcgatgatgttcgccgagctgaagtccacacggatgattctgaatctaacacagagcagtggattcaatggattcacaccactggtgaccctgctgctacgacacatcatcgaggacccctgcactctcagacacacaatggagaaggtcgtgagatcagccgcaaccagtggtgccggatccacaaccagtggggtggtatctggttctctgggctctagagagattaattatatcctcagggttcttggccctgcagcatgtcggaatcccgacattttcacagaggttgctaattgttgcatccgaatcgccctccccgctcctcgcggtagcggtaccgcctccgacgacgaatttgaaaaccttcggataaaaggcccgaacgcagtacaactggtaaaaacgactccgctgaagcccagcccccttcccgtaatacctgataccattaaggaggtcatttacgatatgcttaatgctcttgctgcctaccacgcaccagaggaggcagataagagtgaccccaagccgggtgtgatgacacaggaggtaggccagctgctacaagacatgggggacgatgtgtaccagcaatacaggtccctgacaagacagagctcagatttcgacacacagtcaggctttagcatcaacagtcaagtgttcgctgcggacggtgcttctaccgaaacatccgcctctgggaccagccaaggtgaggcctccacccctgaagaaagtcgagatggcaagaaggacaaagagggagatcgcgcatccgaagagggtaaacagaaagggaagggaagtaaacctctcatgcccacatctaccatcctgcggttgctcgcggagttggtgaggtcctatgtcggcatagcaacactcatcgctaactacagctatactgtaggccagtcagagctgataaaggaagactgtagtgttctggcttttgtcctcgaccatctcttaccgcacacgcaaaatgccgaagacaaggatacaccagcgcttgcccgtctgtttctggcgagcctcgccgctgctggctccggcactgatgcacaggtggctttggtaaatgaggtgaaggctgcgctcggcagagccttagccatggccgagtcgacggagaagcatgcaaggcttcaagcagtgatgtgtattatatctactatcatggaaagctgcccgagcaccagctctttttactcatccgcaacggccaagacacaacataacggcatgaataatattattagactctttcttaagaaaggactggtgaatgacttggctagagtgccgcattccttagatttgagcagccctaacatggcgaacacagtcaatgccgcattaaagccacttgaaacacttagtcgtattgtaaaccaaccttcctcgttattcggctccaaatctgcctcaagcaaaaataaatcagagcaggacgcccagggagcctcccaggattcaagcagtaatcagcaggatcccggcgagcctggggaagctgaagtgcaggaggaggatcatgacgtgacccagacagaggtggctgatggagatattatggatggcgaggcggaaacagactcagtggtcatcgctgggcagcctgaagttctcagctcacaggagatgcaggtggaaaacgagttagaggacctcattgatgaactgctggagagagatggcggatccggtaatagcactattattgtcagtcgcagcggggaagatgagtcccaagaagatgttcttatggacgaagctccttctaacctctcccaggcatcaactcttcaggcaaacagagaagattcaatgaatattctggatcctgaggatgaggaggaacacactcaggaagaggactctagtggctccaacgaagatgaagacgattctcaggatgaggaagaggaggaggaggaagacgaagaagacgatcaggaagatgatgaaggggaggaaggagatgaggacgacgatgacgacggctccgagatggagcttgacgaggactatccagatatgaatgcatcaccactggttagatttgaaaggttcgaccgagaagacgatctgatcattgagttcgacaatatgtttagtagtgccactgatatacctcctagtccaggcaatatccccaccactcacccactgatggtacgccatgccgaccatagctccctgactctggggtccggcagcagtaccactaggctgacccagggcatcgggagatcccaacggaccctccgccagctgacagcaaataccggacataccatccatgtgcactaccctgggaatagacagccaaaccctcctctgattctgcagaggttacttggtccctccgcagcggcagatatactccagctgagcagctccttgcccttacagtcaagaggccgggcccgactactggtgggaaacgatgacgtgcatatcatcgccaggtccgacgacgagcttttagacgacttctttcatgatcagtcgaccgctacatcgcaggcggggacgctgtcatcgatcccgaccgctctcacccgctggaccgaagaatgcaaggtgctggatgccgagtcaatgcacgattgtgtgtccgtggtaaaagtgtccatcgttaaccatctggagtttctcagagatgaagagttggaagagcggagggagaaaagaaggaaacagctggcagaagaggagacgaagattaccgacaaagggaaggaggacaaagaaaacagggaccagtcagcacagtgcaccgccagtaaatccaatgattctactgagcagaacttgagcgatggaactccgatgcctgacagttatcccacaaccccctccagcaccgacgcagcaactagcgagagcaaggaaacactgggcaccctccagtcaagtcagcaacaaccaactctgccgacccctcccgcactgggagaggtgccgcaggagttgcaaagccccgccggcgaaggtgggagcagcacacagctcctgatgcctgtggagcctgaagaactaggcccaacacggccctctggcgaggccgaaactacgcagatggaactttctcccgccccaacaatcacaagcttgagcccggagcgggctgaagattccgatgccttaacggcggtcagttctcaactcgaggggagtcctatggacacttcttctctggcctcctgcactctagaggaagctgtgggcgacacctcagcagctggatcaagcgaacaaccaagagctggttcgagtacccctggcgacgcgccccctgccgtggcggaggtacaaggcaggtctgacggcagcggggaaagtgcccagcctccagaggattcttcccctcctgcatcctccgaaagcagctcaacacgtgattcagctgtcgcgatttcaggggccgattcgcgaggaattctggaggaaccattgccttctacctctagcgaagaggaggatccactggccggcatcagtctgccagagggcgtggacccctctttccttgccgctcttccggatgacatccgacgagaggtcctgcagaaccagctgggaatcaggcctccgactcggacagccccttccacaaatagttctgctcccgccgtggtcggcaatccaggtgtcaccgaggtgtcccctgaatttctggccgcactaccccctgcaatccaggaagaggtgctcgctcaacagcgggccgagcagcagcgtcgcgaactggcgcagaatgcgagctcagacacgcccatggaccctgtaacgtttattcagactctgccatctgacctgagacggtcagtgctcgaagacatggaggacagtgtcttagctgtaatgccccccgatatagcagccgaggctcaggctctccggagagagcaagaggccagacagcggcaactaatgcacgaacggcttttcggacactccagcaccagtgctttatcggcaatactgagaagccccgcctttaccagcaggctgtctggcaaccgcggtgtgcaatatactcggcttgcggtccagaggggggggacctttcagatgggggggtcatcgtctcataatagaccttccggatccaatgtggatacgctgttgaggttgcggggtagactgctgttggaccatgaggccttgtcatgcctactggtgctgctctttgtcgacgaaccaaaactgaacacatctcggttgcacagggtgctgcgtaatctctgttaccacgcacagacaagacactgggtcattcgttcactgctttcaatcctgcagaggtctagcgaatcagaattatgtatagagacccctaaattaacaacatcagaagaaaaagggaaaaaatcctcaaagagctgcggcagctctagccacgagaatcgccccctcgatctgcttcacaagatggaatcaaaatcctctaaccaactctcatggctttcagtgtctatggatgctgcactcggttgccgaacgaacatcttccagattcaaagatctggcggccggaagcacaccgagaagcatgccagtggcgggagcaccgtgcatatacacccgcaagccgcccctgtcgtgtgccggcacgtcctcgatacactcatacagttggctaaagtgttcccaagccactttacccagcagcggacgaaggagacaaactgcgaatccgacagagaaagaggtaataaagcatgctctccctgctcttcacaatcctccagctccggcatctgcacagacttctgggatctgctggtgaaactggacaatatgaacgtttccaggaagggcaaaaactccgtcaaaagtgtccctgtgagcgctgggggagaaggcgagacgtccccttattccttggaagcgtctcctttgggccaacttatgaacatgctgtcccatccagtaattaggcggtcaagcctcctgaccgaaaagctgctgaggttgctgtctttgatctctatcgctctgcctgagaacaaggtgtccgaggcacaagcaaacagcggctcaggcgccagcagtacgactactgcaacaagcaccacctctacaactactaccaccgccgcaagcacaactccaacaccccccacagccccaacacctgtcacaagtgcaccggccctggtggcggcaaccgcaatttcaacaattgtggtagccgcatctacaacagtaaccactcccaccaccgccacaacaaccgtgtcaattagcccaaccacaaaaggaagcaagtccccagctaaggtgtcggatggcgggagttcgtctaccgatttcaagatggtgtcttcaggtctgaccgaaaaccaattgcaactgagtgtggaggtgttaacatcacactcgtgctcggaggagggactggaggacgccgcaaacgttctcttgcagttgtcccggggggattccggcacaagagacaccgtgctgaagttgttgctgaacggcgcccgccatctggggtatactctgtgcaagcagatcgggacgttattagcggaactgagggagtataacctggaacaacagcggcgagcgcaatgtgagacactgtcacccgacgggttacccgaggagcagccgcaaaccacaaaactgaaaggcaaaatgcagtccagatttgacatggccgaaaatgtcgtgattgttgcgtcccagaagcgtcctttaggcggtcgtgaactccaactcccaagtatgtccatgcttacctcaaagacgagcacccagaagtttttccttagggtgctgcaggtcatcattcagcttagagacgatacacggcgggccaacaagaaggcgaaacagactgggcggctcgggtcatctggcttgggctccgcttcatcaattcaggctgcagtgcgccaattggaggctgaggctgatgcgataattcaaatggtgcgcgaaggccagcgcgcccggcgccagcagcaggcagcgacatccgagagttcgcagtctgaagcttctgtacgtcgcgaagagtctcctatggacgtggaccagccgagcccgtcagcacaggatactcagtccatcgccagcgacgggacaccacagggggaaaaggagaaggaggagagacctcctgagcttcccctcctgagcgagcagctctcgttggacgagttgtgggatatgcttggcgagtgcctcaaagaattagaggagtcccacgaccaacatgctgtattagtgttacaaccagccgtggaagcattctttctcgtgcacgccactgaacgcgaaagcaagccccctgtgagggacacaagagagtcccagctggcccacatcaaagacgagcccccccccctctcacctgcgccactgacacccgcaaccccttcctctctcgacccgttcttctctcgggaacctagcagtatgcatatctcaagttcactacctccggacactcaaaaattcctgcggttcgcagaaacccatcgtacagttttgaaccagattctcagacagagcacaacgcatctggctgacgggccttttgccgttctggtggactatatccgcgtgttagactttgacgtgaaaagaaaatatttcagacaagagctcgaaaggttggacgagggtctacgcaaagaggatatggccgtgcacgtacgacgcgaccatgtcttcgaagacagttacagggagctgcacagaaaatcaccagaggagatgaagaaccgtttgtacattgtgttcgaaggtgaagaaggccaggacgcgggaggactgctgcgcgagtggtatatgatcatcagtagagagatgtttaatccaatgtatgccctgtttaggacaagcccaggtgaccgggtgacatacacgattaaccccagctctcattgtaaccctaaccacctgagctacttcaagtttgtcgggcgtattgttgccaaagcggtgtacgataacagattgttagagtgctacttcacacgcagcttctacaagcacatcctgggtaagtcggtccgatacacggacatggagagcgaggattaccacttctatcaaggcctcgtgtacttgctggaaaacgacgtcagtaccctgggatatgaccttacattctcaacggaagtccaggagtttggcgtctgcgaggttagggatttgaagcccaacggtgcgaatattctcgtgacagaagagaacaagaaagaatatgttcatctcgtctgccagatgcgtatgaccggggccataaggaagcaactggccgctttcctagagggtttctatgaaattattcccaagagattgatttccatctttacggaacaggaactggagctcctgatcagcggactgccaaccatcgatattgatgacctcaaatccaatacagaataccataaatatcagagcaattccatccaaattcaatggttttggcgcgcattacgctcttttgaccaggcagatagagctaagttcctccagttcgtcactggcacgtctaaggtgcccctgcaaggtttcgccgcactggaaggcatgaatgggatccagaaatttcaaatccatagggatgacagatcaactgaccggttaccctctgctcatacctgcttcaatcagctggatcttcccgcctacgagtcctttgagaaactgaggcacatgcttctgcttgccatccaggaatgttcggaaggttttggcctggcatag

SEQ ID NO: 277705 - DNA, 13125 bp, Artificial Sequence
  derived and/or modified sequence
atgaaggtcgaccgaaccaagttgaaaaaaacacctacagaggcgccagccgactgccgggctctgatcgataagctgaaggtttgcaatgacgaacagctgttgttagagctgcagcagattaagacctggaacatcggcaaatgtgagttataccactgggtggacctgttggaccgatttgacgggatcctggccgacgcaggccaaaccgtcgaaaatatgagttggatgctcgtatgcgatagaccagaaagagaacagctgaagatgctgctgctggccgttcttaattttaccgccctgttgatcgaatactctttttcacggcacctgtactcgtctatagaacacctgactacgctgctggcaagtagtgatatgcaggtcgtcctggcggtgctcaacttactctacgtgtttagcaaacgtagcaactacattacacgcctggggtccgataagcgaacccccctgcttacacggctgcaacacttggcagagagttgggggggaaaagagaatggctttggcctagccgagtgttgtcgggatcttcatatgatgaaataccccccaagtgctaccacccttcactttgagttttacgcggacccaggggcagaggtcaaaatcgaaaaaagaaccacatcaaacaccctacattatatacatatcgagcaactggacaagataagcgaatccccatcagagataatggagagcctgactaaaatgtatagcatccccaaagataaacagatgttgttatttacgcatattagactcgcccacgggttctccaatcatagaaaacggctccaggccgtgcaagctaggttgcatgcaatcagcattttagtttattccaacgccctccaggagtccgccaacagcatcctgtacaacggcctcatagaggaactggtggacgtactgcagattacggataagcagttgatggagataaaagctgcatccctccggaccttgacatccatagtgcatttggagcgtacgccaaagcttagctcaattatcgactgcactggcaccgctagttatcacggctttctcccagtgctggtccggaactgcattcaggcaatgatcgacccttctatggatccgtatccacatcagttcgccacagccctcttttcgtttctttatcaccttgcttcttatgacgcagggggtgaggctctggtttcttgtggcatgatggaggctttgctgaaagtgataaagttcctgggtgatgaacaagatcagatcactttcgtcacccgagcggttagggttgtggacttgattaccaaccttgacatggcggcttttcagtcgcattctgggctaagtatcttcatttaccggctcgaacatgaggttgacctatgtcgaaaagagtgcccatttgtgatcaagccaaaaattcagaggccgaacacaacccaggaaggagaagaaatggagacggatatggatggcgtacaatgcatccctcagcgggctgctctgctgaagagcatgctcaattttctcaagaaagcaatccaagatccggctttttcggacgggatccggcacgtgatggacggatcactgccaacctcacttaaacacatcatctccaatgctgagtactatggcccaagtctgtttctcttggccacagaagttgtgactgtgttcgtctttcaggagccaagcctcctgtcctctctccaggacaatgggctcactgatgtgatgcttcacgctctcctgatcaaagacgtccccgctacgcgcgaggtccttgggagccttcctaacgtgttcagtgctctgtgcctgaacgcacggggacttcaaagtttcgtgcaatgccagcccttcgaacgtttgtttaaagtgttgctaagcccagactatctgcccgcaatgcgcagaaggcgaagctcggaccccctcggagatactgccagtaacctcggtagcgccgtcgatgaactgatgagacatcaacctactctcaaaacggacgcgactaccgcaatcattaagctattggaagagatctgcaatcttggcagagatcccaagtatatctgccagaaaccttcgattcagaaagccgatgggaccgcgactgctccaccaccgaggagtaaccacgctgcagaagaggcaagttccgaggacgaggaagaagaggaagtccaagctatgcagagctttaactccacacagcagaatgagaccgaacccaaccaacaggtggttggcacagaagagagaatacctatcccactgatggattacatacttaatgtgatgaaattcgtggagtcaatactgtctaacaatactactgatgaccattgtcaagagttcgtgaatcaaaaaggcctgctgcctctcgtgacaattcttggtctcccgaacctgcccatcgacttcccaactagtgcggcttgccaggccgtggccggagtgtgtaaatcaatacttacactgtcacatgagcccaaagtactccaggaaggactcttacaactagatagtattctgagcagcctggagcctcttcacaggcctatcgaaagccctggcggatcggtgcttcttagagagctcgcctgcgctgggaatgtggcggacgctactcttagcgcccaagcaacgccacttctacacgctctgaccgccgcacatgcatacatcatgatgtttgtgcatacctgccgggtcggacagtccgagattcgatcaatttccgtgaatcagtggggctcccaattggggctcagtgtgctttctaagctcagtcagctgtattgtagtctcgtctgggaatccactgtgttactctcgctgtgcacccccaatagtctgccttctggatgtgaattcggccaggctgatatgcaaaaacttgttccgaaggacgagaaagctggaaccactcagggaggaaaaagatctgacggcgaacaggatggcgctgctgggtctatggatgcttccacccaggggcttctggaggggataggccttgacggtgacaccctggctccgatggaaactgatgaacctacagccagcgatagtaagggcaagagcaagatcactcctgctatggctgcacgcattaagcagatcaaaccccttttgtcggcctcctctcgccttggtagagcccttgctgaactgtttggactgcttgtaaaattatgcgtggggtctccggttcgtcagcgtagatcacaccacgcagccagcacgacaacagcccctacaccagcagcacgaagcaccgcttcagctctcaccaaactgctgacaaaaggtctcagctggcagccaccaccctacacaccaacaccgagatttcgccttactttttttatatgcagtgtgggtttcacgagccccatgctatttgacgagcggaagtacccttaccatctcatgttacaaaaatttctctgttcaggcggtcataatgcactgttcgagacatttaactgggcactcagcatgggagggaaagtgcctgtgagtgaaggattggagcactcagacctgccggatggcacaggtgagtttctggacgcctggttgatgctggtcgagaagatggtgaacccaacaaccgtcctcgagtctcctcattccctccccgctaaattacctggaggcgttcagaattttcctcagtttagtgcactgcggtttttggtcgtaactcagaaagccgcattcacttgtattaagaacctttggaatagaaagccattaaaagtgtacggaggacgcatggctgaatcaatgctcgcgattctctgtcacattctgcggggtgagcccgtgatccgtgaacgactgtccaaagaaaaggaaggctcacgcggagaagaagatacgggccaggaagaaggcggaagtaggcgtgaaccacaggttaatcagcaacagctgcaacagctcatggatatgggtttcacaagggaacatgccatggaggcattactgaatacatcaacaatggagcaggctacagagtacctgctgactcaccctcctccaattatggggggtgtggttagggacctatccatgtcggaagaagaccaaatgatgagggcaatcgctatgtcactcggtcaggatattcccatggaccagagagcagagtcccctgaggaggttgcatgtcgaaaggaggaggaagaacgaaaagcgagggagaaacaggaggaagaagaggccaagtgccttgaaaaatttcaagatgccgatcctttagagcaagacgagttacacaccttcactgacaccatgctcccaggctgtttccacctgcttgatgagcttccagatactgtgtacagagtatgcgacttgattatgactgcaataaaacgaaacggcgcagactacagagatatgattctgaagcaggtggttaatcaggtgtgggaagcggcagacgtgctaatcaaggcggcactgcctctcacaacatccgacacgaaaactgtatccgagtggatctcccaaatggctaccctgccacaggcaagcaatctggccacacggattttattactcactctgctgtttgaagaactgaagctcccctgcgcctgggtggttgagtcttctggcattctaaatgtgctaatcaagcttctcgaagttgtacagccttgtctgcaagctgccaaggagcagaaggaagtccaaacgccaaagtggatcacaccggtcctcctgcttatagatttttacgaaaagactgccataagctccaagcggagggctcagatgacaaaatatctgcagtccaactctaataattggcgttggtttgatgacagatctggacgctggtgcagctatagtgcaagcaacaatagcacgatcgacagcgcttggaagtctggggagacctccgtgcgttttacagctggccgaaggcgctacacagtacagtttacaacaatggttcaggtcaacgaggagaccggcaatagaaggccagtgatgctcacgcttcttagggtgccacgtctgaataagaactccaagaatagtaacggtcaggagctcgaaaaaactctggaagaaagtaaagaaatggacattaagaggaaggagaacaagggcaatgacacccccttagctcttgagtccacaaacacagaaaaagagacgtccctggaagaaactaaaataggggaaatcctcatccaggggttgacagaggatatggtgaccgtcttgatccgagcctgtgtcagtatgttgggggttcccgtggatccagatacgttgcacgctaccctgcggctctgtctccggctcactagggatcacaagtacgccatgatgtttgctgagctcaaatccactagaatgattttgaacctgacccagtcctccggcttcaatggcttcactcccttggtcacgctgctcttgagacacattattgaagacccgtgcactttgcgccacacaatggaaaaagttgttaggagcgctgcaactagcggggcaggatcaacgactagcggagtggttagtggttccttaggaagtagggaaataaattatattcttcgggttctggggcctgctgcatgcagaaatccagacatcttcaccgaggtggccaattgctgcatccgcatagccttgcccgctccacggggttccggcaccgcttcggacgacgaattcgaaaatcttcgcataaagggcccaaacgccgtgcagttagttaagaccactcctttaaagcccagcccactaccggtgattccagacacgataaaggaggtaatttacgatatgctaaacgctctagcggcttatcatgcacccgaagaggcagacaagtctgaccctaagccaggggttatgactcaagaagtgggtcagttactgcaggatatgggggatgatgtgtaccagcagtataggtctctgacccggcagtcctccgatttcgatactcaaagtgggttctccattaactcacaagtgtttgcagcggacggggcaagtaccgagacaagcgcaagcgggaccagccaaggggaggcttctaccccagaagaatcacgagacgggaagaaggataaagagggtgatcgtgcgagtgaagaggggaaacagaaggggaagggatcaaaaccactgatgccaacatccaccattctgagattactcgcagagctcgtgagaagctacgtcgggatagcaaccctgatcgctaattatagctatactgtgggccagagcgaattaattaaagaagactgcagcgtgctcgcttttgtcttagaccatctgctgcctcatacacaaaatgccgaagacaaggacacacctgcactcgcaaggctttttctggcgtccctggctgccgctggcagcggtacagacgcccaagttgctctcgtgaatgaggttaaggcggctttgggacgggctctggcaatggcggagtcaaccgagaagcatgccaggcttcaggctgtaatgtgtatcatttccacaattatggagagctgtcctagtacatcgtccttttactcttcagctaccgcaaaaacccagcacaacgggatgaacaatatcatacgtctctttctaaaaaaaggactggtgaatgacctggcccgagtaccgcactccctggacctgagcagccccaacatggccaacacagtgaatgccgctctaaagcctttagaaacactcagtagaatcgttaaccagccaagctctctctttgggagcaaatccgccagttctaagaacaaatcagaacaggatgcacagggagcaagccaagactcgtcatctaaccaacaggatcccggagaacccggagaagcagaagtccaggaggaggaccatgacgttacacagacagaagtagccgatggtgacatcatggacggtgaggccgagaccgatagcgtcgtaattgccggacaacctgaggtgctgtcctcacaggaaatgcaggtcgaaaacgaactggaggacctgatagacgagctgctggaacgagacggcggatctgggaactcaacaatcattgtttctaggtctggcgaggacgaatcccaggaggatgtcctcatggacgaggctccttccaatttgagtcaggcctccacgctgcaggcgaatcgggaagacagtatgaatatactggatcccgaggatgaggaggaacacacccaggaagaggactcatcaggatcaaacgaagacgaggacgacagccaggatgaggaggaggaggaagaagaggatgaggaagacgatcaggaggatgatgaaggtgaggagggggatgaggacgatgacgatgacggctcagaaatggagcttgatgaggactaccccgacatgaatgcctcgcctctagtcagatttgagcgcttcgacagggaggatgatctcatcatcgagtttgataatatgttctcaagcgcaacagacatacccccaagtccgggaaacatccccaccacccaccccctgatggtgcgacatgccgaccactcctcgctgactttgggatcagggtcctcaacaacaagattgacccaggggattggacggtctcagagaactctgcggcagctgaccgctaatacaggtcacaccattcacgttcactatccaggaaatcgacaacccaatcctccgttaatccttcagcggctgctggggccatctgcagccgctgacatactccagctgagctccagcctgcccctacagtcaaggggaagggccaggctcctcgtcggaaacgatgatgtgcatatcattgcacgttcagacgatgagctgctggacgattttttccatgatcagtccacggccacttcccaggctggcactctgtctagcattcccaccgccctcacacggtggaccgaggagtgcaaggtactggacgccgaatcaatgcacgactgtgtatctgtggtcaaggtcagtattgttaatcaccttgagttcttaagggacgaggagctagaggagcgcagggagaaaaggcgaaagcaactcgccgaggaggaaaccaagatcacagacaagggaaaagaagataaggaaaaccgggaccagtctgcccaatgtaccgcatccaagtctaatgactctaccgaacagaatctgtccgatgggactcctatgcctgattcgtaccctacgaccccaagctccaccgacgctgcaactagcgaaagtaaagagaccctaggtacgctccagtcaagccagcaacagccaaccctccctactccacccgctctcggcgaggttccacaggagctccagtctcctgccggagagggaggtagctcgacacagctcctcatgcccgttgagcccgaggaactgggcccaacccgcccttcaggggaggccgagacaacacagatggaactctctcccgcacccacaattacttcactgagccccgaacgggcagaagactcagatgccttaaccgccgtttcaagtcagctcgaaggttccccgatggacacttcttccctcgcatcttgtacgctggaagaggctgtgggagacacatccgccgctgggagcagtgagcagccacgggctggctcctcaacacccggagatgcccctcctgcggtggcagaggtgcaaggcaggtcagatggcagcggcgagagtgcccagcctcccgaggattcatccccccctgctagtagtgaaagttcatcgacccgggattccgcagttgctatctctggagccgacagtcgtgggatcctcgaggaaccactcccatccacaagtagcgaggaagaggaccctcttgccggtatctccctgcctgagggcgtggatcccagctttttggccgcattgcccgatgacatccggagggaggttctgcagaaccagcttgggatcaggcctccaacgagaacagcgccatctaccaattcctccgctccggctgttgtgggcaaccctggtgttactgaagtatcccctgaatttctggctgctcttccacctgcaattcaagaagaagttctcgcccaacagagggccgagcagcaacgccgtgaattggcccaaaatgcttcctctgataccccaatggacccagtaacttttatccaaaccctgccctctgatctcaggcggtcagtcttggaagacatggaggattctgtactagccgttatgcctcccgacattgccgcagaagcccaagctttaaggcgtgaacaggaagctcggcagcgccagctcatgcatgagcgccttttcggtcactcgagtacatccgctctctctgcgatcctcaggtctcccgcattcacatcacggctgtcaggaaaccgtggcgtccagtacacacggctggccgtgcaaagaggtggaactttccaaatgggcggaagttcgtctcacaaccggccttctggcagcaatgtggatacactgctccgactcaggggaagactactgttagaccacgaagcactgagttgtctgcttgtcttgctgttcgtggacgaaccaaagctgaacacctccagactccatcgggtactcaggaatctgtgctaccatgctcagacgcgacactgggttattaggtcgctgctgagtatcttgcaaagaagcagcgagagtgagctgtgtatcgaaaccccaaagttaaccacctctgaagagaagggcaagaaatcaagtaagagctgcggaagtagctcccacgaaaatcgacctctggatttgttacacaagatggagagtaagagttccaaccagctgagttggctgtctgtgagtatggacgcagcattggggtgtcgcacaaatatattccagattcaaagatccgggggtcgaaaacataccgagaagcacgcaagcggcggatctaccgttcacattcacccccaggctgcccctgtcgtttgtcgccacgtcctcgacacactgatacagcttgccaaggtgttcccatcccactttacccagcagcgtaccaaggagacgaactgcgaatcagaccgggaacgaggtaataaagcatgcagcccttgttcctctcagtcatcttcatctggcatttgcaccgatttctgggatctgctcgtaaaattggacaatatgaacgtgtcacggaagggaaaaaacagcgtgaagtccgttcccgtgagtgctgggggagagggcgaaacctcaccttatagtctggaggcgagcccactggggcagttgatgaacatgttgtcacatcccgtgatcaggcggtcttctttactaacagagaagctcctgcgcctcctgtccctaatttctatcgccttaccagagaataaagtgtccgaggctcaagccaatagtggttctggggcttcctcaactacaacggcaacgagcactacctccactactaccacaactgccgcatctacaacccctaccccgccaaccgcccctactcctgtcacgtcggcccctgctttggtcgccgctactgcgattagcactattgttgtcgccgcttccaccactgtcaccacgccgaccactgctacaaccaccgtgtctatctcccccaccacaaagggatccaaaagcccagccaaggtcagcgatgggggttcaagctctaccgatttcaagatggtgagttctgggctgacagagaatcagctgcagttaagtgttgaagtcctcacctctcactcctgcagcgaggagggtcttgaggatgcagccaatgtcttgctacagctgtctcgaggagactcagggacccgggacaccgtgctcaaacttctgctcaatggtgcacgccaccttggttatacactgtgtaaacaaatcggtacacttcttgcagaactccgggaatacaatctggaacaacaacgaagggcccaatgtgaaacgctgtcgccggacggactgcccgaagagcagccccagaccaccaaattaaaggggaagatgcagtcccgctttgacatggcagagaacgtggtaattgtggcctcccagaaaagaccacttggaggccgtgagctccagctcccctcaatgtccatgctgaccagcaaaacatctacccagaagttctttttacgcgtgctgcaggtaattattcagctcagagatgataccagacgagctaataaaaaggccaagcaaacagggaggcttggatcatccggcctcggatccgcctcgtccattcaggctgctgtgagacaactggaagccgaggcagacgcaatcatccagatggtgcgggaggggcagcgcgctcgtcgacagcagcaggccgcaacttcagaatcctcacagtccgaagcgtcagtgcggcgagaagaatccccaatggatgtcgatcaaccatctcctagtgctcaggatacccagagcatcgccagcgacggcacccctcagggggagaaggagaaagaagaaagacctccagaactgccccttctctccgaacagctcagtctggatgagctctgggacatgctaggcgaatgcctgaaggaactagaggagtcccatgaccagcatgccgtgctggttctccaacctgctgtcgaagcattttttctggtgcatgctactgagcgggaatccaaaccgcctgtgagagacacacgggagtcccagttggcccacatcaaggatgaacccccaccactgtctcccgcaccactcacacctgctaccccctcttcacttgacccgtttttttcccgggagccctctagtatgcatatatcatcttcactcccacccgatactcagaaatttctgcggttcgccgaaacgcaccgaactgttctgaatcagatactgcgtcagagcaccacacatctggcggacggaccatttgccgtgctggtggattacatccgggtgctggacttcgatgttaagcgcaaatacttcagacaagaactggaacgcctggacgaaggcctcagaaaagaggacatggcagtgcacgtgcgtcgcgatcacgtattcgaggacagttacagggaacttcacaggaaaagtcctgaggagatgaagaataggttatacattgttttcgagggagaggagggacaggacgctgggggactgttaagagagtggtatatgattatttccagagagatgttcaaccctatgtacgcactgttcaggacgtcgcctggggatagggtgacatacacgattaacccatcttcccactgtaaccctaatcatctttcctattttaagtttgtgggaaggattgtcgctaaagcagtgtatgataatcgcctgttagaatgttactttaccagatctttctataagcacatactgggaaaatcagtgcgatataccgacatggagtctgaagactaccacttctaccagggcttagtgtatctcctggaaaatgatgtgtccactctggggtacgacctcacctttagtaccgaggtgcaggaattcggggtttgtgaggtccgcgatctgaagcctaacggagccaacatcttggtgacggaagagaacaaaaaagagtatgtgcacctcgtgtgtcagatgcggatgactggggcaattcgcaaacagctcgctgcatttcttgagggattttatgagattatccctaaacggctcatttcgatatttacggaacaggaacttgaacttctcattagtggtttgcccacgatagatatagacgacctaaaatctaatacagagtatcataagtatcagagcaacagcattcagatccagtggttttggagagcgctgagaagctttgaccaggcagaccgtgcaaaattcttacagttcgttacaggcacctctaaggtcccactgcagggcttcgcagctctggagggcatgaatgggatccagaaatttcagattcatagggatgaccgcagcacagaccggctccctagcgcacacacctgcttcaatcaacttgatctgcctgcctatgagtctttcgagaagcttagacacatgctgctcctggccatccaggaatgctctgagggcttcgggttagcttaa

SEQ ID NO: 277706 - DNA, 13125 bp, Artificial Sequence
  derived and/or modified sequence
atgaaggttgaccgaaccaaactcaaaaaaacccccactgaagcccctgccgattgtcgcgcactcatcgacaagctgaaagtgtgcaacgacgagcaacttctgctggaattacagcaaatcaagacctggaacatcggcaaatgtgagctgtaccactgggtcgatctactggacaggttcgatggcatcctagctgacgctggacagaccgttgaaaacatgagttggatgctggtgtgtgaccggccagagcgcgagcagctcaaaatgttgttgttggccgtgctgaactttaccgccctgctgatagagtattccttcagcaggcatctctatagcagcatcgaacaccttaccacgctactcgcaagtagcgacatgcaggttgtgttggctgttctgaatctcctgtatgtgttttccaagcgcagcaattacataactcgtcttggtagcgacaagaggacgccccttctgactaggcttcagcaccttgcggagtcatgggggggcaaagagaacgggttcggtctcgccgagtgctgtcgggacctccatatgatgaaatacccaccttccgcgacgactttacacttcgagttttatgcagaccccggtgccgaggtaaagatagagaaaaggactacatcaaacactctccactacatccatatcgagcaactcgacaagatcagtgaaagtcctagtgagatcatggagtccctgacaaagatgtatagcatccccaaggataagcagatgctcctgttcacccatatcaggctggcacacggattcagtaaccacagaaaacggttgcaagcagtccaggccaggcttcacgccataagcatactcgtgtatagtaacgccctgcaagagtccgcgaatagtattctgtacaacgggctcatcgaggagttggtagacgtcctccagatcactgacaagcagctgatggaaatcaaggctgcctcactccgaacattgacgagtatcgtgcacctggagaggacaccaaaactgagttccattatcgactgcacagggactgcaagctaccacggcttcctgccagtgctcgtgcggaactgtattcaggctatgattgatccttcaatggacccctatcctcaccaattcgcgacagccctgttttctttcctgtatcatctggcatcctatgatgccggtggagaggctctcgtttcttgcggaatgatggaagccctcctcaaggtgatcaaattcctcggcgacgagcaagaccagattacctttgtaacaagagctgtgcgcgtcgtggatctgattaccaacctcgatatggccgcttttcagtcacacagcggactgtcgatattcatttatcggctggagcacgaggtggatctgtgtcgcaaggagtgtccctttgtcatcaaaccaaaaattcagagaccaaacaccacccaggagggggaggagatggagactgatatggacggcgtacagtgcattcctcagcgagccgccctgcttaagagtatgctgaactttctaaagaaggcgatccaggatcccgccttcagtgacgggataaggcacgtgatggacggtagcctgcccacctctctcaagcacatcatctccaatgccgagtactacggcccctctttatttttgttggctaccgaagtggtcactgtattcgtattccaggagccaagcctactctctagcctgcaggacaatggtctaactgacgtgatgcttcacgcccttctcatcaaagacgtacctgctacgcgcgaggtgctggggagcttgccgaacgtgtttagcgccctgtgcttgaatgcgcggggcttgcagagctttgtgcaatgccagccgtttgaacgtctgttcaaggtcctactgagccccgattatctccccgccatgcgacgccgcagatcttcagatcccctgggcgacactgcttcgaatttgggttcagcagtggatgagcttatgagacatcaacctaccctcaaaactgatgccacaacggctattatcaagttgctcgaagagatttgtaatctgggcagagaccctaagtacatctgtcaaaaaccttccattcagaaagcagatgggacggccacagcaccccccccccgatccaatcatgcagctgaagaggccagctcagaggacgaggaggaagaagaggtgcaggcgatgcaaagcttcaactccacgcagcagaatgagacagagccaaaccagcaggtggtaggaactgaagagcgcatccctatccctctgatggactatattctgaacgttatgaagtttgtcgagtctatcctgtcgaataacaccaccgacgaccactgccaggagttcgtgaatcagaagggactcctaccactcgtgaccattctgggcctcccaaacctgccgatcgactttcccaccagtgcagcctgtcaggcagtcgctggcgtgtgcaaatctatcctgactttgtcgcatgaaccaaaagtcctacaggaggggctgttacaattggattcaatcctcagtagccttgaacccctccacagacctatcgagtccccgggagggagtgtgttactcagggaactcgcatgtgcgggaaacgtcgccgacgccaccctctctgcccaggcaacccctttgctgcacgcattgaccgctgcccacgcctacatcatgatgtttgtgcatacttgcagggttggccagtccgaaattagatccatctcagttaatcagtgggggtctcagctaggattgtccgtactgagtaagctgagtcagttgtattgttcgctagtttgggagagtaccgtgcttctgagtctttgcactcccaactcgctgccctcaggatgtgagttcggtcaagccgacatgcagaagctggttccaaaggacgaaaaagctggcacaactcagggtggtaagcgttccgacggcgagcaggacggtgcagccggctctatggatgcctccacacagggactgttagaaggcatcggacttgacggagatacattagctccgatggagacggatgagcccactgcgtccgacagcaagggaaagagcaaaatcactcccgctatggcagcaaggattaagcagattaaaccactgctcagcgcatccagccgactgggaagagcccttgccgagctgtttggactgctcgtcaaactctgcgtcgggtccccagtgcggcagcgtaggtcccatcacgctgcgtctaccaccacagccccaacgccggccgcccgtagcacagcatccgcccttacaaagctccttactaagggtttaagttggcagcctccaccttacactcccacaccaaggttccggcttaccttcttcatctgctcagttggtttcacttcccctatgctcttcgacgagcggaagtacccatatcacctaatgctccagaagttcctttgtagcgggggtcacaatgccttgtttgaaaccttcaactgggcactttctatgggtgggaaggttcccgtgtccgaaggcctggagcatagcgatcttcccgacggcactggagagttcctggatgcctggttgatgctggtggagaagatggttaaccctacaacggtccttgagagccctcactccctcccggcaaagttacccggaggagtgcaaaattttccgcagttttctgcgctgcgatttctggtagtcactcaaaaggccgcttttacgtgtattaagaatctctggaatagaaagccgctcaaagtgtacggtggcagaatggctgagagcatgctggcaatactgtgtcacatcttgcgaggcgaacccgttattcgagagcggctctctaaagagaaggaagggtctcgcggcgaggaggacactgggcaggaagagggtgggtctaggcgcgagccccaggttaatcagcaacaactgcagcagctcatggacatgggtttcaccagggaacatgcaatggaggccctcctgaacaccagtaccatggagcaggccacagaatatctgcttactcatccacctcctatcatgggaggggtggttcgagatctctccatgtccgaagaggaccaaatgatgcgagcaattgcaatgagccttggccaggatatacccatggaccaaagagccgaaagtccggaggaagtcgcttgccgcaaggaagaagaggagcggaaagccagagagaagcaagaagaagaagaagccaagtgcttggagaagtttcaggatgctgatccccttgagcaggatgaactccacacctttaccgataccatgctgccaggctgcttccatctactggacgaactccctgatacagtataccgagtgtgtgacttgatcatgacggctatcaaaagaaacggtgctgattatagagacatgatcctcaagcaggttgtgaatcaagtctgggaggccgctgacgtcctgattaaagcggcccttcctcttactacaagcgacaccaaaactgtcagtgaatggatttcacaaatggccacactgccgcaggcttctaatctcgctactagaattctgctactgactctgctctttgaggaactgaaattgccttgtgcttgggtcgtagagtcatctgggatcttaaatgtgctcatcaagctgctcgaagtcgttcagccttgtttgcaggccgccaaggagcagaaggaggtgcagacacctaaatggatcacgccagtgctcctgctgatcgatttctatgaaaaaactgctatatctagcaaacggagagctcagatgaccaagtatctccagagcaatagcaataattggcggtggttcgacgacagaagtggccgatggtgttcctacagtgcctccaacaactctaccatcgatagtgcatggaagagcggggagacatcggttcgctttacggccgggagacggagatacacagtccaattcacaacaatggttcaggttaatgaagaaaccgggaatcgccggccagtgatgcttacattgcttcgcgtgccgagactgaacaaaaactccaaaaatagcaatggtcaggagctggaaaagaccctggaagagagtaaggaaatggacattaagaggaaggagaacaagggcaatgatacccctctcgcattagaaagcactaacactgagaaagagacgtctctcgaggaaaccaaaatcggcgaaatcctgattcagggtctgacggaagatatggtgactgtgctgatccgtgcctgtgtttcaatgctgggagtgcccgtggaccccgacactttacacgcaacactcagactgtgtcttcgccttacgcgcgaccacaaatatgcaatgatgtttgctgaattgaagagcacaagaatgattctgaacctcactcagagtagcggatttaacgggttcacccctctcgtgaccctgttattgaggcatatcatagaggacccctgcactctaaggcataccatggagaaagttgtccgctctgctgcaaccagcggcgccggaagtaccacctctggcgtcgtcagcggatctctggggagtagggagatcaactacattcttagagtgcttgggcctgcagcatgcaggaatcctgacattttcaccgaggttgcgaattgctgtataagaatcgccctcccagctccccgcggtagcggtactgcatccgacgatgaattcgagaacctccgtattaaagggccaaacgctgtacagctggtgaagacaactccactcaagcccagtccacttcccgtgattcccgatacaattaaggaggttatttatgacatgctgaacgccctggctgcctatcacgctccagaagaggcagataagagtgatcctaaacccggtgtgatgacccaagaagtgggacagcttctccaggacatgggcgacgatgtctatcaacagtaccgatccctgacacggcagtcttccgactttgatacccagtccgggttttccataaacagtcaggtgttcgccgccgatggcgccagtactgagacgtctgcctccgggaccagtcagggcgaagcaagcactccagaagagagccgagatggcaaaaaggataaggaaggagaccgcgcctctgaggagggaaagcagaaagggaagggatccaagccacttatgcccactagcaccattctgcgcctgctggccgaactggtgcggagctacgtgggcattgctacactgatcgcgaactattcctatactgtggggcagtccgagttgatcaaagaggattgttccgtgctggctttcgtgctcgaccacctgctcccacacacacagaacgccgaagacaaagacacacccgccttggcgcgactgttccttgccagcctggccgccgctggatccgggactgacgcccaggtggctcttgtcaatgaggtcaaggcggctctgggaagggcactggctatggccgagagcacagagaagcacgctcgtctgcaagctgttatgtgcatcatctccactatcatggagtcatgcccgagtacctctagcttctatagctccgctacggctaagacccagcacaacggcatgaacaatatcataaggctcttcttgaaaaaaggactcgttaatgacctggcaagggtcccacacagcctcgatctgagtagtcccaacatggccaataccgtgaatgccgctctgaagcccttagaaacactgagcagaatagtcaatcaacccagctctctgttcggtagtaagagtgcctcatctaaaaataagagcgaacaggatgctcaaggggcatcacaggacagtagttccaatcaacaggaccccggggagccgggcgaggctgaagttcaggaagaagatcatgacgtaacccagaccgaggttgccgatggagatatcatggatggcgaagccgagacagacagcgttgtgatcgccggtcagcccgaggtcctctctagtcaggagatgcaggtggagaatgaactcgaagatcttatcgatgaactgctggaacgagatgggggatccggtaattctactattatcgtctcccggagcggcgaggacgagtctcaggaggatgtgctaatggacgaagctcccagtaatctgtcacaggcgagtacgttgcaggccaaccgcgaagactccatgaacatattagaccctgaggatgaagaggagcacacccaggaggaggacagtagcggtagcaatgaggatgaagatgacagtcaggatgaggaggaggaagaggaagaggacgaggaggatgaccaggaagatgacgagggcgaggagggcgacgaggacgatgacgatgacggcagcgaaatggagcttgacgaagattaccctgacatgaatgcctctcctctcgttcgtttcgaaagatttgatcgagaggatgaccttatcatagagtttgataatatgttttcctccgctacagacattccaccttcccccgggaacattccaaccacccatccactaatggttcgccacgcagaccacagctccctcaccctcggtagcgggtcgtctactacaaggctaacccagggaatcggccgcagccagaggacccttcgccaactcaccgcaaacaccggccatacgatccatgtccactatcctggaaatcggcagccaaatccacccctcatcctgcaaaggctcctaggcccttccgccgccgccgacatattgcaactgtcttccagcctgcctctgcagtctcggggcagagccaggctcttggtgggaaacgacgatgttcatattatagcccgttctgatgatgagttgctggacgattttttccatgaccagtctacggccacctcacaagccggcactttgtccagcatcccaaccgctctgactcgatggactgaagagtgcaaggttctcgacgctgagtccatgcatgattgcgtcagcgtggttaaagtaagtatcgtgaaccacctggaattcctgagggatgaggaacttgaagaacgtcgagaaaagcggcgaaaacaattggcggaagaagaaacaaagataacggacaaggggaaggaggataaagagaaccgcgatcaatcagctcagtgtacggcctctaagagcaacgatagcaccgaacagaatctctccgacgggactcctatgccggactcgtaccccaccactcctagttccacagacgcagccaccagcgagtctaaggagactcttgggactctgcagagttctcagcaacaacccacactgccaaccccccctgctcttggtgaagtgcctcaggagctccagagccccgcaggcgagggaggcagtagtacccagctgctgatgcccgtcgaacccgaggagcttggcccaacaaggccgagtggtgaggctgaaacaacgcagatggagttaagtccagcacccaccataacttccctgtcacccgagagggccgaggactctgatgccctcaccgcagtgagtagtcaacttgaaggaagcccaatggacacttcctctcttgcgtcttgcactctggaggaggccgtgggagacacttcggcagcgggcagtagcgagcagcccagggccggttctagcactcctggggacgcccctccagccgtagctgaggttcagggcaggagtgatggatcgggcgaatccgcacagccaccggaagacagcagccctccagcctcaagtgagtcctcctccactagagacagcgctgtggctatttccggagccgatagtcgggggattttagaagagcctttgccgagcacctcttccgaggaggaggacccgctcgcaggcatctcgcttccggagggagtcgacccgtccttccttgccgcactgcccgacgacatccgccgtgaggtgttgcaaaaccagctggggatccgtccgcccaccaggaccgcaccctccacaaactcatccgcccctgccgttgtggggaaccccggagtgacagaagtgagccctgagtttctagccgccctgccccctgctatccaagaagaggtgttggcccagcaaagagcggaacaacaaagacgcgagctggcccagaacgcttccagtgatactcctatggatcctgtaacgttcattcagaccctcccttcagatctccgaagaagtgtgctggaggatatggaggattccgttctggccgttatgcctcccgacatcgcagccgaggcgcaggctctgcggagagagcaggaagccaggcagcgtcagctcatgcacgaaaggctcttcgggcattctagtacatctgccctgagcgccatactccgctctccggcattcacgagcaggctgtcaggcaataggggtgtgcaatacactcggttagccgtgcaaaggggcgggaccttccaaatgggcggcagctcttcccataacaggccaagcggatcaaacgtggacactttgctgagactccgtggcagattgctgctagatcatgaagccttatcatgtctgctcgtgcttttgttcgtggatgagccgaaactaaacacaagtaggctgcacagagtgctgcgcaacctgtgttaccatgctcaaacgcggcactgggtgattcgttcgctattgtccattctccagcgttcttctgagtctgagttgtgtattgagactcctaaacttactactagcgaggagaaggggaagaagtctagtaagtcttgcggcagctcaagccacgagaacagaccattggatttattgcacaagatggagagcaaatccagtaatcagttgtcctggttgagcgtctctatggacgccgccctgggctgtcggacaaacattttccaaatacaaagaagtgggggtaggaagcacacagagaagcacgcaagtggaggaagcaccgttcatatacacccacaggcagcccctgtcgtttgtcgccacgtgctggataccctgattcagctggcgaaggtctttccatcacactttacccagcaacgaaccaaagagaccaactgtgaaagtgatcgggaacggggaaacaaagcctgctccccatgctcatcccagagcagctcttccggaatttgcaccgacttttgggacctcttggtcaagctggacaacatgaacgtctccaggaaaggaaagaattccgtcaaatccgtgcccgtttctgcgggtggtgaaggcgagacctccccttattccctggaagctagccctctggggcaattgatgaacatgctctcacacccggtgatcaggcggtcaagtctactaaccgagaagttgctgcggctgctgagcttgattagcatagccctgccagagaacaaggttagcgaggcacaagccaactcaggttccggggcctcatctacaaccaccgccaccagtaccacttccaccacaactacaacagcagcatcaactacaccgacccccccaaccgcacccacaccagtaacaagcgcccccgctttagtcgctgctaccgctattagtactattgtggtggccgcatctactacagtcactacaccaacaacggctacgaccacagtgagcatcagccccacgaccaagggcagcaagtcacctgccaaggtttcagatggtggcagctccagcaccgacttcaaaatggtaagcagcggattgaccgagaatcagctacagttaagcgtagaagtactgacctcccattcctgtagcgaggaaggcttggaagatgcggctaacgtgctgctccagctctcgagaggtgattctggtacccgcgatactgtccttaaacttctcctgaacggagcgagacaccttgggtataccctgtgtaaacagataggcacactcctggcggagcttagagagtataatttggagcagcagaggagagctcaatgcgagaccttgtcgcccgatggcctgccagaggaacagccacaaacaactaagcttaaggggaaaatgcagtcgcggtttgacatggccgagaacgtggtcatcgtggcctcccagaagagacccttagggggccgtgagctacagctgccttccatgtcgatgctgacatcaaaaacctccactcaaaaattcttcctgcgagtgctgcaggtgatcattcaactgagggacgacacaagacgggccaataagaaggccaagcagaccggcagactcggctcaagtgggctcgggagtgccagctctatccaggcagctgttcgtcagctggaggctgaagccgacgcgatcatccagatggtgagagaaggccagcgtgcccgacgacaacagcaggccgccaccagcgaatccagccagtccgaggcttccgttagaagagaagaaagccccatggatgttgaccagcccagccctagtgcacaggatacgcaatccattgcttcagacggtacaccccaaggtgagaaggagaaggaggagcggccacctgagctgccactcctaagtgagcagctttcactagacgagctatgggacatgctgggggaatgtttgaaagaactggaagaaagccacgatcagcatgctgtcctggtcctgcagcccgccgtggaggcgttcttcttggtacacgccacagagcgcgaatcaaagcctcccgtgcgtgatacaagagagagccagctagcgcacattaaggacgaacccccacccctcagtcccgctccgctgactcccgccaccccatcatcgcttgatcctttctttagcagagaaccctctagcatgcacataagctcttctctgcctcccgacacccagaagtttctgaggttcgctgagacacataggacagtgcttaatcagatcctgaggcagtctaccacccacctggcagacggaccttttgctgtgttagtggactatatccgggtcctggattttgacgtcaagaggaagtactttaggcaggagctggagaggctggacgaaggcctgaggaaagaagacatggcggtgcacgtaagacgggaccatgtgtttgaggattcttaccgcgagttacacagaaagagcccagaggagatgaagaaccggctgtacatcgtgtttgagggcgaggaaggccaggacgccggtggcctcttaagagaatggtatatgatcatctcacgcgagatgttcaaccctatgtatgccctgtttagaacgtccccaggagatcgtgtgacttacactatcaaccccagctcccattgcaatcccaatcacctaagttacttcaaatttgtggggcgaatcgtagctaaggctgtgtacgacaaccgtctgcttgaatgttactttaccagatccttctacaaacacattctgggcaagtccgtgagatacacggatatggagagcgaggactaccacttctaccagggactagtgtacctattagaaaatgacgtgtccacgctcgggtacgatctgaccttctctaccgaagtgcaggaattcggcgtctgtgaagtccgagatctcaagcccaatggagccaacatactggttacagaggaaaacaaaaaagaatatgtgcatctcgtgtgccaaatgagaatgactggggctatcaggaagcagttggccgcttttctggaaggtttttacgagattatcccgaaaaggctcatcagcatcttcaccgagcaggaactcgagttgctgatctccggcctccctacgattgacattgacgaccttaaatctaatactgagtatcataaataccaaagcaattccatccaaatacagtggttctggagggcactacggagcttcgatcaagcagatcgggccaaatttctccagttcgtaaccgggacctctaaggtgcctctccagggcttcgcagctctagaaggaatgaacggaatccagaagttccagatccatcgggatgaccgcagtacagatagattgcccagcgctcacacgtgttttaaccagctggacctacccgcctatgagagctttgaaaagctcaggcacatgttgctgctggccatccaggaatgctctgagggattcgggctcgcttag

SEQ ID NO: 277707 - DNA, 13125 bp, Artificial Sequence
  derived and/or modified sequence
atgaaggtggatcggactaagttaaagaagactcctacagaagcccccgccgattgtcgtgcgctgatcgataagctgaaggtctgcaatgacgaacagctgttactggaactgcagcaaataaagacctggaacattggaaaatgcgaactgtatcactgggtggatctgctcgacaggttcgatgggatcttggccgacgcaggccagactgtggaaaacatgtcatggatgcttgtatgcgataggccagaaagggaacaacttaagatgctgttgctggctgtcctcaactttacagctcttctgatcgaatacagcttctcccggcacctctactcatcgatcgaacatctcactactctgttggcctcctcagacatgcaggtggtgctggcagtactcaaccttctgtatgtgttctctaagaggtccaactatatcactcgcctcggcagcgacaagagaacccccctcctaacaaggctgcagcacctggccgaatcctgggggggcaaagagaacggcttcggattagccgagtgttgccgggacctgcacatgatgaaataccctccctccgccaccacactccacttcgaattttatgcagaccctggcgccgaagtgaagatcgaaaagagaacgacttccaataccctgcactatattcacattgagcaacttgataagatatctgagtcccctagcgagattatggagtcactgaccaagatgtattccattcctaaggacaagcagatgctgctgttcactcatattcggctggcccacggcttctctaaccatcgcaagcgcttgcaggcagtccaggctaggttgcacgcaattagcatcctcgtatattccaatgccctgcaggaatccgccaactctatcctctacaacggcctaatcgaagaactcgtggacgtcctgcagataaccgataagcagctgatggaaatcaaggcagcttccctgcggaccttaacctccatcgtgcacctggaacggacacccaaactgtcctcgattatcgattgtacaggtacagcttcttatcacgggttccttccagtgcttgtccgcaactgcatacaggctatgatcgaccccagtatggatccttacccacaccaattcgctactgcccttttttctttcctctatcatctcgcatcgtatgatgctggaggcgaggccctagtgtcttgcggaatgatggaggccctacttaaggtgatcaagttcttgggcgacgaacaagatcagattaccttcgtgacaagagccgttagagttgtagatctgattactaacttagacatggcagccttccagagccattctggccttagcatctttatttaccggttggaacacgaggtggacctgtgtcggaaagaatgcccctttgtgatcaagcctaaaatccagcggcccaacaccacccaagagggagaagagatggaaaccgatatggacggcgtgcaatgtatccctcaacgggctgctctgcttaagtccatgttgaattttctgaagaaggccatccaagatccagctttcagcgatggtataagacacgtaatggatggaagtctccccacttctcttaagcacattatctctaacgctgagtactacgggcccagcctctttctgcttgccaccgaggtggtaaccgtgtttgtcttccaggagccctcactgttgagttcccttcaggacaatggactgacagacgttatgttacacgcactcctgatcaaggatgtgccagctacccgcgaagtgctcgggtccctgcctaacgtgtttagcgctctgtgtctaaacgcccgcggcttgcagagtttcgtccagtgtcagccctttgagcggctatttaaggttttactcagtcctgattacctgcccgctatgcgtaggagacgaagctccgatcccctgggcgataccgcttctaatcttggctccgccgtagatgagctgatgcgacaccagcccactctgaagacagacgcaactacagccataatcaagctgctggaagagatctgcaacttggggcgggaccctaagtatatctgccagaagccttcaattcagaaggcagatggcacggctaccgcgcctccccctaggagcaaccacgcggccgaggaggcctcttctgaggacgaagaggaggaagaagtgcaggcaatgcaaagcttcaattccacccaacaaaacgagaccgaaccaaaccagcaggtggtcgggacagaggagcggataccaattcctctaatggactacatccttaatgttatgaaatttgttgaatctatcctgagtaataatacaacagacgaccactgccaggaattcgtgaaccaaaagggcctcctgccactggtcaccattctcgggctgcctaatctcccaatagactttcccaccagcgctgcatgccaggctgtggccggcgtgtgcaaatcaattcttaccctttctcatgagcccaaggtcctgcaagaaggcctgcttcaattggactcgatcctcagtagcctggagcccctccaccgccctattgagtccccgggaggctccgtgttgctgagggaattagcatgcgccggcaacgtggcagacgctaccctatctgcacaggcaaccccactcctccacgcgttgactgctgctcacgcctacatcatgatgtttgtccatacctgtagggtgggccagagcgagataaggagcatttctgtgaaccaatggggttctcagttgggcctgtctgtcctctccaaactgtctcagctgtactgctccttggtgtgggagtcaacagtcctgcttagtctctgtacccccaacagtttaccttccggatgcgagttcgggcaggctgacatgcagaagcttgtgccgaaggacgagaaagctggtaccacccaaggcggaaaacgatccgacggtgaacaagatggtgcagccggcagtatggacgcatcgacacagggcctgcttgagggcataggtctggatggtgacacactcgctcccatggagactgacgagcccacggcgtcagactcaaagggaaagtctaaaattaccccggccatggccgcccgaatcaaacaaatcaagccgttattgagtgccagcagtcgtcttggacgagcgctcgccgaactgtttggcctactcgtgaaactgtgtgtgggaagtcccgtgcggcagcgacgatctcaccacgctgcatccactaccactgccccaacgccagctgcgcgctcgaccgcttctgcccttaccaagttgctgactaagggcttatcctggcagccacccccctataccccgacccctcgctttaggctcacctttttcatatgtagcgtgggattcacatctcctatgctcttcgatgaaaggaaatacccctatcatttgatgctccagaagttcctgtgttcgggcggtcataatgccctcttcgaaaccttcaactgggccctatctatggggggtaaagtgcccgtatccgagggactggaacactctgaccttcctgacgggacaggggaattcctcgatgcatggcttatgctggttgagaagatggtcaatcccactactgtgctcgagtctcctcatagcctgcccgcaaagttgcctggcggcgtgcagaatttcccacaattcagcgcgctccggtttctggtcgtcacccaaaaggcagcattcacttgtatcaaaaacctgtggaatcggaaacctctcaaagtctatggaggtcggatggccgagagcatgctcgccatattgtgtcacattttgcgtggcgagccagtgatccgggagcgactgtctaaagagaaagagggctcccgtggcgaagaagataccggtcaggaggagggcggaagtcgtcgggaaccgcaagtaaaccagcaacagctgcagcagctaatggacatgggcttcaccagggagcatgccatggaggcactgttgaacacaagtaccatggagcaagccaccgagtatctgctgactcatcctccgcccatcatgggaggggtagtacgtgatctgtcaatgtccgaagaggatcagatgatgagagccatagccatgtcgctgggtcaggacattcccatggatcaaagggcagaatcccctgaagaggtggcatgccgcaaagaagaggaggagcgaaaggcacgtgaaaagcaagaagaggaggaggccaagtgcctcgagaagtttcaggacgctgaccccctagagcaggacgaattgcacacgtttaccgacaccatgctgcccggctgtttccacctgttggatgaactccctgacaccgtataccgggtttgcgatctgatcatgacagcaattaaaagaaatggcgccgattacagagatatgatcctgaagcaagtggtaaaccaggtgtgggaggctgcagacgtgctcataaaagctgctctgcccctgactactagtgacaccaagacagtgagtgagtggatcagtcagatggccacactgccgcaagcttccaacttggccaccagaatcctgttgctaacactgctctttgaggaattgaagctgccgtgcgcgtgggtggtggaaagtagtggtatcctaaatgttctgatcaagttgctcgaagtggttcagccctgcctgcaggccgcgaaagagcagaaagaggttcagacccctaagtggatcacacccgtattactcttgattgacttttatgagaagaccgccatcagtagcaagcggcgggcacagatgacgaagtacctccaatccaactcaaacaattggcgttggttcgacgaccgcagcggccgctggtgttcatacagcgcctctaacaatagcaccatcgacagtgcctggaagagtggtgaaacaagcgtcaggttcaccgccgggcgaagacggtataccgttcagttcacaaccatggtacaagtgaatgaggagacgggtaaccgccggcctgtaatgctgacactactgcgcgtccctcggttgaataagaactctaagaactccaatggccaagagttggaaaagactctggaagagtccaaggagatggatatcaagcggaaggagaataagggaaacgatacccctctggcccttgagtcaacaaatacggagaaagagacgtctctggaggagacaaagataggcgaaatcctgatacagggcctaacagaggacatggtcaccgtcttgattagagcttgcgtatcgatgttaggcgtacctgtagatccggacactctgcacgctaccttgaggctctgcctgcgcctaactagggatcacaagtacgctatgatgtttgctgagcttaagagcacccgcatgattctgaatctgactcagtcaagtggttttaacggctttacacctctggtcaccttactgctgcgccacattatcgaagacccatgtaccttaagacatactatggaaaaggtggttaggagcgcggccactagcggggctggctccaccacctcaggggtggtcagcggtagcctgggctctagggagattaattacattctgcgtgtgctcgggccggctgcttgtagaaacccagatatttttaccgaggtggccaattgctgcataaggatcgctctgccagccccacgcgggtctggcacagctagcgacgatgagtttgaaaatttgcgaattaagggccctaatgcggtgcagcttgtgaaaaccactccccttaagcccagccctcttcctgtgatcccagatactattaaagaggtaatctatgacatgctgaatgctctggccgcataccacgcgccggaggaggccgataaaagtgaccccaagcctggtgttatgacccaggaagtggggcaactgctgcaggatatgggagacgacgtgtaccagcagtaccgaagcctcacccgacagagtagcgactttgacactcagtcaggcttttccattaactcccaagtgttcgcagccgatggtgcaagcaccgaaaccagcgcctccggaacatctcagggcgaggcctctaccccagaagaatcccgcgatgggaaaaaggacaaagaaggtgaccgggcttctgaagagggcaaacagaaggggaagggcagcaagccgctaatgccaacttctaccattctgcggctactggccgaactcgtgcggagttacgtgggtattgccactcttattgctaattatagttacactgtgggccagtcagaactgatcaaagaggactgctccgtgctggcttttgttcttgaccatctcttacctcacacacagaatgccgaggacaaggatactcctgcacttgcacggctcttcctggcttcccttgccgctgccgggagcggcacagacgctcaagtcgcactggtcaacgaggtgaaggctgctctggggcgggctctcgccatggctgaaagcacagagaagcacgccaggcttcaggctgtcatgtgcattattagtaccatcatggagagttgtccatcaacaagtagtttttattcaagtgctaccgctaagacgcagcacaacgggatgaacaatatcatccgccttttcctgaagaaaggactggttaacgaccttgctcgggtaccgcattcacttgatctctcgtcccctaacatggctaatactgtcaacgcagccctaaaacctcttgagacactttctcgaatcgtgaaccagccatcctcattgtttggatccaagtctgctagcagcaaaaacaaaagtgagcaggatgcccagggagccagccaagatagctcctccaaccaacaagatcctggcgaacccggagaggcggaggtccaggaggaggaccacgacgtcacacagactgaggttgccgacggggacattatggatggtgaggccgaaaccgattcagttgttatagctggacagcccgaggtcctgtctagtcaggagatgcaggtggagaacgagctcgaggacttgatcgacgaactcctggaacgcgatggcggaagtggaaattcaaccattatagtttcgcgttcaggcgaagacgaatcccaagaggatgtccttatggacgaggcaccctcaaacctttcccaggcttccacgctacaggctaacagggaggactccatgaacatactggatcccgaagatgaagaggagcacactcaggaggaagatagcagtggctctaatgaggacgaagacgacagtcaggacgaagaggaggaagaggaggaggatgaggaggacgaccaagaagacgatgaaggtgaggagggtgatgaagacgacgacgacgacggctctgaaatggaactggacgaggattacccagacatgaacgcctctccgttggtacggttcgagcgattcgacagagaagacgatctgatcattgaattcgataacatgttctcgtctgcgacagatattcccccgtctcctggcaatataccaacaacacaccccttgatggttcgccacgcagatcattcaagcctaaccctgggctccggatcttccaccacgaggcttacacaagggataggccgctcccaaagaacactgaggcagttaacggccaatacaggccacacaatacacgtccattacccagggaatcggcaacccaatccccccttgatcctgcagcggctgttaggaccgtctgccgccgccgacatccttcagctttcttctagcctaccgctccagagccggggccgtgcgcggctgctcgtgggtaacgacgacgtacacataatcgcgcgtagcgatgatgagctattagatgatttcttccatgaccaatctactgccaccagtcaagctggcacactcagcagcatcccaacggcacttactaggtggactgaggaatgcaaggtcctggatgcggagtcaatgcacgattgtgtgtcagtggtgaaggtgagcatagtgaaccacctggagtttcttagagatgaagagctggaggaaaggagggagaaacgcaggaagcagctagcggaggaggagactaaaattaccgataaaggaaaggaagacaaagaaaatcgtgatcagtctgctcagtgtacggcctccaagtcgaatgattccaccgagcagaacttgtcagacggcacaccgatgcctgattcttacccaacaacacccagcagcaccgacgctgctactagcgagagtaaagagactctgggtacactgcagagcagccagcagcaaccaacattgcctactcctcccgccttgggggaggtcccccaggagctacaatccccagccggtgagggtggctcctcgactcaactcttaatgcctgtggaaccggaggaactggggccaacccgcccgagtggcgaagccgagactacacaaatggaactgagtcccgccccaaccataactagcctttccccagagcgcgctgaggatagcgatgccttaacagccgtgtcctcgcagctggaggggagtcccatggatacatccagcctggcctcgtgtaccctagaggaggccgtgggtgatacatctgcagccggctcgagcgagcagccacgggctgggtcatcaaccccgggagacgccccgcctgcagtggccgaagttcaagggaggtcagatggttccggcgagtcagcccagcctcctgaggattcttcaccccctgcaagttccgagtcatcatccacaagggacagtgccgtcgccatcagcggcgctgactcccggggaatcttggaggagcctttgccaagcacttcttctgaagaggaggatcctttagctggcattagcctgcctgagggcgtggacccctcctttctcgccgccctccctgatgacataagaagggaagtgctccagaatcagctcgggatccgcccaccaaccagaactgccccaagtaccaacagcagtgctccagctgtggtggggaaccccggggtgactgaagtgagtccggaattcctggccgccttaccacccgctattcaggaggaggtgctcgcccaacagcgtgcagagcagcaacgtagggagttggcacagaatgctagttcagacacccccatggatccagtgacttttatccagacattgcccagcgatctgcggagaagcgttttggaggacatggaggactctgtcctcgccgtgatgcctccggacatcgccgcagaggcacaggcattgaggcgggagcaggaagccaggcagcgtcagctgatgcacgagcggttgtttggccattcctcaacgagcgcacttagcgctatactgaggtctccagcatttaccagccggctttcaggcaacagaggtgtgcagtatactagactggctgtgcaaagagggggtacattccagatgggcggttcatcctctcataatcgcccgagtggaagtaatgtggacacgctactgcggctgaggggacgccttcttctggaccatgaggccctgtcctgcctgctagttctactgtttgttgacgagcccaagctcaacacctctcgcctacacagggtgctcaggaacctgtgctaccacgctcagacgagacactgggtgatccgaagtctgctttctatcctgcaacgatcctcagaaagcgagctatgtatagaaacccctaaacttacgacgtccgaagagaaggggaaaaaaagcagtaagagttgcggctcgagctctcacgagaataggcctcttgaccttcttcacaagatggagtcaaagtcatctaaccagttgagctggctttccgtgtccatggacgccgccctcgggtgccggaccaatatttttcaaattcagcgtagcgggggaaggaaacacaccgaaaagcacgcatcaggtggtagcacagtacatatccatcctcaggccgcacccgttgtgtgccgccatgtgctggacactctgatccagttagccaaggtgtttccgtctcactttactcagcagcggactaaggaaaccaactgtgaatccgatcgggagagaggtaacaaggcctgtagcccatgtagcagtcagtcttcaagttcaggcatttgtaccgatttttgggatcttctcgtgaagcttgacaacatgaacgtttctcgaaagggcaaaaatagcgtgaagtctgtgccggtgagtgccggtggcgaaggagaaacttccccctactcgctggaagcatcccctctggggcagctgatgaacatgttgtcgcacccggttatccgccgctcatctctgctgactgagaaattgctgcgactgttgtcactcataagtattgctctccccgaaaacaaggtgtcagaggctcaggccaacagtggcagcggggctagtagtacaactacggccacatcgactacgtccactaccaccactacagccgcctctacaactcccacccctcctactgctcctacccctgttacatccgcaccagctctggtggcagctaccgctattagtaccatcgtcgtggcagctagcaccactgttaccactcctactactgcaactacaactgttagtataagccccacgaccaagggctccaagtctcccgccaaggtgagcgacggcggatccagctctaccgacttcaagatggtgagtagtggtctgactgagaatcagctacaactctcagtggaagtgctaacttcccactcatgctcagaagagggtttggaagatgcggcaaatgtcctcctccagctcagcagaggagattccgggactagagacacggtgctgaagctcttactaaacggcgcgaggcatctggggtatactctatgtaaacaaatcggcactcttttagctgagctccgagaatataacctggagcagcagaggagggcccagtgtgaaacactttctccggatggcctacctgaggaacagcctcaaaccacaaagctgaagggcaagatgcaaagtcgttttgacatggctgaaaacgtcgttatcgttgctagccaaaagcgacctctgggagggcgggaactgcagttgccttcaatgagcatgctgacttcgaagacctctacccagaaattcttcctacgcgtccttcaggtgataatccagctgagagatgacacacgaagggcaaataagaaggctaagcagacaggccgactaggctcttccggcctcggcagcgctagctccatccaggccgctgttcgccaactcgaggccgaagccgatgccatcatccaaatggttagggaaggccagcgagcgcgacggcagcaacaggctgctaccagcgagagcagtcagtccgaggcaagtgtgcgccgagaagagtcgcctatggacgtagaccaaccaagcccctccgcccaggacacccaatctattgctagcgacgggacaccccagggagaaaaagagaaggaggaaaggccccctgagctgccacttctctctgagcagctttctctagacgagctctgggatatgctgggtgagtgtttaaaggaactggaggaatctcacgatcaacatgcagttctggtcctccagccggcagtagaagccttctttctggtgcacgcaacagaacgggaatctaaaccccccgtgagggacactagggagtcccaactggcgcatatcaaagatgaacctccacctttaagtccagcacctctgacccctgcaacgcctagtagcctagacccatttttttctcgggagccgtctagcatgcatatctccagtagcctgcctcccgacacccaaaaattcttaaggttcgcggagacacatcgtacagtcttaaaccagatcttaagacagagtaccactcatctggctgacggtcccttcgcagtcctggtggattatatcagggttctggatttcgacgtgaaaagaaagtacttccgccaggagttagagcgcctggacgaagggttgcggaaggaggatatggcggtccacgtcagacgggatcatgtctttgaggatagttatcgggagctgcaccgtaagtcccccgaagaaatgaagaatcgtttgtacatcgtgttcgaaggagaagaaggacaggacgcaggcgggcttttgagagaatggtacatgattatctctcgcgagatgtttaaccccatgtacgctctttttagaacatccccaggcgatagggtgacttacacaatcaatcctagcagtcactgcaacccaaatcacctcagctactttaagtttgtgggcagaattgtcgctaaggcggtatatgacaacagattgttggagtgttattttacaagaagcttctataagcacattctgggtaagtctgtcagatatactgacatggagtccgaggattatcacttttatcaggggttagtttaccttctggagaatgatgtctctacgttaggatacgacctcactttcagcaccgaggttcaggagtttggcgtttgtgaagtgcgtgatctgaaacctaacggggcaaacatcctggttactgaggagaataaaaaagagtatgttcacctcgtatgccagatgcgcatgacaggggcgatccggaaacagctggctgcttttttggagggcttctacgagattatcccaaagcgtctgatcagcattttcacagaacaggagctcgagctgcttatctctggcctgccgacaattgacatagacgatctcaaatctaacaccgagtaccataagtatcaaagcaacagcattcagattcagtggttttggagagctctacggtcttttgaccaggccgatagggcaaaattcctccagtttgtcaccggcacttctaaggtccctctccagggctttgctgcgctggaaggcatgaatggcatccagaagtttcagatccatcgggatgaccggagcactgacagactccctagcgctcacacatgcttcaatcagctggatctgccagcttatgagagcttcgagaagctgagacacatgctgctgctcgctatacaggagtgctccgaaggattcggcctcgcctag

SEQ ID NO: 277708 - DNA, 5019 bp, Artificial Sequence
  derived and/or modified sequence
atgaaggtcgatcgcacgaagctgaagaagacccccaccgaagctcctgcggactgcagagccctcattgataagctcaaagtgtgtaacgatgaacagctcctcctcgaacttcagcaaataaaaacatggaatatcggaaaatgcgaactttaccattgggttgatttgctcgacaggtttgatggaatcctagcagatgctggccagactgttgagaacatgtcctggatgcttgtctgtgatagacccgagcgcgaacagctgaaaatgctcttgctggctgtacttaatttcaccgctctcctgattgagtacagctttagccggcatctgtactctagtatcgagcatctgactactctgctggcctcttcagacatgcaggtggtgctggcggtcctgaatctgctctatgttttttctaagaggagcaactatattaccaggttggggtctgacaaacgaacaccactgttaacacgcttgcagcatctagccgaatcctggggcggcaaagaaaacgggttcgggctcgccgagtgctgtcgtgacctgcacatgatgaagtatccgccttccgcaaccaccctccacttcgaattttatgctgacccaggagccgaggtgaaaattgaaaaacggacaacgagtaatacactgcattacatccacatcgagcagctggataaaatttccgagagtccctccgaaataatggagagtcttaccaagatgtactctatcccaaaggataaacagatgctgttatttacccatatccggctcgctcacggcttttccaatcataggaaacgcctgcaggctgtgcaggcccggctgcacgccatatccatcctggtttacagtaatgcactacaagaaagcgcaaactctattctttacaacggattgatagaggagctcgtggacgttcttcagattacagataagcagcttatggagattaaagccgcaagcttacgcacactgacctccatcgttcacctggagcgtactccgaagctttcatcgattatcgattgtaccgggacagcaagctaccacggatttttaccggtccttgtgagaaattgcattcaagcaatgatcgacccgtccatggacccatatccccaccaattcgctactgcactgttcagttttctataccacttggcatcctatgatgccggcggtgaagccctggtctcgtgtgggatgatggaagcactgctcaaggttatcaagttcctgggtgatgagcaggaccagatcacatttgtcacacgcgccgtccgcgtggtagatctgattacaaatctggacatggctgcatttcagtcccactctggtctcagtatatttatctatcgtcttgagcacgaagtggacctttgtcgcaaagaatgtccattcgtgatcaaacccaaaatacagcgacctaacaccactcaggagggagaagagatggaaacagacatggacggggtgcagtgtattccccagcgcgctgctttgctgaagagtatgttgaattttctgaaaaaagccattcaggatccagctttctcagacggtatccgccatgtcatggacggtagtttacctacttccctgaagcacataattagcaatgccgaatactacggtccgtcgctgtttttgctggcaaccgaggttgttaccgtatttgtattccaggagcctagcctgctgtccagccttcaggataatggcctcaccgatgtgatgctccacgccctcctgatcaaggatgtgcccgcaacaagggaggttttggggtccctcccaaacgtattctccgcactttgcttgaacgccagagggcttcagtctttcgtccagtgtcagccttttgagaggttgttcaaggtcctgctctctccagactatctgcctgctatgcggcgtcgtcgctcctccgacccacttggagataccgcaagcaatctgggaagtgccgtggacgaactcatgcggcaccagcctactttgaagacagacgctacaaccgctataatcaaactgcttgaggaaatttgtaacctcggccgggaccctaagtacatttgtcagaagccaagcattcaaaaggcagatgggaccgctactgccccccccccccgaagcaatcatgcagcagaggaggcatcatcagaggatgaggaagaagaagaggtccaggcaatgcagagtttcaattcaacacagcaaaatgagactgaaccaaatcagcaggtggtcggcacggaggaacggatccccattccactgatggactacatcctgaacgtgatgaaattcgtggaatccatactgtcaaacaacaccactgacgatcattgtcaggaatttgtcaaccagaaggggttactacctttggtcaccatcctgggcctaccaaatctcccaatcgactttccaactagcgccgcatgtcaggccgtagcaggggtctgcaaaagtatccttaccttgtcccatgagcccaaggtgctgcaggaaggcctgctacaactcgacagcatcctgtcatccctggagcccctacataggcccattgaatctccaggaggcagcgtgctcctgcgtgagctggcttgcgcggggaacgtggcggatgccaccctcagcgcacaggcgaccccgttgctgcacgctttgactgccgcgcacgcctacatcatgatgtttgtgcatacctgcagagtgggccaatccgagatccggtcaattagcgtaaatcagtgggggagccagctagggctgagtgtcctctctaagctgtcacagctgtattgctccctggtttgggagagtacagttctcctttcactttgcactccaaactcccttccttccggctgcgagtttggtcaagcggacatgcagaagctcgtgcccaaggatgagaaggcagggaccactcagggcgggaaaagatcagatggtgaacaagacggcgccgcaggctcaatggatgcttccactcaagggctgctggaagggattgggttggatggcgatactcttgctcctatggaaacagacgagcccactgcgagcgactcaaagggtaagtcaaagatcacaccggcgatggcagcccgcatcaaacagatcaagccccttctctcagctagcagtcgtcttgggagggccctcgccgaattattcggactacttgtgaaactctgtgtcggctcccctgtgcggcagcgccggtctcaccatgctgcgtctacgaccacagctcccacaccagctgctcggtcgacagccagcgccctgaccaagctgctcaccaagggtttgtcgtggcagccccccccatacactccaacaccacgcttccgtctgactttttttatctgttctgtaggctttacgagtccaatgttatttgacgagaggaagtatccttaccacctgatgctccagaagtttctgtgctcaggtggccataacgctttatttgagacgtttaattgggctctgtccatgggaggcaaggtgcctgtgtccgaaggactggagcacagtgatctgcccgacggtacaggcgaattcttagatgcctggctgatgttggtggaaaagatggtgaatcccacaacagtgttggagagcccacactccctccccgctaaacttcccggcggcgttcagaactttccgcagttttcagcactccggttccttgtcgtgacccaaaaggccgctttcacctgtatcaaaaacctatggaatcggaaacctcttaaagtctatgggggtcggatggctgagtcgatgttggcaatcctgtgccacatcctgcgcggggagcctgtgatcagggagcgtttatctaaggaaaaggagggttcgcgcggtgaggaagataccggccaggaggaggggggaagtcggagagaacctcaggtgaaccagcaacagttgcagcaacttatggatatggggtttacccgagagcatgctatggaagccctgctgaatacatcgaccatggagcaggctacagagtatttattgacccatcccccccccatcatgggtggcgtggtcagggatctgagtatgtcagaggaggatcagatgatgagggcaatcgcaatgagcttgggacaagatatccctatggaccaaagagcagagtcccccgaagaggtggcctgccgtaaggaagaggaggagcggaaggcccgggagaagcaggaggaagaggaggcaaagtgtttggaaaaatttcaagatgccgatccgttggagcaagatgagttgcacactttcaccgacaccatgttacctggctgttttcacctactggacgaactaccagacactgtctacagggtgtgtgatctaatcatgacggctatcaaaagaaatggagccgactaccgggatatgattctgaaacaggtcgtcaaccaggtgtgggaagctgccgatgtcttgatcaaggccgcccttcctttgacgaccagtgacactaaaaccgtcagcgaatggataagccagatggctactttaccccaggccagcaacttggcaacccgcatcctactattgacattgctgttcgaggaactcaagttaccttgcgcatgggtggtggagagtagtggcatcctgaatgtcttgatcaagctgttggaggtagttcagccttgcctacaggccgctaaggaacaaaaagaggtgcagaccccaaagtggatcacacctgtactacttcttattgacttctacgaaaagactgcaatttcttctaaacggcgcgcccagatgaccaaataccttcaaagtaactcaaacaattggagatggtttgatgacagatctggtcgctggtgctcctattcagccagcaacaactcaaccatagattccgcgtggaagtctggggagacctcagtgagattcactgcgggcaggcgccgctacaccgtgcaattcaccacgatggttcagggaacgtccgctgagtag

SEQ ID NO: 277709 - DNA, 5488 bp, Artificial Sequence
  derived and/or modified sequence
gaggctttcgactgagggctagcgaggggagcacggctggagcagggctggagcagggctggagcagggctggagcagggctgaagcagggccgcggaccccgcacgctcctgcgggccccgcggagccattgcggccgaggcctcggcaggcgccagcggagagctagccgcatcttcgggggcagcccggcagctgccggcggcgcggcgagagagcggctgacagaggggatgcgaggtcctccagcagcctgacctgagtgggttagtgatccagagaaaccagcaggccaacttggtcaggaaggttcgggaagctgttggagcagtgtggggaatttcccaccaggatgagtatgattggctgtgattttagatcgtaaagctgaaaattgaaatcatgaaagtagacaggactaaactgaagaagacacctactgaggctcctgcagactgcagagccttaatagacaaactcaaagtttgtaatgatgagcaacttctcttggaactgcagcagatcaaaacatggaacattggaaagtgcgagttatatcactgggtggacctgttggaccgcttcgatggaatactggcagatgctggacagacagtggagaatatgtcatggatgctcgtatgtgataggccagaaagagagcaactgaaaatgcttctcttggctgtgttgaacttcacagccttgctcattgagtacagcttttcccggcatctgtacagttccatagagcatttgacaactttattggcttcctctgatatgcaagtggtgctggcagtcctcaatctcctatatgtatttagcaaaagatcaaactacatcactcgtctgggatctgacaagaggaccccgctgctaactcggctacaacatttggcagagagctggggtggaaaggagaatggctttggacttgcagaatgttgcagagacttgcatatgatgaaatatccacccagtgcaactacactacactttgaattctatgcagatcctggggccgaggtcaaaattgagaaaaggacaactagtaacacactacattatattcacatagagcaacttgacaagatttcagaaagcccttctgaaatcatggaatctcttaccaaaatgtacagcattcctaaggataagcagatgctgttatttacacacatacgactggcccatggcttttctaatcacaggaagcgattgcaggcagttcaggccagactgcatgcaatatctatattagtgtattccaatgccttgcaggaatcagcaaacagtatcttgtataatggcttgatagaggagttggtagatgtccttcagataacggataagcagcttatggagattaaagcagcttctttacgaacattaacatcaattgtccacttggagagaactcccaaactcagcagtattattgactgtactggaactgcctcctaccatggatttttgccagtgcttgtaaggaactgtatccaggccatgattgatccttccatggatccataccctcaccagtttgccactgctctcttctcttttttataccatctggccagctacgatgctggtggtgaagccttggtctcctgtggaatgatggaagccttattgaaggtcataaagtttcttggcgatgaacaggaccagataacatttgtcaccagagccgtcagagtggttgaccttatcaccaacctggatatggcagcttttcaatcccatagtggactttctatcttcatttatagacttgagcatgaagtagatttgtgccgaaaagaatgtccgtttgtgatcaagccaaagatccagagacccaatactacacaagaaggagaggaaatggaaactgatatggatggagtccagtgtattccacaacgagcagcacttctgaaatccatgttgaatttcctcaagaaggccatccaagaccctgctttctcagatggcatacgacatgtgatggatggttctctgcctacctccctgaaacacatcatcagcaatgcagaatactatggcccatcactcttcctcctagctactgaagtggtgactgtgtttgtatttcaagaaccatcactgctctcctcactccaggacaatggattgacagatgtcatgctgcatgcactgcttatcaaagatgttcctgctacccgtgaagtccttggctccctcccaaatgtattcagtgcactctgtttgaatgcccgaggtcttcagtcttttgttcagtgtcagccttttgaacgcctcttcaaagttcttctgtctccagattacctcccagccatgcggaggaggagaagttctgatccccttggggatactgcatccaacctggggagtgctgtcgatgagctcatgagacatcagcccacccttaaaacagatgcaacgactgccatcatcaagttacttgaagaaatctgtaatcttggaagggaccccaaatacatctgtcagaagccatcaatccagaaggcagatggcactgccactgctcctcccccaaggtctaatcatgccgcagaagaagcctctagtgaggatgaggaggaagaggaagtacaggccatgcagagctttaattctacccagcaaaatgaaactgagcctaatcagcaggttgttggtacagaggaacgtattcctattcccctcatggattacatccttaatgtgatgaaatttgtggaatctattctgagcaacaatacaacagatgaccactgccaggaatttgtgaatcagaaaggactgttgcctttggttaccattttgggtcttcccaatctgcccattgactttcccacatctgctgcctgtcaggctgttgcaggtgtctgcaaatccatattgacactgtcacatgaacccaaagtccttcaagagggtctccttcagttggactccatcctctcctccctggagcccttacaccgccccattgaatcccctgggggctcagtgttgttgcgagaactggcttgcgcaggcaatgttgctgatgctaccctctcagcccaggccacacctctgctgcatgcactcactgctgcccatgcctacatcatgatgtttgttcatacttgcagagttggacagagtgaaattcgttccatctccgtaaaccagtggggctctcaattgggtctgagtgttttgagcaagctgagccagttatactgttccctggtgtgggaaagcactgtcctcctctctctgtgtaccccaaacagcctaccatctgggtgtgaatttggccaggcagatatgcagaaactggttccaaaggatgagaaggcaggtacgacccagggcggaaaaagatcagatggggaacaggatggagcagctggaagtatggatgcttctacccagggcttattagaaggcattgggctagatggtgacacattggctcccatggagacagatgaacctactgcttcagactctaagggcaaatctaaaatcacaccagcaatggctgccagaattaagcaaatcaagcctttgttatcagcttcctccagattaggccgagcacttgctgagctatttggacttcttgttaaactttgtgtgggatctcctgtccgccagagaaggagccatcatgctgccagcaccactacagcaccgacacctgccgcgcgatcaacagcctcagctctcactaagctcttgactaaggggttatcttggcagcccccaccatatacacctactccccgattcaggctgacattcttcatctgttcagttggtttcacatccccaatgctgtttgatgagaggaagtatccctaccacctcatgctgcaaaaatttctctgctccggaggccacaatgctctttttgaaactttcaactgggctctgtccatgggaggtaaagttcctgtttctgagggattggaacactcagacttgcctgatggcacaggagaattcctagatgcctggcttatgctggtggagaagatggtgaatcccaccacggtgcttgaatctccacattcgctgcctgccaaattgcctggaggtgtccagaactttccccagttcagtgcactgcgcttccttgtggtaactcagaaagcagcctttacttgcatcaaaaacttatggaaccggaaacccctgaaggtatatggtggacgaatggctgaatcgatgctggccattctatgccacatcctccgaggagaacctgtgattcgagagagactaagcaaggagaaggaggggtctcgaggagaagaggatacagggcaagaggaaggtggctcccgccgggaacctcaagtcaaccagcaacaactgcaacagctcatggacatgggcttcacaagggaacatgcaatggaggcactgttgaacaccagcaccatggagcaggccacagagtaccttttaacccaccctcctccaatcatgggaggagttgttcgggatctcagcatgtctgaagaggaccagatgatgagagcaattgctatgtctctgggacaggatattccaatggatcaaagggcagagtcacctgaggaagttgcttgccggaaggaggaagaggaacggaaagctcgggaaaagcaggaggaggaagaggctaaatgtctagagaagttccaggatgctgacccgttggaacaagatgagctccacactttcacagatactatgttgccaggctgcttccaccttcttgatgagctgccagacacagtataccgtgtgtgtgacctgatcatgacagcaatcaaacgtaatggagcagattatcgtgacatgattctgaagcaagtagtcaatcaggtgtgggaagctgctgatgtattgatcaaagctgctcttcccctgacaacaagtgacacaaaaaccgtgtcagagtggataagtcagatggccacactgccccaggcctccaatttggctactagaatcttgcttttaacgctactttttgaggagttgaagctaccttgtgcttgggtggttgaatcaagtggcatccttaatgtcctaatcaaactcttggaagtggttcagccctgcctccaggcagccaaggagcagaaggaagtccagaccccaaagtggatcacaccagtgttgctcctgattgatttctatgaaaagacagccatctcctcaaaaaggagagcccagatgactaagtacctgcaatccaacagcaacaactggcgctggtttgatgatcgctctgggcgttggtgtagttacagtgcaagcaacaatagcactattgattctgcctggaaatctggagagacaagcgtgcgattcactgcaggccgaagaagatacacggtccaattcactacaatggtgcagggtacctcggctgaataaaaattcaaaaaacagcaatggacaggaactagagaagacgctggaagaaagcaaagaaatggatatc

SEQ ID NO: 277710 - DNA, 14692 bp, Artificial Sequence
  derived and/or modified sequence
gaggctttcgactgagggctagcgaggggagcacggctggagcagggctggagcagggctggagcagggctggagcagggctgaagcagggccgcggaccccgcacgctcctgcgggccccgcggagccattgcggccgaggcctcggcaggcgccagcggagagctagccgcatcttcgggggcagcccggcagctgccggcggcgcggcgagagagcggctgacagaggggatgcgaggtcctccagcagcctgacctgagtgggttagtgatccagagaaaccagcaggccaacttggtcaggaaggttcgggaagctgttggagcagtgtggggaatttcccaccaggatgagtatgattggctgtgattttagatcgtaaagctgaaaattgaaatcatgaaagtagacaggactaaactgaagaagacacctactgaggctcctgcagactgcagagccttaatagacaaactcaaagtttgtaatgatgagcaacttctcttggaactgcagcagatcaaaacatggaacattggaaagtgcgagttatatcactgggtggacctgttggaccgcttcgatggaatactggcagatgctggacagacagtggagaatatgtcatggatgctcgtatgtgataggccagaaagagagcaactgaaaatgcttctcttggctgtgttgaacttcacagccttgctcattgagtacagcttttcccggcatctgtacagttccatagagcatttgacaactttattggcttcctctgatatgcaagtggtgctggcagtcctcaatctcctatatgtatttagcaaaagatcaaactacatcactcgtctgggatctgacaagaggaccccgctgctaactcggctacaacatttggcagagagctggggtggaaaggagaatggctttggacttgcagaatgttgcagagacttgcatatgatgaaatatccacccagtgcaactacactacactttgaattctatgcagatcctggggccgaggtcaaaattgagaaaaggacaactagtaacacactacattatattcacatagagcaacttgacaagatttcagaaagcccttctgaaatcatggaatctcttaccaaaatgtacagcattcctaaggataagcagatgctgttatttacacacatacgactggcccatggcttttctaatcacaggaagcgattgcaggcagttcaggccagactgcatgcaatatctatattagtgtattccaatgccttgcaggaatcagcaaacagtatcttgtataatggcttgatagaggagttggtagatgtccttcagataacggataagcagcttatggagattaaagcagcttctttacgaacattaacatcaattgtccacttggagagaactcccaaactcagcagtattattgactgtactggaactgcctcctaccatggatttttgccagtgcttgtaaggaactgtatccaggccatgattgatccttccatggatccataccctcaccagtttgccactgctctcttctcttttttataccatctggccagctacgatgctggtggtgaagccttggtctcctgtggaatgatggaagccttattgaaggtcataaagtttcttggcgatgaacaggaccagataacatttgtcaccagagccgtcagagtggttgaccttatcaccaacctggatatggcagcttttcaatcccatagtggactttctatcttcatttatagacttgagcatgaagtagatttgtgccgaaaagaatgtccgtttgtgatcaagccaaagatccagagacccaatactacacaagaaggagaggaaatggaaactgatatggatggagtccagtgtattccacaacgagcagcacttctgaaatccatgttgaatttcctcaagaaggccatccaagaccctgctttctcagatggcatacgacatgtgatggatggttctctgcctacctccctgaaacacatcatcagcaatgcagaatactatggcccatcactcttcctcctagctactgaagtggtgactgtgtttgtatttcaagaaccatcactgctctcctcactccaggacaatggattgacagatgtcatgctgcatgcactgcttatcaaagatgttcctgctacccgtgaagtccttggctccctcccaaatgtattcagtgcactctgtttgaatgcccgaggtcttcagtcttttgttcagtgtcagccttttgaacgcctcttcaaagttcttctgtctccagattacctcccagccatgcggaggaggagaagttctgatccccttggggatactgcatccaacctggggagtgctgtcgatgagctcatgagacatcagcccacccttaaaacagatgcaacgactgccatcatcaagttacttgaagaaatctgtaatcttggaagggaccccaaatacatctgtcagaagccatcaatccagaaggcagatggcactgccactgctcctcccccaaggtctaatcatgccgcagaagaagcctctagtgaggatgaggaggaagaggaagtacaggccatgcagagctttaattctacccagcaaaatgaaactgagcctaatcagcaggttgttggtacagaggaacgtattcctattcccctcatggattacatccttaatgtgatgaaatttgtggaatctattctgagcaacaatacaacagatgaccactgccaggaatttgtgaatcagaaaggactgttgcctttggttaccattttgggtcttcccaatctgcccattgactttcccacatctgctgcctgtcaggctgttgcaggtgtctgcaaatccatattgacactgtcacatgaacccaaagtccttcaagagggtctccttcagttggactccatcctctcctccctggagcccttacaccgccccattgaatcccctgggggctcagtgttgttgcgagaactggcttgcgcaggcaatgttgctgatgctaccctctcagcccaggccacacctctgctgcatgcactcactgctgcccatgcctacatcatgatgtttgttcatacttgcagagttggacagagtgaaattcgttccatctccgtaaaccagtggggctctcaattgggtctgagtgttttgagcaagctgagccagttatactgttccctggtgtgggaaagcactgtcctcctctctctgtgtaccccaaacagcctaccatctgggtgtgaatttggccaggcagatatgcagaaactggttccaaaggatgagaaggcaggtacgacccagggcggaaaaagatcagatggggaacaggatggagcagctggaagtatggatgcttctacccagggcttattagaaggcattgggctagatggtgacacattggctcccatggagacagatgaacctactgcttcagactctaagggcaaatctaaaatcacaccagcaatggctgccagaattaagcaaatcaagcctttgttatcagcttcctccagattaggccgagcacttgctgagctatttggacttcttgttaaactttgtgtgggatctcctgtccgccagagaaggagccatcatgctgccagcaccactacagcaccgacacctgccgcgcgatcaacagcctcagctctcactaagctcttgactaaggggttatcttggcagcccccaccatatacacctactccccgattcaggctgacattcttcatctgttcagttggtttcacatccccaatgctgtttgatgagaggaagtatccctaccacctcatgctgcaaaaatttctctgctccggaggccacaatgctctttttgaaactttcaactgggctctgtccatgggaggtaaagttcctgtttctgagggattggaacactcagacttgcctgatggcacaggagaattcctagatgcctggcttatgctggtggagaagatggtgaatcccaccacggtgcttgaatctccacattcgctgcctgccaaattgcctggaggtgtccagaactttccccagttcagtgcactgcgcttccttgtggtaactcagaaagcagcctttacttgcatcaaaaacttatggaaccggaaacccctgaaggtatatggtggacgaatggctgaatcgatgctggccattctatgccacatcctccgaggagaacctgtgattcgagagagactaagcaaggagaaggaggggtctcgaggagaagaggatacagggcaagaggaaggtggctcccgccgggaacctcaagtcaaccagcaacaactgcaacagctcatggacatgggcttcacaagggaacatgcaatggaggcactgttgaacaccagcaccatggagcaggccacagagtaccttttaacccaccctcctccaatcatgggaggagttgttcgggatctcagcatgtctgaagaggaccagatgatgagagcaattgctatgtctctgggacaggatattccaatggatcaaagggcagagtcacctgaggaagttgcttgccggaaggaggaagaggaacggaaagctcgggaaaagcaggaggaggaagaggctaaatgtctagagaagttccaggatgctgacccgttggaacaagatgagctccacactttcacagatactatgttgccaggctgcttccaccttcttgatgagctgccagacacagtataccgtgtgtgtgacctgatcatgacagcaatcaaacgtaatggagcagattatcgtgacatgattctgaagcaagtagtcaatcaggtgtgggaagctgctgatgtattgatcaaagctgctcttcccctgacaacaagtgacacaaaaaccgtgtcagagtggataagtcagatggccacactgccccaggcctccaatttggctactagaatcttgcttttaacgctactttttgaggagttgaagctaccttgtgcttgggtggttgaatcaagtggcatccttaatgtcctaatcaaactcttggaagtggttcagccctgcctccaggcagccaaggagcagaaggaagtccagaccccaaagtggatcacaccagtgttgctcctgattgatttctatgaaaagacagccatctcctcaaaaaggagagcccagatgactaagtacctgcaatccaacagcaacaactggcgctggtttgatgatcgctctgggcgttggtgtagttacagtgcaagcaacaatagcactattgattctgcctggaaatctggagagacaagcgtgcgattcactgcaggccgaagaagatacacggtccaattcactacaatggtgcaggttaatgaggaaacagggaaccgacgccctgtgatgctgactctcctcagggtacctcggctgaataaaaattcaaaaaacagcaatggacaggaactagagaagacgctggaagaaagcaaagaaatggatatcaaacgtaaagaaaataaaggcaatgatacccctttggccctagagagtacaaacactgaaaaggagacaagcctggaggaaacaaaaatcggggagatcctgatccagggcttgacagaagatatggtgactgttttaatccgggcctgcgtgagcatgctgggagtccctgtggacccagatactttgcatgccacccttcgtctctgtctgaggctcacccgggaccacaaatatgccatgatgtttgcagaactgaagagtacccgcatgatcttgaatttgacccagagctcaggcttcaatgggtttactcccctggtcacccttctcttaagacacatcattgaggacccctgtacccttcgtcataccatggaaaaggttgttcgctcagcagctacaagtggagctggtagcactacctctggtgttgtgtctggcagcctcggctctcgggagatcaactacatccttcgtgtccttgggccagccgcatgccgcaatccagacatattcacagaagtggccaactgctgtatccgcatcgcccttcctgcccctcgaggctcaggaactgcttcagatgatgaatttgagaatcttagaattaaaggccctaatgctgtacagctggtgaagaccacccctttgaagccctcacctctgcctgtcatccctgatactatcaaggaagtgatctatgatatgctgaatgctctggctgcataccatgctccagaggaagcagataaatctgatcctaaacctggggttatgacccaagaggttggccagctcctgcaagacatgggtgatgatgtataccagcagtaccggtcacttacgcgtcagagcagtgactttgatacgcagtcaggtttttccattaatagtcaggtctttgctgcagatggtgcctccactgagacttccgcatctgggacctcccaaggagaggcttcaactccagaggagtctcgagatgggaagaaagataaagaaggggaccgggcctctgaggaaggcaaacagaaaggcaagggcagcaaacctttaatgcctacctccactatccttcgtcttctggcagagttggtgaggtcctatgttggtattgctaccctgattgccaactacagctacactgtgggccagtctgaactgatcaaagaggactgcagtgtgctagcttttgttctggaccacctgctcccacatacccagaatgcagaagacaaggacacccctgccttggcccgcctgttcctcgcaagcctggctgctgcagggagtggcacagatgcccaggtggccctagtgaatgaagtaaaagcagcccttggacgggcactggctatggctgagagtacagagaaacatgccaggcttcaggcagtgatgtgtatcatcagtactatcatggagtcctgcccctccacctccagcttctacagcagtgccacagcgaagacccagcacaatggcatgaacaacatcattcggcttttcctgaagaagggactggttaatgacctggccagagtacctcacagcttagacctgtccagtcccaacatggccaacacagtcaatgctgctctgaagcctttggaaacactttcccggattgtgaaccagcccagtagcctttttggcagcaagagtgcttctagcaagaacaagtctgagcaggatgcccaaggagcctctcaagattccagtagcaaccagcaggacccaggcgagcctggggaagcagaagtgcaggaggaggatcatgatgtcactcagacagaggtggcagatggggatatcatggatggggaggctgaaaccgactcagtggtgattgctgggcagcctgaggtgctcagttcacaagagatgcaggttgagaatgagctggaggacctgatagatgagttgcttgagagggatggcggatctgggaacagtacaattatagtgagcagaagtggagaggatgaatcacaagaggacgtgctgatggatgaagctccttccaacctcagccaagcttccaccttgcaggccaaccgagaagattccatgaatatcctggaccctgaggatgaggaggagcacactcaggaagaggacagcagtggcagtaacgaggatgaggatgatagtcaggatgaagaggaggaggaggaggaagatgaggaagatgatcaggaggatgatgaaggtgaagagggagatgaagacgatgacgacgatggctctgagatggaattggatgaggattatcctgatatgaacgcttctcccttggtccgatttgagcgctttgaccgggaggatgatctcatcattgagtttgacaacatgttctccagtgctacagacatccccccatccccaggaaatatccctaccacccatccactgatggtgcgccatgcagaccacagttctctgacactgggcagtggctcttcaacaactcgtctcacccagggcatcgggcgcagtcagaggaccctaaggcagctgacggccaatactggccacaccattcatgttcactaccctgggaatcgccagcccaaccctcctcttatactgcagaggttgcttggtccctcagctgctgctgacatccttcagctgagcagcagccttcccctacaaagccggggtcgggcccgcctcctggtaggcaacgatgacgtccacatcatcgcccgttctgatgatgagctgctggatgactttttccatgatcagagcacagctaccagccaagcaggaaccctgtccagcatccccacagccctgacccgctggacagaagaatgcaaagttctcgatgctgagagcatgcatgactgtgtttcagtggttaaagtgtccattgtcaatcacctggaattcctgagggatgaggagctggaagaaaggcgagagaagcgcaggaaacaactggctgaggaagaaacaaagataactgataaaggcaaagaagataaggagaacagggatcagagtgcacagtgtactgcatctaagtcaaatgactccactgaacagaatctctcagatgggacgcctatgcctgacagctacccaacaaccccatcttcaactgatgcagctacatctgagtccaaggagacccttggcactctgcaatcctcacaacagcaaccaacactcccaaccccaccagctttgggagaggttcctcaggagctgcagtctccagctggagaagggggcagctctacacagctattgatgcctgtagagccagaggaattgggtcccacaaggccaagtggggaagcagaaacaactcagatggagttatccccagctcccactataacctcactttccccagagagagctgaggattctgatgcactgacggctgtcagcagtcagctagaaggctctcctatggatacaagcagcctggcttcctgtaccttagaggaggctgtgggtgacacttcagcagctggcagttctgagcagcccagagcaggcagctccactcctggggatgccccaccagctgtggcggaagtgcaaggcaggagtgatgggtcaggggaatctgcccagccacctgaggacagctccccacctgcatcctctgagagctcttccaccagagattctgccgtggccatttctggagcagattcccgaggaatcctagaagagccgttgccttcaacaagcagtgaagaagaagatccccttgcgggtatcagtctccctgaaggtgtggacccctcttttctggctgccctgcctgatgacatccgtcgggaagttctacagaaccagctaggcattcgtccaccaacccggactgccccctccacaaatagctcagcgcctgcagtggtggggaatcctggtgtgactgaagtgagccctgagtttctggctgccctgcctccagccattcaggaggaagtactggcacagcagagagctgagcagcagcgacgagaactagcacagaatgccagctcagacacccctatggaccctgtgaccttcatccagactctgccctcagacctgcgccgtagtgtcctagaggatatggaggacagtgtgttagctgtgatgccacctgacattgcagctgaggctcaagccctgagacgagagcaagaagcccggcagcgacagctcatgcatgagcgtctgtttgggcacagtagcacctccgcactctctgctattctccgaagcccggctttcaccagtcgcttaagtggcaaccgtggggtccagtatactcgccttgctgtgcagagaggtggcaccttccagatggggggtagcagcagccataacaggccttctggcagtaatgtagatactctcctccgcctccgaggacggctccttctggaccacgaagccctttcttgtctcttggtcctactttttgtggatgagccaaagctcaatactagccgtctacaccgagtactgagaaatctctgctaccatgcccagacccgccactgggtcatccgcagtctgctctccatcttgcagcgcagcagtgagagtgagctatgcattgaaacacccaaactcactacaagtgaggaaaagggcaaaaagtcgagcaagagctgtgggtcaagtagccatgagaaccgtcccctggacctgctacacaagatggagtcaaagagctccaaccagctttcctggctctcagtatccatggatgcagccctaggctgcaggactaatatatttcagatccagcgttcaggggggcgtaaacataccgagaagcatgcaagcggtggctccaccgtccacatccatccccaagctgctcctgttgtctgcagacacgttttggatacactcattcaattggccaaggtatttcccagccacttcacacagcagcggaccaaagaaacaaactgtgagagtgatcgggaaaggggcaataaggcctgtagcccatgctcctcacagtcctccagcagtggcatttgcacagacttctgggacttattggtaaaactggacaacatgaatgtcagccggaaaggcaagaactccgtgaagtcagtgccagtgagcgctggcggtgagggggaaacctctccatacagcctcgaggcctctccactggggcagctcatgaacatgttgtcacacccagtcatccgccggagctctctcttaactgagaaactcctcagactcctttctctcatctcaattgctctcccagaaaacaaggtgtcagaagcacaggctaattctggcagcggtgcttcctccaccaccactgccacctcaaccacatctaccaccaccaccactgccgcctccaccacgcccacaccccctactgcacccacccctgtcacttctgctccagccctggttgctgccacggctatttccaccattgtcgtagctgcttcgaccacagtgactacccccacgactgctaccactactgtttcaatttctcccactactaagggcagcaaatctccagcgaaggtgagtgatgggggcagcagcagtacagactttaagatggtgtcctctggcctcactgaaaaccagctacagctctctgtagaggtgttgacatcccactcttgttctgaggaaggcttagaggatgcagccaacgtactactgcagctctcccggggggactctgggacccgggacactgttctcaagctgctactgaatggagcccgccatctgggttataccctttgtaaacaaataggtaccctgctggccgagctgcgggaatacaacctcgagcagcagcggcgagcccaatgtgaaaccctctctcctgatggcctgcctgaggagcagccacagaccaccaagctgaagggcaaaatgcagagcaggtttgacatggctgagaatgtggtaattgtggcatctcagaagcgacctttgggtggccgggagctccagctgccttctatgtccatgttgacatccaagacatctacccagaagttcttcttgagggtactacaggtcatcatccagctccgggacgacacgcgccgggctaacaagaaagccaagcagacaggcaggctaggttcctccggtttaggctcagctagcagcatccaggcagctgttcggcagctggaggctgaggctgatgccattatacaaatggtacgtgagggtcaaagggcgcggagacagcaacaagcagcaacgtcggagtctagccagtcagaggcgtctgtccggagggaggaatcacccatggatgtggaccagccatctcccagtgctcaagatactcaatccattgcctccgatggaaccccacagggggagaaggaaaaggaagaaagaccacctgagttacccctgctcagcgagcagctgagtttggacgagctgtgggacatgcttggggagtgtctaaaggaactagaggaatcccatgaccagcatgcggtgctagtgctacagcctgctgtcgaggccttctttctggtccatgccacagagcgggagagcaagcctcctgtccgagacacccgtgagagccagctggcacacatcaaggacgagcctcctccactctcccctgcccccttaaccccagccacgccttcctcccttgacccattcttctcccgggagccctcatctatgcacatctcctcaagcctgccccctgacacacagaagttccttcgctttgcagagactcaccgcactgtgttaaaccagatcctacggcagtccacgacccaccttgctgatgggccttttgctgtcctggtagactacattcgtgtcctcgactttgatgtcaagcgcaaatatttccgccaagagctggagcgtttagatgaggggctccggaaagaagacatggctgtgcatgtccgtcgtgaccatgtgtttgaagactcctatcgtgagctgcatcgcaaatcccccgaagaaatgaagaatcgattgtatatagtatttgaaggagaagaagggcaggatgctggtgggctcctgcgggagtggtatatgatcatctctcgagagatgtttaaccctatgtatgccttgttccgtacctcacctggtgatcgagtcacctacaccatcaatccatcttcccactgcaaccccaaccacctcagctacttcaagtttgtcggacgcattgtggccaaagctgtatatgacaaccgtcttctggagtgctactttactcgatccttttacaaacacatcttgggcaagtcagtcagatatacagatatggagagtgaagattaccacttctaccaaggtctggtttatctgctggaaaatgatgtctccacactaggctatgacctcaccttcagcactgaggtccaagagtttggagtttgtgaagttcgtgacctcaaacccaatggggccaacatcttggtaacagaggagaataagaaggagtatgtacacctggtatgccagatgagaatgacaggagccatccgcaagcagttggcggctttcttagaaggcttctatgagatcattccaaagcgcctcatttccatcttcactgagcaggagttagagctgcttatatcaggactgcccaccattgacatcgatgatctgaaatccaacactgaataccacaagtaccagtccaactctattcagatccagtggttctggagagcattgcgttctttcgatcaagctgaccgtgccaagttcctccagtttgtcacgggtacttccaaggtacccctgcaaggctttgctgccctcgaaggcatgaatggcattcagaagtttcagatccatcgagatgacaggtccacagatcgcctgccttcagctcacacatgttttaatcagctggatctgcctgcctatgagagctttgagaagctccgccacatgctactgttggctatccaggagtgctctgaaggctttgggctggcctaataaggccctgcccaactccgtggggttttttttaccattgttggacctggggaggggggagttaaaaaaagaaccagaaagaaattgtcaaaaaccaataaatgaaatccaccaactcaccgtgtgtgtcccagctgccccatcttccccagcgcatacctgttcctcttctcattctctccccgccgcctgtttcctcaccttctctcccctttccatgccgtccatgatccccaccccatgtgttttaaaaaggcagtagcctttgcagggacctgtctgtcccaactgtttgaacagtgtgctcctcagattctgtgttcagaaggatttgctgcattgagacttgaaacctttggataggggaaaaaattatatatatatatatttttttgttctgtttgcatttcttaatttgtgcttggaatgtgttgatgtgcacagctaatgattcaatgcgagacaagattggcgtctgtgttgtggaggtttcaaataaagagcactcttcataactcacttttcacaatggagtttttttcaaacttaaaaaaaaaaacaaaaaactcttaagcacatgctaggcatctggagaaaagatggattctccaggaaaccatccctgccctacccgcttgcccacctgcctccaccactggtgcaacttcctccttcagagtcagtttctgcagtcaggagagatgagcagttcaccaggaattgggggtgggggcatctgttttttttttttagaatgggagctgcacttggggatggtgatggtgttagagattgcagcccaggacaaagcatcaccttgctcaaggggaacaaactgcagcaggttgtacaaaacattcagagagctcacttgacccaaccgagggttttacttggtgagcctttctagtagtcttgagtctggggctcagttttagatttttatttcattaatgtttgtttatttctaataaattttaataagcgagtaatttaactaggtcgccagaagaccattatttttgtttgtctatttttgttgtcgtcactccctctctcgtcatctgtctgccagtctgttcacagatcaccttgtagtcccttgtggtttttactccatccagtgcttaaagctgatctaaggacttcgatggttccagccttc

SEQ ID NO: 277711 - DNA, 14796 bp, Artificial Sequence
  derived and/or modified sequence
tccgcccctcactgcttcgttaggttgtgcgtcatttgcttttcgcttcgcgtagggtgaagctgtagctacttcggctttggtgggagggaggaggggtctggaaagggctgggctcaggcttttcccgtccggtagaggttctcgcgggatcgcgcggaggcggcggtggctcggttactgactgcagtagccgcggaggcggcggcaaggtcttcggctcgtgccgttctaagccggagaattctcgcgggagcagggttacgtcctcgtgggattcgttggcggtggctgaggtcctccagcagcctgacctgagtgggttagtgatccagagaaaccagcaggccaacttggtcaggaaggttcgggaagctgttggagcagtgtggggaatttcccaccaggatgagtatgattggctgtgattttagatcgtaaagctgaaaattgaaatcatgaaagtagacaggactaaactgaagaagacacctactgaggctcctgcagactgcagagccttaatagacaaactcaaagtttgtaatgatgagcaacttctcttggaactgcagcagatcaaaacatggaacattggaaagtgcgagttatatcactgggtggacctgttggaccgcttcgatggaatactggcagatgctggacagacagtggagaatatgtcatggatgctcgtatgtgataggccagaaagagagcaactgaaaatgcttctcttggctgtgttgaacttcacagccttgctcattgagtacagcttttcccggcatctgtacagttccatagagcatttgacaactttattggcttcctctgatatgcaagtggtgctggcagtcctcaatctcctatatgtatttagcaaaagatcaaactacatcactcgtctgggatctgacaagaggaccccgctgctaactcggctacaacatttggcagagagctggggtggaaaggagaatggctttggacttgcagaatgttgcagagacttgcatatgatgaaatatccacccagtgcaactacactacactttgaattctatgcagatcctggggccgaggtcaaaattgagaaaaggacaactagtaacacactacattatattcacatagagcaacttgacaagatttcagaaagcccttctgaaatcatggaatctcttaccaaaatgtacagcattcctaaggataagcagatgctgttatttacacacatacgactggcccatggcttttctaatcacaggaagcgattgcaggcagttcaggccagactgcatgcaatatctatattagtgtattccaatgccttgcaggaatcagcaaacagtatcttgtataatggcttgatagaggagttggtagatgtccttcagataacggataagcagcttatggagattaaagcagcttctttacgaacattaacatcaattgtccacttggagagaactcccaaactcagcagtattattgactgtactggaactgcctcctaccatggatttttgccagtgcttgtaaggaactgtatccaggccatgattgatccttccatggatccataccctcaccagtttgccactgctctcttctcttttttataccatctggccagctacgatgctggtggtgaagccttggtctcctgtggaatgatggaagccttattgaaggtcataaagtttcttggcgatgaacaggaccagataacatttgtcaccagagccgtcagagtggttgaccttatcaccaacctggatatggcagcttttcaatcccatagtggactttctatcttcatttatagacttgagcatgaagtagatttgtgccgaaaagaatgtccgtttgtgatcaagccaaagatccagagacccaatactacacaagaaggagaggaaatggaaactgatatggatggagtccagtgtattccacaacgagcagcacttctgaaatccatgttgaatttcctcaagaaggccatccaagaccctgctttctcagatggcatacgacatgtgatggatggttctctgcctacctccctgaaacacatcatcagcaatgcagaatactatggcccatcactcttcctcctagctactgaagtggtgactgtgtttgtatttcaagaaccatcactgctctcctcactccaggacaatggattgacagatgtcatgctgcatgcactgcttatcaaagatgttcctgctacccgtgaagtccttggctccctcccaaatgtattcagtgcactctgtttgaatgcccgaggtcttcagtcttttgttcagtgtcagccttttgaacgcctcttcaaagttcttctgtctccagattacctcccagccatgcggaggaggagaagttctgatccccttggggatactgcatccaacctggggagtgctgtcgatgagctcatgagacatcagcccacccttaaaacagatgcaacgactgccatcatcaagttacttgaagaaatctgtaatcttggaagggaccccaaatacatctgtcagaagccatcaatccagaaggcagatggcactgccactgctcctcccccaaggtctaatcatgccgcagaagaagcctctagtgaggatgaggaggaagaggaagtacaggccatgcagagctttaattctacccagcaaaatgaaactgagcctaatcagcaggttgttggtacagaggaacgtattcctattcccctcatggattacatccttaatgtgatgaaatttgtggaatctattctgagcaacaatacaacagatgaccactgccaggaatttgtgaatcagaaaggactgttgcctttggttaccattttgggtcttcccaatctgcccattgactttcccacatctgctgcctgtcaggctgttgcaggtgtctgcaaatccatattgacactgtcacatgaacccaaagtccttcaagagggtctccttcagttggactccatcctctcctccctggagcccttacaccgccccattgaatcccctgggggctcagtgttgttgcgagaactggcttgcgcaggcaatgttgctgatgctaccctctcagcccaggccacacctctgctgcatgcactcactgctgcccatgcctacatcatgatgtttgttcatacttgcagagttggacagagtgaaattcgttccatctccgtaaaccagtggggctctcaattgggtctgagtgttttgagcaagctgagccagttatactgttccctggtgtgggaaagcactgtcctcctctctctgtgtaccccaaacagcctaccatctgggtgtgaatttggccaggcagatatgcagaaactggttccaaaggatgagaaggcaggtacgacccagggcggaaaaagatcagatggggaacaggatggagcagctggaagtatggatgcttctacccagggcttattagaaggcattgggctagatggtgacacattggctcccatggagacagatgaacctactgcttcagactctaagggcaaatctaaaatcacaccagcaatggctgccagaattaagcaaatcaagcctttgttatcagcttcctccagattaggccgagcacttgctgagctatttggacttcttgttaaactttgtgtgggatctcctgtccgccagagaaggagccatcatgctgccagcaccactacagcaccgacacctgccgcgcgatcaacagcctcagctctcactaagctcttgactaaggggttatcttggcagcccccaccatatacacctactccccgattcaggctgacattcttcatctgttcagttggtttcacatccccaatgctgtttgatgagaggaagtatccctaccacctcatgctgcaaaaatttctctgctccggaggccacaatgctctttttgaaactttcaactgggctctgtccatgggaggtaaagttcctgtttctgagggattggaacactcagacttgcctgatggcacaggagaattcctagatgcctggcttatgctggtggagaagatggtgaatcccaccacggtgcttgaatctccacattcgctgcctgccaaattgcctggaggtgtccagaactttccccagttcagtgcactgcgcttccttgtggtaactcagaaagcagcctttacttgcatcaaaaacttatggaaccggaaacccctgaaggtatatggtggacgaatggctgaatcgatgctggccattctatgccacatcctccgaggagaacctgtgattcgagagagactaagcaaggagaaggaggggtctcgaggagaagaggatacagggcaagaggaaggtggctcccgccgggaacctcaagtcaaccagcaacaactgcaacagctcatggacatgggcttcacaagggaacatgcaatggaggcactgttgaacaccagcaccatggagcaggccacagagtaccttttaacccaccctcctccaatcatgggaggagttgttcgggatctcagcatgtctgaagaggaccagatgatgagagcaattgctatgtctctgggacaggatattccaatggatcaaagggcagagtcacctgaggaagttgcttgccggaaggaggaagaggaacggaaagctcgggaaaagcaggaggaggaagaggctaaatgtctagagaagttccaggatgctgacccgttggaacaagatgagctccacactttcacagatactatgttgccaggctgcttccaccttcttgatgagctgccagacacagtataccgtgtgtgtgacctgatcatgacagcaatcaaacgtaatggagcagattatcgtgacatgattctgaagcaagtagtcaatcaggtgtgggaagctgctgatgtattgatcaaagctgctcttcccctgacaacaagtgacacaaaaaccgtgtcagagtggataagtcagatggccacactgccccaggcctccaatttggctactagaatcttgcttttaacgctactttttgaggagttgaagctaccttgtgcttgggtggttgaatcaagtggcatccttaatgtcctaatcaaactcttggaagtggttcagccctgcctccaggcagccaaggagcagaaggaagtccagaccccaaagtggatcacaccagtgttgctcctgattgatttctatgaaaagacagccatctcctcaaaaaggagagcccagatgactaagtacctgcaatccaacagcaacaactggcgctggtttgatgatcgctctgggcgttggtgtagttacagtgcaagcaacaatagcactattgattctgcctggaaatctggagagacaagcgtgcgattcactgcaggccgaagaagatacacggtccaattcactacaatggtgcaggttaatgaggaaacagggaaccgacgccctgtgatgctgactctcctcagggtacctcggctgaataaaaattcaaaaaacagcaatggacaggaactagagaagacgctggaagaaagcaaagaaatggatatcaaacgtaaagaaaataaaggcaatgatacccctttggccctagagagtacaaacactgaaaaggagacaagcctggaggaaacaaaaatcggggagatcctgatccagggcttgacagaagatatggtgactgttttaatccgggcctgcgtgagcatgctgggagtccctgtggacccagatactttgcatgccacccttcgtctctgtctgaggctcacccgggaccacaaatatgccatgatgtttgcagaactgaagagtacccgcatgatcttgaatttgacccagagctcaggcttcaatgggtttactcccctggtcacccttctcttaagacacatcattgaggacccctgtacccttcgtcataccatggaaaaggttgttcgctcagcagctacaagtggagctggtagcactacctctggtgttgtgtctggcagcctcggctctcgggagatcaactacatccttcgtgtccttgggccagccgcatgccgcaatccagacatattcacagaagtggccaactgctgtatccgcatcgcccttcctgcccctcgaggctcaggaactgcttcagatgatgaatttgagaatcttagaattaaaggccctaatgctgtacagctggtgaagaccacccctttgaagccctcacctctgcctgtcatccctgatactatcaaggaagtgatctatgatatgctgaatgctctggctgcataccatgctccagaggaagcagataaatctgatcctaaacctggggttatgacccaagaggttggccagctcctgcaagacatgggtgatgatgtataccagcagtaccggtcacttacgcgtcagagcagtgactttgatacgcagtcaggtttttccattaatagtcaggtctttgctgcagatggtgcctccactgagacttccgcatctgggacctcccaaggagaggcttcaactccagaggagtctcgagatgggaagaaagataaagaaggggaccgggcctctgaggaaggcaaacagaaaggcaagggcagcaaacctttaatgcctacctccactatccttcgtcttctggcagagttggtgaggtcctatgttggtattgctaccctgattgccaactacagctacactgtgggccagtctgaactgatcaaagaggactgcagtgtgctagcttttgttctggaccacctgctcccacatacccagaatgcagaagacaaggacacccctgccttggcccgcctgttcctcgcaagcctggctgctgcagggagtggcacagatgcccaggtggccctagtgaatgaagtaaaagcagcccttggacgggcactggctatggctgagagtacagagaaacatgccaggcttcaggcagtgatgtgtatcatcagtactatcatggagtcctgcccctccacctccagcttctacagcagtgccacagcgaagacccagcacaatggcatgaacaacatcattcggcttttcctgaagaagggactggttaatgacctggccagagtacctcacagcttagacctgtccagtcccaacatggccaacacagtcaatgctgctctgaagcctttggaaacactttcccggattgtgaaccagcccagtagcctttttggcagcaagagtgcttctagcaagaacaagtctgagcaggatgcccaaggagcctctcaagattccagtagcaaccagcaggacccaggcgagcctggggaagcagaagtgcaggaggaggatcatgatgtcactcagacagaggtggcagatggggatatcatggatggggaggctgaaaccgactcagtggtgattgctgggcagcctgaggtgctcagttcacaagagatgcaggttgagaatgagctggaggacctgatagatgagttgcttgagagggatggcggatctgggaacagtacaattatagtgagcagaagtggagaggatgaatcacaagaggacgtgctgatggatgaagctccttccaacctcagccaagcttccaccttgcaggccaaccgagaagattccatgaatatcctggaccctgaggatgaggaggagcacactcaggaagaggacagcagtggcagtaacgaggatgaggatgatagtcaggatgaagaggaggaggaggaggaagatgaggaagatgatcaggaggatgatgaaggtgaagagggagatgaagacgatgacgacgatggctctgagatggaattggatgaggattatcctgatatgaacgcttctcccttggtccgatttgagcgctttgaccgggaggatgatctcatcattgagtttgacaacatgttctccagtgctacagacatccccccatccccaggaaatatccctaccacccatccactgatggtgcgccatgcagaccacagttctctgacactgggcagtggctcttcaacaactcgtctcacccagggcatcgggcgcagtcagaggaccctaaggcagctgacggccaatactggccacaccattcatgttcactaccctgggaatcgccagcccaaccctcctcttatactgcagaggttgcttggtccctcagctgctgctgacatccttcagctgagcagcagccttcccctacaaagccggggtcgggcccgcctcctggtaggcaacgatgacgtccacatcatcgcccgttctgatgatgagctgctggatgactttttccatgatcagagcacagctaccagccaagcaggaaccctgtccagcatccccacagccctgacccgctggacagaagaatgcaaagttctcgatgctgagagcatgcatgactgtgtttcagtggttaaagtgtccattgtcaatcacctggaattcctgagggatgaggagctggaagaaaggcgagagaagcgcaggaaacaactggctgaggaagaaacaaagataactgataaaggcaaagaagataaggagaacagggatcagagtgcacagtgtactgcatctaagtcaaatgactccactgaacagaatctctcagatgggacgcctatgcctgacagctacccaacaaccccatcttcaactgatgcagctacatctgagtccaaggagacccttggcactctgcaatcctcacaacagcaaccaacactcccaaccccaccagctttgggagaggttcctcaggagctgcagtctccagctggagaagggggcagctctacacagctattgatgcctgtagagccagaggaattgggtcccacaaggccaagtggggaagcagaaacaactcagatggagttatccccagctcccactataacctcactttccccagagagagctgaggattctgatgcactgacggctgtcagcagtcagctagaaggctctcctatggatacaagcagcctggcttcctgtaccttagaggaggctgtgggtgacacttcagcagctggcagttctgagcagcccagagcaggcagctccactcctggggatgccccaccagctgtggcggaagtgcaaggcaggagtgatgggtcaggggaatctgcccagccacctgaggacagctccccacctgcatcctctgagagctcttccaccagagattctgccgtggccatttctggagcagattcccgaggaatcctagaagagccgttgccttcaacaagcagtgaagaagaagatccccttgcgggtatcagtctccctgaaggtgtggacccctcttttctggctgccctgcctgatgacatccgtcgggaagttctacagaaccagctaggcattcgtccaccaacccggactgccccctccacaaatagctcagcgcctgcagtggtggggaatcctggtgtgactgaagtgagccctgagtttctggctgccctgcctccagccattcaggaggaagtactggcacagcagagagctgagcagcagcgacgagaactagcacagaatgccagctcagacacccctatggaccctgtgaccttcatccagactctgccctcagacctgcgccgtagtgtcctagaggatatggaggacagtgtgttagctgtgatgccacctgacattgcagctgaggctcaagccctgagacgagagcaagaagcccggcagcgacagctcatgcatgagcgtctgtttgggcacagtagcacctccgcactctctgctattctccgaagcccggctttcaccagtcgcttaagtggcaaccgtggggtccagtatactcgccttgctgtgcagagaggtggcaccttccagatggggggtagcagcagccataacaggccttctggcagtaatgtagatactctcctccgcctccgaggacggctccttctggaccacgaagccctttcttgtctcttggtcctactttttgtggatgagccaaagctcaatactagccgtctacaccgagtactgagaaatctctgctaccatgcccagacccgccactgggtcatccgcagtctgctctccatcttgcagcgcagcagtgagagtgagctatgcattgaaacacccaaactcactacaagtgaggaaaagggcaaaaagtcgagcaagagctgtgggtcaagtagccatgagaaccgtcccctggacctgctacacaagatggagtcaaagagctccaaccagctttcctggctctcagtatccatggatgcagccctaggctgcaggactaatatatttcagatccagcgttcaggggggcgtaaacataccgagaagcatgcaagcggtggctccaccgtccacatccatccccaagctgctcctgttgtctgcagacacgttttggatacactcattcaattggccaaggtatttcccagccacttcacacagcagcggaccaaagaaacaaactgtgagagtgatcgggaaaggggcaataaggcctgtagcccatgctcctcacagtcctccagcagtggcatttgcacagacttctgggacttattggtaaaactggacaacatgaatgtcagccggaaaggcaagaactccgtgaagtcagtgccagtgagcgctggcggtgagggggaaacctctccatacagcctcgaggcctctccactggggcagctcatgaacatgttgtcacacccagtcatccgccggagctctctcttaactgagaaactcctcagactcctttctctcatctcaattgctctcccagaaaacaaggtgtcagaagcacaggctaattctggcagcggtgcttcctccaccaccactgccacctcaaccacatctaccaccaccaccactgccgcctccaccacgcccacaccccctactgcacccacccctgtcacttctgctccagccctggttgctgccacggctatttccaccattgtcgtagctgcttcgaccacagtgactacccccacgactgctaccactactgtttcaatttctcccactactaagggcagcaaatctccagcgaaggtgagtgatgggggcagcagcagtacagactttaagatggtgtcctctggcctcactgaaaaccagctacagctctctgtagaggtgttgacatcccactcttgttctgaggaaggcttagaggatgcagccaacgtactactgcagctctcccggggggactctgggacccgggacactgttctcaagctgctactgaatggagcccgccatctgggttataccctttgtaaacaaataggtaccctgctggccgagctgcgggaatacaacctcgagcagcagcggcgagcccaatgtgaaaccctctctcctgatggcctgcctgaggagcagccacagaccaccaagctgaagggcaaaatgcagagcaggtttgacatggctgagaatgtggtaattgtggcatctcagaagcgacctttgggtggccgggagctccagctgccttctatgtccatgttgacatccaagacatctacccagaagttcttcttgagggtactacaggtcatcatccagctccgggacgacacgcgccgggctaacaagaaagccaagcagacaggcaggctaggttcctccggtttaggctcagctagcagcatccaggcagctgttcggcagctggaggctgaggctgatgccattatacaaatggtacgtgagggtcaaagggcgcggagacagcaacaagcagcaacgtcggagtctagccagtcagaggcgtctgtccggagggaggaatcacccatggatgtggaccagccatctcccagtgctcaagatactcaatccattgcctccgatggaaccccacagggggagaaggaaaaggaagaaagaccacctgagttacccctgctcagcgagcagctgagtttggacgagctgtgggacatgcttggggagtgtctaaaggaactagaggaatcccatgaccagcatgcggtgctagtgctacagcctgctgtcgaggccttctttctggtccatgccacagagcgggagagcaagcctcctgtccgagacacccgtgagagccagctggcacacatcaaggacgagcctcctccactctcccctgcccccttaaccccagccacgccttcctcccttgacccattcttctcccgggagccctcatctatgcacatctcctcaagcctgccccctgacacacagaagttccttcgctttgcagagactcaccgcactgtgttaaaccagatcctacggcagtccacgacccaccttgctgatgggccttttgctgtcctggtagactacattcgtgtcctcgactttgatgtcaagcgcaaatatttccgccaagagctggagcgtttagatgaggggctccggaaagaagacatggctgtgcatgtccgtcgtgaccatgtgtttgaagactcctatcgtgagctgcatcgcaaatcccccgaagaaatgaagaatcgattgtatatagtatttgaaggagaagaagggcaggatgctggtgggctcctgcgggagtggtatatgatcatctctcgagagatgtttaaccctatgtatgccttgttccgtacctcacctggtgatcgagtcacctacaccatcaatccatcttcccactgcaaccccaaccacctcagctacttcaagtttgtcggacgcattgtggccaaagctgtatatgacaaccgtcttctggagtgctactttactcgatccttttacaaacacatcttgggcaagtcagtcagatatacagatatggagagtgaagattaccacttctaccaaggtctggtttatctgctggaaaatgatgtctccacactaggctatgacctcaccttcagcactgaggtccaagagtttggagtttgtgaagttcgtgacctcaaacccaatggggccaacatcttggtaacagaggagaataagaaggagtatgtacacctggtatgccagatgagaatgacaggagccatccgcaagcagttggcggctttcttagaaggcttctatgagatcattccaaagcgcctcatttccatcttcactgagcaggagttagagctgcttatatcaggactgcccaccattgacatcgatgatctgaaatccaacactgaataccacaagtaccagtccaactctattcagatccagtggttctggagagcattgcgttctttcgatcaagctgaccgtgccaagttcctccagtttgtcacgggtacttccaaggtacccctgcaaggctttgctgccctcgaaggcatgaatggcattcagaagtttcagatccatcgagatgacaggtccacagatcgcctgccttcagctcacacatgttttaatcagctggatctgcctgcctatgagagctttgagaagctccgccacatgctactgttggctatccaggagtgctctgaaggctttgggctggcctaataaggccctgcccaactccgtggggttttttttaccattgttggacctggggaggggggagttaaaaaaagaaccagaaagaaattgtcaaaaaccaataaatgaaatccaccaactcaccgtgtgtgtcccagctgccccatcttccccagcgcatacctgttcctcttctcattctctccccgccgcctgtttcctcaccttctctcccctttccatgccgtccatgatccccaccccatgtgttttaaaaaggcagtagcctttgcagggacctgtctgtcccaactgtttgaacagtgtgctcctcagattctgtgttcagaaggatttgctgcattgagacttgaaacctttggataggggaaaaaattatatatatatatatttttttgttctgtttgcatttcttaatttgtgcttggaatgtgttgatgtgcacagctaatgattcaatgcgagacaagattggcgtctgtgttgtggaggtttcaaataaagagcactcttcataactcacttttcacaatggagtttttttcaaacttaaaaaaaaaaacaaaaaactcttaagcacatgctaggcatctggagaaaagatggattctccaggaaaccatccctgccctacccgcttgcccacctgcctccaccactggtgcaacttcctccttcagagtcagtttctgcagtcaggagagatgagcagttcaccaggaattgggggtgggggcatctgttttttttttttagaatgggagctgcacttggggatggtgatggtgttagagattgcagcccaggacaaagcatcaccttgctcaaggggaacaaactgcagcaggttgtacaaaacattcagagagctcacttgacccaaccgagggttttacttggtgagcctttctagtagtcttgagtctggggctcagttttagatttttatttcattaatgtttgtttatttctaataaattttaataagcgagtaatttaactaggtcgccagaagaccattatttttgtttgtctatttttgttgtcgtcactccctctctcgtcatctgtctgccagtctgttcacagatcaccttgtagtcccttgtggtttttactccatccagtgcttaaagctgatctaaggacttcgatggttccagccttcaaagaaaaaataatttaataaaaatttagttagaaaaaataaccccaa

SEQ ID NO: 277712 - DNA, 5019 bp, Artificial Sequence
  derived and/or modified sequence
atgaaggtggacaggaccaagctgaagaagacccccacagaggccccagctgactgccgggccctgattgacaagctgaaggtgtgcaatgatgagcagctgctgctggagctgcagcagatcaagacctggaacatcggcaaatgtgagctgtaccactgggtggacctgctggacagatttgatggcatcctggctgatgctggccagacagtggagaacatgtcctggatgctggtgtgtgacaggcctgagcgggagcagctgaagatgctgctgctggccgtgctgaacttcaccgccctgctgattgagtacagcttcagccgccacctgtacagcagcattgagcacctgaccaccctgctggccagcagtgacatgcaggtggtgctggccgtgctgaacctgctgtatgtgttcagcaagaggagcaactacatcacccggctgggcagtgacaagaggacccccctgctgacccggctgcagcacctggccgagagctggggcggcaaggaaaatggatttggcctggccgagtgctgccgggacctgcacatgatgaagtacccacccagcgccaccaccctgcactttgagttctacgccgaccccggggctgaggtgaagattgagaagaggaccaccagcaacaccctgcactacatccacatcgagcagctggacaagatcagcgagagccccagcgagatcatggagagcctgaccaagatgtacagcatccccaaggacaagcagatgctgctcttcacccacatccggctggcccacggcttcagcaaccacaggaagaggctgcaggccgtgcaggcccggctgcacgccatcagcatcctggtgtacagcaatgccctgcaggagagcgccaacagcatcctgtacaacggcctcatcgaggagctggtggatgtgctgcagatcacagacaagcagctgatggagatcaaggccgccagcctgcggaccctgaccagcatcgtgcacctggagaggacccccaagctgagcagcatcatcgactgcaccggcacagccagctaccacggcttcctgcctgtgctggtgaggaactgcatccaggccatgattgaccccagcatggacccctacccccaccagtttgccacagccctcttctccttcctgtaccacctggccagctatgatgctggaggagaggccctggtgtcctgtggcatgatggaggccctgctgaaggtgatcaagttcctgggagatgagcaggaccagatcacctttgtgaccagggctgtgcgggtggtggacctgatcaccaacctggacatggccgccttccagagccacagcggcctgagcatcttcatctaccgcctggagcacgaggtggacctgtgcaggaaggagtgcccctttgtgatcaagcccaagatccagaggcccaacaccacccaggagggggaggagatggagacagacatggatggagtgcagtgcatcccccagagagctgccctgctgaagtccatgctgaacttcctgaagaaggccatccaggaccctgccttcagtgatggcatccgccacgtgatggatggcagcctgcccaccagcctgaagcacatcatcagcaatgctgagtactacggccccagcctcttcctgctggccacagaggtggtgacagtgtttgtgttccaggagcccagcctgctgagcagcctgcaggacaatggcctgacagatgtgatgctgcacgccctgctgatcaaggatgtgcctgccacccgggaggtgctgggcagcctgcccaacgtgttttctgccctgtgcctgaatgcccggggcctgcagagctttgtgcagtgccagccctttgagcggctcttcaaggtgctgctgagcccagactacctgcctgccatgagaagaagaagaagcagtgaccccctgggggacacagccagcaacctgggcagcgctgtggatgagctgatgaggcaccagcccaccctgaagacagatgccaccacagccatcatcaagctgctggaggagatctgcaacctgggccgggaccccaagtacatctgccagaagcccagcatccagaaggcagatggaacagccacagcccccccacccaggagcaaccacgccgctgaggaggccagcagtgaagatgaggaggaggaggaggtgcaggccatgcagagcttcaacagcacccagcagaatgaaacagagcccaaccagcaggtggtgggcacagaggagcgcatccccatccccctgatggactacatcctgaatgtgatgaagtttgtggagagcatcctgagcaacaacaccacagatgaccactgccaggagtttgtgaaccagaagggcctgctgcccctggtgaccatcctgggcctgcccaacctgcccatcgacttccccaccagcgctgcctgccaggccgtggccggcgtgtgcaagagcatcctgaccctgagccatgagcccaaggtgctgcaggagggcctgctgcagctggacagcatcctgagcagcctggagcccctgcaccggcccatcgagagccctgggggctctgtgctgctgcgggagctggcctgtgctggaaatgtggctgatgccaccctgagcgcccaggccacccccctgctgcacgccctgacagctgcccacgcctacatcatgatgtttgtgcacacctgccgggtgggccagagcgagatccgcagcatctctgtgaaccagtggggcagccagctgggcctgtctgtgctgagcaagctgagccagctgtactgcagcctggtgtgggagagcacagtgctgctgagcctgtgcacccccaacagcctgcccagcggctgtgaatttggccaggccgacatgcagaagctggtgcccaaggatgagaaggccggcaccacccagggcggcaagagaagtgatggagagcaggatggagctgctggctccatggatgccagcacccagggcctgctggagggcatcggcctggatggagacaccctggcccccatggagacagatgagcccacagccagtgacagcaagggcaagagcaagatcaccccagccatggccgcccgcatcaagcagatcaagcccctgctgagcgccagcagccggctgggccgggccctggccgagctgtttggcctgctggtgaagctgtgtgtgggcagccctgtgcggcagaggaggagccaccacgccgccagcaccaccacagcccccaccccagctgcccggagcacagccagcgccctgaccaagctgctgaccaagggcctgtcctggcagcccccaccctacacccccaccccccgcttccggctgaccttcttcatctgcagcgtgggcttcaccagccccatgctgtttgatgagaggaagtacccctaccacctgatgctgcagaagttcctgtgcagcggcggccacaatgccctgtttgagaccttcaactgggccctgtccatgggcggcaaggtgcctgtgtctgagggcctggagcacagcgacctgcctgatggcactggagagttcctggatgcctggctgatgctggtggagaagatggtgaaccccaccaccgtgctggagagcccccacagcctgcctgccaagctgcctggaggagtgcagaacttcccccagttcagcgccctgcgcttcctggtggtgacccagaaggccgccttcacctgcatcaagaacctgtggaacaggaagcccctgaaggtgtatggaggccgcatggccgagagcatgctggccatcctgtgccacatcctgcggggggagcctgtgatccgggagcggctgagcaaggagaaggagggcagcagaggagaggaggacaccggccaggaggagggcggcagccggcgggagccccaggtgaaccagcagcagctgcagcagctgatggacatgggcttcacccgggagcacgccatggaggccctgctgaacaccagcaccatggagcaggccacagagtacctgctgacccaccccccacccatcatgggcggcgtggtgcgggacctgtccatgtctgaggaggaccagatgatgagggccatcgccatgagcctgggccaggacatccccatggaccagagagctgagagccctgaggaggtggcctgcaggaaggaggaggaggagaggaaggcccgggagaagcaggaggaggaggaggccaagtgcctggagaagttccaggatgctgaccccctggagcaggatgagctgcacaccttcacagacaccatgctgcccggctgcttccacctgctggatgagctgcctgacacagtgtacagagtgtgtgacctgatcatgacagccatcaagagaaatggagctgactacagagacatgatcctgaagcaggtggtgaaccaggtgtgggaggccgcagatgtgctgatcaaggccgccctgcccctgaccaccagtgacaccaagacagtgtctgagtggatcagccagatggccaccctgccccaggccagcaacctggccacccgcatcctgctgctgaccctgctgtttgaggagctgaagctgccctgtgcctgggtggtggagagcagcggcatcctgaatgtgctgatcaagctgctggaggtggtgcagccctgcctgcaggccgccaaggagcagaaggaggtgcagacccccaagtggatcacccctgtgctgctgctgattgacttctatgagaagacagccatcagcagcaagaggcgggcccagatgaccaagtacctgcagagcaacagcaacaactggcgctggtttgatgacaggagcggccgctggtgcagctacagcgccagcaacaacagcaccatcgacagcgcctggaagagcggggagacctctgtgcgcttcaccgctggaagaagacgctacacagtgcagttcaccaccatggtgcagggcaccagcgctgagtag

SEQ ID NO: 277713 - DNA, 13125 bp, Artificial Sequence
  derived and/or modified sequence
atgaaggtggaccggaccaagctgaagaagacccccaccgaggccccagccgactgccgcgcacttatcgataaactcaaggtatgtaacgatgaacagctgctgctcgaattacagcagatcaagacctggaacattgggaagtgcgagctgtaccactgggttgacctcctagatcgcttcgatggcatcctggctgacgctggacagactgtggagaacatgagctggatgctggtgtgtgatagacccgaaagagaacaactgaaaatgctgctgctcgccgttctgaattttaccgctctgctaatcgaatacagttttagccgccacctgtactcatctatcgagcatctgactacactgctggcctcttcagacatgcaggtggtacttgcagtgctgaacctcctttacgtcttttcgaagcggtcgaattacattacccgcctgggatctgataagaggactcccctcctgacccgtctacagcatctggccgaatcttggggcggtaaggagaatggcttcggactcgcagaatgctgccgggatctgcatatgatgaagtatcccccttcggcgaccactttgcacttcgaattctatgctgacccaggagcagaggttaaaattgaaaagagaacaactagcaataccctgcattatattcatatcgagcagctggacaaaatcagcgagtccccgagcgagataatggagagtctgacaaaaatgtacagcatccccaaggacaaacagatgctgttgtttacacacattaggctggcccacgggtttagtaatcaccgcaaaaggctccaggcagtccaagcacgattgcatgcaatctctattctcgtctactccaatgctctccaggaatctgccaacagcattctgtacaacggcttgattgaggaactggtcgatgtgctgcagatcaccgacaagcagctgatggagattaaggctgcatctttaaggacattaacctccatcgtccacttggagcggacgcctaaactgtcctctattattgattgcaccggtacagcgtcatatcatggcttcctgccagtactggtgagaaattgtattcaggccatgattgacccctctatggacccttatccccatcaattcgcaacggcgttatttagcttcttgtaccatctggcctcgtacgatgcaggaggagaggccctcgttagctgcgggatgatggaggcactccttaaggtaataaagttcttgggtgacgagcaggaccagattacgtttgtcacccgggcagtgagggtcgtagacctgatcacaaacctggacatggccgcttttcaatcacattctggcctgagtatcttcatctacagactggagcacgaagtggacctgtgtagaaaagagtgcccttttgtgatcaaacctaaaattcagcggcctaatacgacgcaggagggcgaagaaatggaaaccgacatggacggcgtccagtgcataccacagagagccgcactcctaaaatccatgcttaacttcctgaaaaaggctatacaggatcccgctttctcggacggcattcggcacgtcatggacgggtctctgcctactagtcttaagcacattatcagcaacgccgaatattatgggccaagtctgttcctcttagcaacagaggtcgtgaccgtgtttgtttttcaggaacccagccttctatcctcactgcaggacaacggactaactgatgtgatgttacatgcgctgctgataaaagacgtcccggccaccagggaagtgctggggagtcttcccaacgtattttctgcactgtgtttgaacgctagagggcttcaatcgttcgtccagtgtcaaccgtttgagcgtttgttcaaggtgctgctctcacccgactaccttcctgcgatgcgtcgccgacgctcctcagatccactgggagatacggcgagcaacctgggaagcgctgtggatgagctcatgcgccatcagccaaccctaaagacagatgctaccaccgctatcattaagcttctcgaggagatctgcaatctcgggcgagaccctaaatacatttgccagaagccaagcattcagaaggccgacggcactgcaacggctcctccgcctcgcagcaaccacgcagcggaggaagcatcatctgaggacgaagaggaagaggaagttcaggccatgcagtcttttaattcaacccagcagaacgaaactgagccgaaccaacaggtcgtaggtaccgaggagcgcattcccattcccctgatggactacatcttgaacgtgatgaagtttgtggagtctattctgtccaataatacgaccgatgaccattgtcaagagttcgtgaaccagaaggggcttttgcccctggtgacaatccttgggctcccaaacctaccgatcgacttccccaccagcgccgcttgtcaggcagttgcgggcgtgtgcaagagcattctaacattgagccacgagccaaaggtgctccaagaggggctactccagctggactcgattcttagtagtttggaacctcttcacaggcccatcgaaagcccaggcggatctgtgctgttacgcgagctcgcctgtgcaggcaacgtcgctgacgcaactttgagtgcccaggcgacacccttgctgcacgctttgaccgctgctcacgcttacattatgatgtttgttcatacatgccgggtcgggcagtcagagatccgctctatttctgtaaatcaatggggaagccagttaggccttagtgtactgtccaaactgtcacaactttactgctcactggtatgggaaagcacagttttgctgtccttgtgcactcctaattctctccccagcggatgcgaattcggtcaggccgacatgcaaaagctagtccccaaagacgagaaggcaggaacgacccaaggagggaaacgtagcgacggcgagcaggatggggcagccggaagtatggatgcatcaacacagggcctgctggaaggcataggactggatggcgatactctcgcccccatggagactgacgaaccaaccgcgagcgactccaagggaaaatcaaagatcacccccgccatggccgcaagaatcaagcagatcaagcctctgctgagtgcgagtagtcgcctaggacgggctctggccgaactgttcgggttactggtgaagctatgcgttggaagtcccgtccgccagcgcaggagccaccatgctgcctctaccaccacagcgccaacaccagcggctagatcgacagccagcgctctcacaaagctgctgacgaagggcctaagttggcagccccccccctacacccccacccctagattcagacttactttctttatctgctcagtgggttttacatctccaatgctgttcgacgaaaggaagtatccctaccacctgatgctgcaaaaattcctgtgtagcggcgggcacaacgcattattcgagacctttaactgggccctgagcatgggcggtaaagttcccgtgtccgagggtctcgaacattctgatctgcccgacgggaccggcgagtttttagacgcctggctcatgctcgtagaaaagatggtcaatcctacaactgttctcgagagccctcattctttacctgccaaactcccgggaggcgtgcaaaattttcctcagttctctgctctccgcttcctggtggtaacacagaaagccgcattcacatgtatcaaaaacttatggaatagaaaacctcttaaagtctacggcgggagaatggccgaatcaatgctggccatcttatgccacatcctacggggtgaacctgtcatcagggagagactttccaaagagaaggaaggcagtcggggcgaggaagacacggggcaggaggaaggcgggagcaggcgggaaccacaagtgaatcaacaacagttacagcagctgatggacatggggtttactcgggaacacgccatggaagcgctcctgaacacatcaactatggaacaggcgaccgagtatctccttacccacccaccaccaataatgggcggcgtggtgagagacctgagtatgtctgaagaggatcagatgatgcgcgctatcgccatgtctctcggacaggatataccgatggaccagagggccgaatcaccagaagaggtggcttgccgtaaggaggaagaggaaagaaaggcgcgcgaaaaacaggaggaggaagaagccaagtgcctcgagaaatttcaggacgcggaccccctggaacaggacgagcttcatacatttactgatactatgctcccaggatgcttccacctgctggacgagcttccagacactgtataccgggtatgcgacctgataatgaccgcgatcaaacgaaacggcgctgactacagggacatgattctgaagcaggttgtgaatcaagtgtgggaggccgccgatgtgctaataaaagctgcactccctctgacaacctcagacaccaaaaccgttagcgaatggatttcacagatggccactctgccccaggcttccaatctcgcgaccagaatactcttgctgacgctcctgttcgaggagcttaagctgccttgtgcatgggtagtggaatcgagcggcattctaaatgtgctgattaagctgttagaagtcgtgcagccatgtctgcaggctgccaaagagcagaaggaagtgcagaccccaaagtggatcactccagttttattgctcatagatttctacgagaaaacggcaatcagcagcaaacgcagggcacagatgaccaagtacttacagagcaacagtaacaattggagatggtttgatgacagatccggtcggtggtgcagttattccgcatcgaacaattctacaatagacagcgcctggaaatccggtgagacgtccgtgcgatttactgctggaagacggcggtataccgttcagttcacaacaatggtgcaggttaatgaagagacgggtaatagacggccagtcatgcttacacttttgagagtcccacgcttaaacaagaatagtaagaactctaatggccaggagctcgaaaaaactctggaggagagcaaggagatggacataaagaggaaagaaaataaggggaacgatacgcctctcgcgctggagagcacgaacaccgaaaaagaaacctctttggaggaaaccaaaatcggtgaaatactcatccaaggtcttacagaagatatggtaactgtgctgattagagcttgcgttagcatgctgggtgtgcccgtcgacccagacaccctccacgccacactcaggttgtgcctccgcttaacccgggaccataagtatgccatgatgttcgctgagctgaagagcacacgcatgatcctaaatttaacacagtcttccggattcaatggattcacccccttggtgaccctgttgctcaggcacattatcgaggatccatgtaccctgagacacacgatggagaaggtggtgagaagcgcagccacaagtggcgctgggtccactaccagcggtgtggtgagtggatctctgggcagtcgcgaaatcaactatatactgagagtgctgggccctgccgcatgccgcaacccggatatcttcactgaagtcgcgaactgttgcattagaattgccctgcccgccccccgcggatcgggcacagccagcgatgacgagttcgaaaatctgaggattaagggaccaaatgccgtccaactggtgaagaccacccctctgaagccatctcctctacccgtgatacctgacactatcaaagaggtgatatacgatatgttgaacgcactggctgcctaccatgctcccgaagaagcggacaagagtgacccaaaaccgggcgttatgacccaggaggtcgggcaactgttacaggacatgggagatgatgtctaccagcagtaccgatctctcacaagacaaagctcggactttgatacccagagcggatttagcattaacagtcaggtgttcgctgctgacggggcctctacagagacgtccgcctccggaaccagtcaaggtgaagcctcaacacctgaggagagtagggatgggaagaaagacaaggaaggcgaccgagcctctgaagaggggaaacaaaagggtaaggggtctaagccccttatgcccacctcaacaattctacgcctcctggcagagctagttaggtcttacgtggggattgctacactcatagcaaattactcctacaccgttggacaatccgaactgattaaagaggattgctccgtgttggcgttcgtgctcgaccacctgctgccccatactcagaatgctgaagacaaagatacccccgcccttgcacggctgtttctggcaagcctggcagctgctggcagcggcaccgatgcccaagtcgcactcgtgaacgaagtgaaggctgcccttggcagagctttagccatggctgagtccacagagaagcacgcacgcctgcaggctgtcatgtgcattatttcgaccataatggaatcctgtccatcaacttcctctttctattcttctgcgaccgctaagacgcagcacaatggtatgaataacatcatccgcctatttctgaaaaagggactcgtgaacgatctagctagggtgcctcattctctggatctctcttctcccaacatggccaatacagtgaacgctgcattgaaacctctcgaaactctttctaggattgtgaatcagccatcaagcctgttcggctcaaaatccgcgagcagcaagaataagtcagagcaagacgcccagggcgctagccaggactctagcagcaatcaacaggatccgggggagcccggcgaagctgaagtccaggaggaggaccacgacgtcacccagacagaagttgcggacggcgacattatggatggagaggccgagaccgacagcgtggtcattgccggccagcccgaggtcctgagttcacaggagatgcaggttgaaaatgagctcgaggatctgattgatgagctgctggagcgtgatgggggttctgggaactcgacgataattgtgtcacgcagcggggaggatgagtcacaagaggacgtcctgatggacgaggcccccagtaacttgagccaggcttcaaccctacaggcaaatcgcgaggacagtatgaatattcttgatccagaagatgaggaggaacatacccaggaggaggatagttcagggagtaatgaagacgaagacgactctcaggatgaagaggaggaagaagaggaagatgaggaagacgaccaggaagacgatgagggggaggagggagacgaagacgacgacgatgacggatctgaaatggagctcgacgaggattatcctgacatgaacgcatcccctctggtacggttcgagagattcgaccgagaggacgaccttatcatagagttcgacaacatgtttagtagcgccaccgatatcccaccttcacctggcaacattccaaccacacatccccttatggttagacacgcagaccatagctcactgaccctggggtccggctccagcactacccgccttactcaggggataggaaggtctcaaaggactctaaggcagctcactgctaacaccggtcataccattcacgttcactatccaggcaatagacagcctaacccaccgctcatcctgcaaaggctattaggacctagcgctgccgccgatatcctgcaactctcgtctagtctccctcttcaatcccgcggccgcgccaggctcctggtggggaatgatgatgtccatattattgcccgctctgatgatgagctgctagatgactttttccatgaccagtccaccgctacctcacaggcggggacactatcttccatcccaaccgctcttacccggtggacagaagaatgcaaagtcctcgacgcagaatcaatgcatgattgtgtttctgtggtgaaggtgtccatcgttaaccatctcgaattcctgcgcgacgaagagctggaagagagacgggaaaagaggcgtaagcagcttgccgaggaggagaccaaaatcactgataaaggaaaggaggataaggagaacagagaccaatcagcgcagtgtacagcaagcaagtcgaacgattctactgaacagaacctgagtgacggcacacctatgcccgattcgtacccaacaaccccctcatccacagacgctgccaccagcgagtcaaaagaaacactggggaccctccaaagcagccaacaacagcctacactcccaactccgcctgccctgggcgaggtgccacaggagctccagtctccagccggagaaggtggcagtagcacccagctcttgatgcctgtggagcctgaagaacttgggccaacccgccctagcggcgaagctgagacaacccagatggagctgtcacctgcgcccactatcacttctttgtccccggagagggccgaagatagcgacgcactgacggcagtgagcagtcagctggaggggagccccatggacacaagctctctggcaagttgtactttggaagaggcagtgggtgatacttctgcggcgggatccagtgagcagcctagagctggttcttccacccccggcgacgcccccccggccgttgccgaggttcagggtcgtagcgacggatctggtgagtccgcacaaccccctgaggactccagccctcctgcaagttcagagtcatcgagcacgagagactctgctgtcgctatcagcggcgcagacagccgaggcatactggaagaacccctcccttcaacgtcgtctgaggaagaagatccactggccgggatatcacttccagagggcgtggatccatcttttctggctgctctgcctgacgacatcaggcgtgaggtcctgcagaaccaactgggcattaggccccccacacgaaccgcacccagcacgaattccagcgctcccgcagtggtggggaatcccggggtcaccgaagtgagccccgagtttctggccgcgttaccccccgcgatacaggaagaggtgctcgcccaacaacgcgcggaacagcaaagacgagagctcgcccaaaacgcgtctagcgatactcctatggatcctgtgacatttattcagacattgccgtctgacctgcggaggtccgtgctggaggacatggaggactcagtactagcagtgatgcctccagatattgccgccgaggcgcaggccttaagaagggagcaggaggctagacagcgccagttgatgcatgagaggctgtttggccatagttccaccagcgcgctgtcagccatcctcaggtcccctgccttcacctccagacttagcgggaacagaggtgtccagtatacacggttggccgtccagaggggcggtacgttccagatgggggggagctcctctcataatagaccctccggctctaatgtcgataccctcttgcgtcttagaggtcgtctgttactggaccacgaggccctgagctgtctgctcgtcttgctgttcgtggatgagccaaagcttaacacctccaggctgcacagagtcctgcgtaacctgtgctaccacgcccagactaggcactgggtgatcaggagtctgttaagcatcctgcaaaggtcatcagagtctgagctgtgcatcgagaccccgaagctgactacatcggaagagaaggggaaaaaaagcagcaagtcttgtggtagtagctcccatgagaaccgacccttggacctgctgcacaaaatggaaagtaaaagctctaaccagctgagctggctgtcggttagcatggacgccgctcttggatgtcggactaacatctttcaaatacaacgcagcggcggtcgcaaacacactgaaaagcatgcatctggaggctcaacagtgcacatccatccccaggcggccccggtggtctgcagacacgttctggataccctgatccaacttgctaaagtctttccatcccacttcacccagcaacgaacgaaagaaacgaactgcgaatctgaccgcgaacggggcaacaaggcttgctcaccttgtagcagccagagctccagttcgggaatttgcaccgatttttgggatttgctggtgaaactggataatatgaatgtgtcgcggaaaggaaagaatagcgttaagtccgtgcctgtgtccgctgggggtgagggcgaaactagcccctacagcctggaagcttcaccattggggcagctgatgaacatgctttctcaccccgtaattcgccgtagtagtctcctcacggaaaagctgttaagactacttagtctaataagtatcgcgcttcctgagaacaaggtatctgaggctcaagctaattccggatcaggggcctcatccacaactactgctacgtcaaccacatccaccaccacgactaccgcggccagcacgacgccaacccctcccaccgccccaaccccggtaactagtgcacctgcactggtcgcagctactgctatttccactatagttgtggctgccagcaccaccgtcaccacaccaaccaccgcaacaacaaccgttagcattagccccactacaaaaggttccaagagcccagccaaggtttctgatggcggatcctcctcgacagactttaagatggtgtccagcggcctcacagaaaaccagctgcagctctcagtggaagtgctcaccagccacagctgcagcgaagaagggctggaagacgctgctaatgtgctcctgcaactctcccgaggcgactccggaactcgagatactgtgctgaagctgctattaaacggggcacgacacttaggatataccctttgtaaacagataggaactctactggccgagctccgagaatacaatttggaacagcagagaagggcccagtgcgagactttgtccccggacggattgccagaggagcaaccccagacaacaaagcttaaaggcaagatgcagtcacgcttcgacatggccgagaacgtggtcatcgttgcaagtcagaagcgaccgctgggcggccgcgaactgcagcttccgtcaatgtctatgctaacttcaaagaccagcacccagaaattctttttgcgagttctccaggtcataatccaattacgcgacgacacccgcagagctaataagaaagctaaacagaccgggagactcggcagctcagggctgggatctgcttcttcgatccaagcagcagtgagacagctggaggccgaggcagatgccataattcagatggtcagggagggccaaagggcacgcaggcagcagcaggccgccaccagcgagagctcccagtctgaggctagcgtccgcagagaagaatcaccgatggacgtagatcagccctctccctccgctcaagacactcaatccattgcatcagacggtacgcctcagggagagaaggaaaaagaagaacggccccctgagttacccctactctccgagcagttgtcattggatgagctgtgggacatgttgggagaatgtctgaaggaattggaagagtcgcacgatcaacatgccgtgctagtcctccagccagccgtggaggcatttttcttagtgcacgccactgagcgggaatcaaaaccaccagtgagagataccagagagtcacaactggcacatattaaagatgagccccccccgttgagcccggcacctttgaccccagcaactcccagttccctcgaccctttcttctctagggaaccttcaagcatgcatatcagctcttccctgccaccagacacacagaagttcttgcgctttgcagaaactcaccgtaccgttcttaatcagatattaaggcaaagtaccactcatctggccgacggcccctttgccgtcttggtcgattacataagagtcctcgactttgacgtaaagcggaaatacttccgccaggaactcgaaaggctggacgaaggattgaggaaggaagatatggcggttcacgtgcgaagggaccacgtgtttgaggatagttacagggagctccaccgaaaaagccccgaggagatgaaaaatcgcctatacatagtgtttgagggggaggagggccaagatgccggtggactgcttagagagtggtacatgataatctcaagggagatgttcaatcctatgtacgccctctttaggacctctccgggtgaccgggtgacctataccattaatccttcttcacattgtaaccccaaccacctgagctacttcaaattcgtaggccgtattgtcgccaaggctgtgtatgacaatcgcctccttgaatgctatttcaccaggtccttttacaaacacatattggggaaatccgtgcggtatacagacatggagagcgaggactaccacttttaccagggtctggtttacctgcttgaaaatgacgtgtcaaccctcggttatgatctgaccttttccactgaggtccaggaatttggagtttgcgaagtgcgggacctaaagcctaatggagcgaatattctcgtaaccgaagagaacaagaaggagtacgtgcatctcgtgtgccaaatgcgaatgacgggtgccattcggaaacagctggctgctttcctggaggggttttacgagataatacctaagagactgatctctatctttaccgagcaggagttagaattacttatctccggactccctaccatcgacattgatgatttgaaaagcaatactgaatatcacaagtaccaatctaatagtatccagatacagtggttttggcgcgcactacgctcattcgaccaggccgaccgggctaagttcttacagtttgtgacaggcacatcaaaagtgccattgcaggggttcgccgccctggaggggatgaatggcatacaaaaattccagatccatcgagatgataggtccactgatcgactacctagcgctcacacctgcttcaaccagttggatcttcccgcctacgaatctttcgagaaactgaggcacatgcttctactggccatacaggaatgttccgaagggttcggtctcgcatag

SEQ ID NO: 277714 - DNA, 13125 bp, Artificial Sequence
  derived and/or modified sequence
atgaaggtggaccggaccaagctgaagaagacccccaccgaggccccggctgactgtcgtgctctgatagacaaattaaaggtctgtaatgatgagcagctcctcctggaactccagcagattaaaacttggaatatcggaaagtgcgagttataccattgggtagacctattagaccgcttcgatgggattctggcagatgccggccaaaccgtggagaatatgagctggatgctcgtctgcgataggcctgaaagggagcagctaaagatgctgctgcttgcagttctaaactttaccgccctgctaatagaatattcattcagcagacatctatattcatccattgagcatctgaccactttgctggcttcttccgacatgcaggtagtcctcgcagtgcttaatctgctctacgtgttttccaaacgtagtaattatatcaccagactcggctccgataagaggacacctctgctgacacggctgcagcacctggcagaatcctggggaggaaaagaaaatggcttcggcctggcagaatgctgcagagatctccacatgatgaaataccccccctccgcaacgactcttcacttcgaattctacgccgacccgggcgcagaggttaaaatagagaagcgcaccacctctaacaccctccactatattcacattgaacagttggacaaaatctccgagagccccagtgagattatggagtcacttacaaagatgtattccatcccaaaggacaaacaaatgctccttttcactcacattaggctggcacacggcttttccaaccaccgcaaacgactgcaggcagtacaggcccggctgcacgctatctccatcctggtttatagtaacgctctgcaagaatccgcaaactccatcctttacaacggactgattgaggaactcgtggacgttttacagatcaccgacaagcaacttatggaaatcaaggctgctagcctgcgcacactaacgtctatcgtgcacctcgagcgtacgcccaagctgtcgtctatcattgactgcaccggcaccgcctcctaccatggctttctccctgtactcgtgcgcaattgcatacaggccatgatagaccccagcatggatccctatccacatcagttcgcaaccgcgctattttctttcttatatcatctggcctcttatgacgctggtggagaggctctggtctcatgcggcatgatggaggcactcctaaaagttatcaaattccttggcgacgagcaggatcagatcacctttgtgacgagagctgtgcgagtggtcgacctaattactaacctggacatggccgccttccagagtcactcaggattgtctatatttatatacaggttggagcacgaggtggacttgtgtaggaaagagtgcccatttgttatcaaacctaaaattcagcgccccaataccacccaggagggcgaggaaatggagacagacatggacggagtgcagtgtattccgcagcgcgcagcacttctcaagtcgatgttaaactttttgaaaaaagccatccaagaccccgccttctctgatggcatccgacacgtcatggacgggagcctcccaacctccctgaagcatatcatttcaaatgccgaatattacggaccaagcctgtttctcttggctaccgaagtggtgacagtcttcgttttccaggaacccagcttactttcaagtctgcaagataacggactcaccgacgtcatgctccacgccctccttatcaaggatgtacctgctaccagagaagttttgggcagcctgcccaacgtctttagtgcgctgtgcctgaacgccagaggcctacaaagttttgtgcaatgtcagccctttgagcggctgttcaaagtcctgctgtcccccgactacctccccgcaatgcgtcgaaggagatcgagtgaccctcttggagatactgcatccaacctgggtagcgccgtagacgagctcatgcggcatcaacccacactaaaaacggatgccactaccgcaattattaaactgctcgaggaaatctgcaatctcggaagagatcccaaatacatctgccagaagccatccatacagaaggccgacgggaccgctacagctcccccaccgaggtccaatcacgcggccgaggaggcatcatcggaagatgaagaagaggaggaggttcaggctatgcagagttttaatagtacccagcagaacgagacggaacctaaccaacaagtggttggaaccgaagaacggatccctatccctctgatggattacatcctgaacgtgatgaagttcgtggaatccatccttagtaataatactaccgacgaccactgccaagaatttgtcaatcagaaggggttgctgcctcttgtcaccatacttggcttgcctaatcttccaattgactttcctacaagcgctgcctgtcaggctgttgcaggagtctgcaaaagcattctgaccttaagtcatgagcctaaggttctccaggagggtcttttacaactggactccatcttgagttcactcgaacctctgcatcggcctatcgaatcccccggggggtcagtgttgctgcgcgaactggcctgcgctggaaatgttgctgacgccaccctatccgcacaggctaccccattactccacgcactcactgctgctcacgcctatattatgatgttcgtccatacctgcagagttggacagtcagaaatacgcagcatatcagtcaaccaatggggctcccagctgggcctctcagtactctcaaagctgagtcaactttactgcagcctggtgtgggaatccacagtgctgttgagtctctgcacccctaattcgctcccgtcgggatgtgagttcgggcaagcggacatgcagaagctcgtcccgaaggacgaaaaagccggaaccacccagggcgggaagagatccgatggagagcaggacggtgcagccggtagcatggacgccagcactcaaggattgttagaggggatagggctagatggcgacacactggcacccatggaaactgacgaacccacggcatccgacagtaaggggaaatctaaaataactcccgccatggcagcccgcatcaagcagataaagcctctgctctcagctagctccaggctgggccgagccctggccgagttatttggactcttggtcaaattgtgcgtcgggtctcctgtacgtcagcgcaggtctcaccatgccgcgtctaccacgacagctcctacacccgccgcgaggagcacggcctccgctctaacgaagctactgacgaaaggtttgagttggcagccacctccttatactcctactccgcgcttccgtttaaccttctttatatgctctgtgggtttcacatcccccatgttattcgatgagcgcaagtatccgtaccatctgatgcttcagaagtttctgtgtagtgggggtcataatgcgctctttgaaactttcaattgggcactgtcaatgggaggcaaagttcctgtctccgagggattagaacactccgatctgccggatgggacaggtgaatttctggacgcgtggcttatgctcgtggagaaaatggtaaatccaactacggtgctcgagtctccccactccttgccggcaaagctcccaggcggggttcaaaactttccgcagtttagcgccttgcggtttctggtggtgacccagaaggccgcctttacatgcatcaaaaatctctggaacagaaagcctctcaaagtgtatggaggaaggatggcagagtcaatgcttgccatcttgtgccacattcttcggggggaacctgtgatcagagaacgcttaagtaaagagaaggagggtagtcggggagaggaagataccggccaagaagagggagggtcccgacgggaaccacaggttaatcagcagcaattgcagcagcttatggatatgggcttcactagagagcacgccatggaagccctcctaaacacttccacgatggagcaggcgaccgaataccttctgacccatccaccccctatcatgggaggtgtggtccgggatctctccatgagtgaggaggatcagatgatgagggccatagctatgtctctggggcaagatatcccgatggaccaaagggccgaatctcccgaagaggtggcatgccgcaaagaggaggaggagaggaaggccagagagaagcaggaagaggaggaggctaagtgcctggagaaattccaagacgccgacccactggaacaagatgagttgcataccttcacagataccatgcttcctggctgtttccatttgctagacgagctgcccgatactgtatatcgggtatgcgatctcatcatgaccgctatcaaaagaaacggagccgactaccgcgatatgatcctgaaacaggttgtcaatcaagtctgggaggccgcagatgtactgataaaagccgctctcccactgacaacaagtgacacaaagacggtctctgaatggatctctcagatggccaccctgccacaggcttcgaacctggcaactagaattctcctactcacactgctatttgaggaactcaagctgccctgcgcatgggttgtagagtcaagcggtattttgaacgtgttgataaaactactggaagtagtacagccgtgtctgcaagcggcgaaggaacagaaagaggtgcagacccccaagtggattacccccgttttactgctgatagatttttacgaaaaaacagccataagttccaagaggcgtgcgcaaatgactaagtatttgcagtccaatagcaacaactggcgctggtttgatgatcggagcggtcgctggtgttcttactcggcaagtaacaattcaaccatcgacagcgcttggaaatctggagagacctctgtccgtttcaccgctggacgcagaaggtacactgtacagttcaccactatggtacaggtaaacgaggagactggcaaccgtcggccggtaatgctaacactcttgcgcgtgccgcgcctgaacaaaaacagtaagaactcaaatgggcaggagctagaaaaaacacttgaggagagcaaagagatggacatcaagaggaaagagaacaaaggcaacgacacccccctggcgttggagagcaccaacacggaaaaagaaactagcctagaagagacaaagattggtgaaatcttgatacaaggtctgacagaggatatggtgaccgttctgatccgagcctgtgtgtccatgctgggcgtcccagtagatccagataccctgcacgccaccctgcggttatgtttgagactcacccgggatcataagtacgcaatgatgtttgccgagctgaagagtacccggatgatcttgaacctgacacagagtagtgggttcaacggcttcacaccactggtgacactgcttctgagacatataattgaggacccttgcacgctaagacacaccatggaaaaggtcgtgcgttccgcggcgacaagcggagctgggagcaccacttcaggggtggtgtctggaagcctgggcagccgcgaaatcaactacatccttcgggtgttgggccccgccgcctgcagaaatcctgatatattcacagaggtggcaaactgttgtatcaggatcgcattgccggcgcctagaggcagcgggacagcttctgatgacgagttcgagaatctgagaattaaaggacctaacgcagtgcagctggtcaaaacaacgcccctcaaaccgtcccctctgccggtgatccccgataccatcaaggaggtgatttatgatatgctgaacgcattggcagcgtaccacgcccccgaagaggccgataagagcgaccctaagcctggcgtgatgacacaggaagtggggcagctcctacaggacatgggcgatgacgtgtatcagcagtatcggtcactgacccgccagtcgtccgacttcgacacccaatctggtttctccatcaactcacaggtctttgccgcagatggtgcttcaaccgaaacgagtgcatccggcacatctcaaggagaggccagcactccagaggagtcacgggatgggaaaaaagataaggagggggatcgtgcgagcgaggaggggaaacagaaagggaagggcagcaagcccctcatgcccacctccaccatactcagactacttgccgagttggtacgctcatacgttggaatcgccacgttgatagctaactactcgtacacagttggccagtctgagctgataaaggaagattgtagtgtcttggcgttcgtgctcgaccatctccttcctcacactcagaacgcagaggacaaggacaccccagcgctggcacgcctgttcctcgctagtctcgccgccgccggcagcggaaccgatgctcaggtggccctggtaaatgaggttaaggccgctttaggacgagcattggctatggccgagagtaccgaaaagcacgcccgcctgcaagcagtgatgtgcattatatcgaccatcatggagagctgcccctccacatcatctttttattctagtgcaaccgctaaaactcagcataatgggatgaacaacatcatcagactcttcctgaagaaaggcttagttaacgacctggccagagtacctcattctttagacctgtcttcgccaaatatggcgaacacggtgaacgctgcccttaagcccttggaaacactcagtagaattgtaaatcaacctagttccctgtttggaagcaaaagcgcctcatcaaagaacaagtccgaacaggatgcacagggggcgtctcaggattctagcagtaaccagcaggaccctggcgagcctggtgaggctgaagtgcaggaggaggaccatgatgtaacacagaccgaagtggccgatggtgacatcatggatggcgaggcagaaacagatagtgtggtcatcgccgggcaacccgaggtgctgtcgagccaggaaatgcaagtggagaacgaactggaggatctgatcgatgagctgctcgagagggatggcggttctgggaatagcacaattattgtctccaggagcggcgaagacgagagccaggaggatgtcctgatggacgaggccccatcaaacttgtcacaggctagtaccctgcaggccaatcgtgaagattccatgaacattctcgacccggaggatgaagaagagcatacgcaggaggaggacagcagtgggtccaacgaagacgaggatgactctcaagatgaggaggaggaggaggaggaagacgaggaggatgatcaggaagacgacgagggggaggagggcgacgaggacgatgatgacgacgggtctgaaatggagttggacgaagattatcctgatatgaatgctagccccctcgtccgttttgagagatttgacagagaggatgacctgatcatagaatttgataacatgttttcctcagcaaccgacatccctccttcacctgggaacatcccaactacccacccccttatggtgcggcatgcggaccacagctctctgaccctcggctcaggatcctccacaacaagactgacgcaaggcatcggtcgtagccaacgcactttaagacaacttactgccaatacgggccacactattcacgtgcactatcccgggaacaggcagccgaacccccctctgattctccagcgtctcctcgggccctccgccgctgctgatattttacagctgtccagttctctccccctccaaagtagagggcgggcacggctactggtcgggaatgatgacgtacacattattgcccgaagtgacgacgagttactcgatgatttctttcacgatcagtcgacagccactagtcaggcaggcactctgagcagcataccgactgcattaacccgatggacagaggagtgtaaagtgctggatgcagaatcgatgcatgactgtgtctccgtcgtaaaggtgtctatcgtgaatcatctggagtttctgcgcgatgaagaactggaagagcgccgtgagaaacgcagaaaacagctggcggaagaggaaaccaagattactgacaaggggaaggaagacaaagaaaaccgggatcagagcgcgcagtgcaccgcttctaagtctaatgattccacagagcagaacctgtccgacggcaccccaatgcccgattcctatccaactacaccatcctcaactgacgccgccacctctgagtcaaaggagaccctgggaacactgcagagcagtcagcagcagccgacgctgccaactcctcccgccctgggcgaagtgccacaggaactgcagagtcccgcgggcgagggtggctcttccactcagctgctcatgcccgtggagccggaggagttggggcccactcggccatcaggtgaggccgaaaccactcaaatggagctatctcctgcccctactattacctctttgtctcccgaacgggctgaggatagtgatgccctcacagccgtctcatcacaattggagggttctccaatggatacatcatccctcgcttcatgcacactcgaagaagccgtgggagacacttccgccgctggctcttccgagcagcctcgggcaggatcctctaccccaggcgacgcccctcctgcagttgccgaagtgcaggggcgcagtgatggctctggcgagtctgctcagccgccggaggactcctccccccctgctagtagcgagagtagtagtactagagattccgccgtcgctatcagcggagcagactcaaggggcattctggaggagcctcttccgtcgacctccagcgaggaagaagatccactggcaggcatctctctgcccgaaggcgtggatccctcttttctcgcggccctgcccgatgatattagaagagaggtcctgcagaatcagcttggaatacgaccccctacacgcactgcaccttccacaaattccagtgcgccagctgtagtgggcaaccctggtgtaaccgaggtctcccctgagtttctggcagcattacccccggctattcaagaggaagtgctggcgcagcagagagctgagcagcagagacgagagctggcacaaaatgccagtagtgacactcccatggaccctgtgacattcattcagactctaccttcagacttacggcgctccgtcctcgaagacatggaagattccgtcctggctgtcatgccccccgacattgcagccgaagctcaagctctgaggagggaacaggaagcgcgccagcggcaactcatgcacgagagactctttgggcatagttctacctcagcgctgtccgccatactgaggtccccggctttcacctccagattgtccgggaaccgtggagtccagtacacccgcctggccgtccagcgcggcgggacttttcagatgggaggctcctccagtcacaacagacccagcggaagtaacgtggatacacttctgcggttgagggggcgtctccttttggatcacgaggctctcagctgtctgctggtcctgttgttcgtggatgagccaaaactaaacaccagtcgcctgcaccgcgtccttcgaaatctctgctaccatgctcagacccggcattgggtgattagatccctgctctccatcctgcagcgctctagcgaaagtgaactgtgtattgagacgccgaagcttaccacatctgaagaaaagggcaagaaatctagcaagtcctgtggatcaagcagccacgagaatcgtcctctggatctattacacaagatggagagtaagtccagcaatcagctatcctggctgtccgtgtccatggacgctgcactcggctgccgcacgaatatcttccagatccagcggtctggcggtaggaaacataccgagaaacacgcctccggaggcagtaccgtgcacatccacccacaggccgctccagtggtatgtcgacacgtcctcgataccttgatccagttggctaaagtcttcccatcccattttacccagcagcgtacaaaagaaaccaactgcgagagtgaccgcgaaagggggaataaggcgtgttctccgtgctccagtcagtcatcttctagtggaatttgcacagacttttgggatctgctggtcaaactggacaacatgaatgtgagccgcaagggaaaaaatagtgttaagagcgtgcccgtcagtgccgggggcgaaggcgagacaagcccgtattcgctcgaagcatcccctttaggccagctgatgaatatgctgtcccaccctgtgatacgaaggtccagtctgctcactgaaaagctgttgcggctgctctctctgatttcgatcgcacttcctgagaataaggtatctgaggcacaggcaaatagcggctccggagctagttccacgaccacagctacttcgacaacaagcacaacaaccacaacagcagcatcgacaacgcctaccccgccaactgctccaactccagtgacaagtgcccccgccttagtcgcggccactgccatttctaccatcgtggtagccgctagtactacggtgaccactcccactactgctactacaacagtgtccattagccccaccacaaaaggatcgaagtcaccagccaaagtgtccgacggaggcagctctagtacagatttcaaaatggtgagctccggactgacggagaaccagctccagctgagcgtggaggtgctgacgtctcattcctgcagcgaggagggcttggaggatgcagccaacgtactcctgcagctttccagaggcgactctggcacccgcgacacggtgttaaagcttttgctcaatggagcaaggcatctgggctatacactgtgtaaacagattgggacgctgctcgcggagttgcgtgagtataatcttgaacagcagcggcgggcccagtgtgagactctatccccagacggactgcctgaggaacagccccagactacaaagctcaaaggtaaaatgcagtcacggttcgacatggctgagaatgtagtgattgtagccagccaaaagcgaccattaggaggaagagaactgcaactgccctctatgagtatgctgacgtccaaaacctctacccagaaattcttcctccgggtgttgcaagtcattatccagctgcgcgatgatacgcgccgcgcgaataagaaagctaagcagaccgggcgtttgggaagctctggcctgggtagcgcctcgtccatccaggccgcagtccggcaactggaagccgaggcggatgccattattcaaatggttcgggagggacagagggcgagacggcagcagcaggccgcaacttcagaatcatcacaatctgaggcgagcgtacggagagaagaaagtccaatggatgttgaccagccgtcgccaagcgctcaggatacgcagtccatagcctctgacgggactccccagggtgagaaagaaaaggaagagaggcccccggagttgccactcttgtcagagcagttaagcttggacgaactgtgggatatgctaggggaatgtctcaaagagctagaagagtcccatgatcagcacgccgtattggtcctgcagccagctgtcgaggcattcttcctcgtgcacgccaccgagagagaatcaaagccaccggtgagagacacccgtgagtcccagctcgctcatataaaggacgagccgccaccactgtcacccgcaccactgacgcctgcaacacctagctcgctcgaccctttcttttcaagggagccctcgtcgatgcacatctcgtcatccctgccccctgatacgcagaaattccttcgtttcgccgaaacccataggacggttttaaaccaaatattacggcagtcaaccactcatctagcagatggcccttttgccgtgctggtcgattatattagggtgctggactttgatgtgaagcgcaaatacttcaggcaggaactggaacgtctcgatgaaggcctacggaaggaggacatggccgtacatgtgcggcgtgatcacgttttcgaagactcataccgggaattgcatcgaaaaagtccagaggagatgaaaaacagactttacatagtgttcgagggagaagagggccaagacgcaggtggcctcttaagggaatggtatatgatcattagcagagaaatgtttaatcccatgtacgcactgttcaggacatcacctggggacagggtgacctacactattaatccttcctcacattgtaaccccaatcacctgtcctatttcaaattcgtgggaagaattgtggctaaggccgtgtatgacaatagactgctggaatgttatttcactaggtctttctataagcatatcctcggcaaatccgtacgctataccgatatggagagcgaagactaccatttttatcaggggctggtgtacctgttggagaacgatgtgagcaccctcgggtacgacctgacgttctccacagaagttcaggagttcggagtgtgcgaggtgcgcgaccttaagcccaacggagctaacatcctcgtgacggaagaaaacaaaaaggagtacgtgcatctggtctgtcagatgcgcatgaccggcgcaattagaaagcagctggcggccttcctggagggattttatgagataattccaaagcgcttgataagtatttttaccgagcaggagctggaactgctgattagtgggctgcccacaattgatatagatgacctgaagagtaatactgagtaccataagtatcagagcaattctatccagattcagtggttctggcgggcccttcggtcttttgatcaggctgatagagccaagttccttcagtttgtgacaggtacttctaaggtccccctgcaaggcttcgcagccctcgagggcatgaatggcattcagaagttccagatccatcgcgacgacagaagcaccgacagacttccatcagcccatacttgtttcaaccagttagatctgccagcctacgaatcttttgagaagctgcggcacatgctactcctggccatccaagagtgctcagaaggctttgggttggcgtag

SEQ ID NO: 277715 - DNA, 5019 bp, Artificial Sequence
  derived and/or modified sequence
atgaaggtggaccggaccaagctgaagaagacccccaccgaggcccccgcggattgtagggcccttattgataagctcaaggtgtgtaatgacgaacaacttctactggaactccaacagattaagacatggaatattgggaaatgcgaactgtatcactgggtagatttactggacagattcgatggaatactggctgatgcaggtcagacagttgaaaacatgagctggatgctggtctgcgacaggcccgagagggagcaactcaagatgctgttgctagcagttctgaatttcaccgccctgctcatagagtactctttttcgagacacctgtatagctctatcgagcacttgacaaccctcctggcctcatctgacatgcaagtggtacttgcagttctgaatctgctgtacgtattttctaagcggtcgaactatataacaagattgggctcagataaacgaacccccctgctgactcggctgcagcacctggccgaaagctggggcggcaaggagaatggcttcggcttggcagaatgctgccgggacttgcacatgatgaagtatcctcccagtgcaaccacactccattttgagttctacgccgaccccggagcagaggtaaagatcgagaagaggaccacaagcaacacactccactacatacacatcgaacagctcgacaagattagtgaatctccctccgaaattatggagagccttacaaagatgtactcaatccccaaggacaagcagatgctgctcttcacgcacatcagacttgcccatggtttctctaaccacaggaaacgactgcaggctgtgcaggcgcgccttcatgccatttcgatcctagtttactccaacgctctgcaggaaagtgccaactctatactgtacaatgggctgattgaagagcttgtggacgtgctgcaaatcacagataagcaattaatggagatcaaggcggcaagcctgcggactcttacttctatcgttcacctcgagaggactcccaagctctcatctatcattgattgcacgggcaccgcttcctatcatgggtttctccctgtattggtcaggaattgcatacaggctatgattgatccttctatggatccctatccacatcagtttgcaactgccctgttctcttttctatatcatctggcatcatacgatgccggcggtgaggcactggtgtcttgtgggatgatggaggccctgctgaaggtgattaagtttctgggagacgagcaggatcaaatcacattcgtgacccgagccgtgagagttgtggacctgattacaaacctggatatggccgcatttcagtctcatagcggcctctcaatatttatctatagactggagcacgaagtggatctgtgtcgcaaagagtgtccgttcgtgatcaagcccaaaattcagcgaccgaacacgacccaggaaggagaagaaatggaaacagacatggatggggtccagtgcatcccccagcgcgccgcgttgctcaaatcaatgctcaattttttgaaaaaggcaatacaagatcctgcttttagcgacgggatacgtcacgtcatggacggatccctcccaacatcgctgaaacacatcattagtaacgctgagtactacggcccatcactgtttctgctggctacggaggtcgtgacagtgttcgttttccaagaaccatctctgctgagcagtctccaggacaatggcctcacggatgtgatgttgcatgccctgctgattaaagatgtcccagcaacgagagaagtgctggggagcctgcctaacgtattctccgccctgtgcctcaacgctcggggcctccagagctttgtccagtgccagccttttgagcgtctctttaaagtgctgttgagccctgactacctcccggccatgaggcggagacgcagcagtgaccctctgggcgacacagcctctaacctaggaagtgccgtggatgagttaatgaggcaccagccaaccttgaagacagatgccaccacagccatcataaagttattagaggaaatttgtaacctgggacgcgaccctaaatacatttgccaaaagccttccattcagaaagcagacggtaccgccaccgcccctccgcctcgctccaaccatgccgctgaagaagccagcagcgaagatgaagaagaggaagaagtgcaggccatgcagtcatttaattctacacagcagaatgagaccgaacccaatcagcaagttgtgggtaccgaagaacgtatcccaatcccactgatggactacatcctgaacgtcatgaagtttgtcgagtccattttgagcaataacacaaccgacgatcattgtcaggagttcgtcaatcagaagggtttgctccctctagtgacaatcttgggcctgccgaatctgcctatagatttcccaacaagcgccgcttgccaagccgttgccggggtatgcaagagcattctgactctctctcatgaacccaaggtgctgcaggaaggcctgctacaactggattcgatcctctcctccctggaaccactacaccgtccgattgaaagtcccggaggaagcgtgttgctacgggagcttgcctgcgccgggaacgtggctgatgctaccctgagtgcccaagccactcccctgctgcatgctctgaccgccgcccacgcgtacatcatgatgttcgtgcacacatgtcgcgtgggtcagagcgaaattaggtctatttctgtcaaccagtgggggtctcagttaggcctgtctgttctgagtaaactgtcacagctgtattgttctttggtgtgggaaagcacagttctcctgtcactgtgtacgcctaacagccttcccagcggctgcgagttcgggcaggccgatatgcagaaactagtccctaaagacgagaaggccggcacgactcagggcgggaaacggtctgacggtgagcaggacggagccgccggaagcatggatgcgtctacacaaggtctgttagaaggcattggtctggacggcgacaccctagctccaatggagaccgatgaacctaccgcctccgactccaaaggtaaatctaaaatcactccagccatggccgcaagaatcaagcaaattaagccattgctgtccgctagttcacggcttggcagagccctggccgagttgttcggactgttagttaaactctgtgttggatctccagtacgccaaagaaggtctcaccatgctgcctctaccacaaccgcccctaccccagccgctaggagcactgccagtgcgttaacgaaattgcttaccaaggggctttcatggcagccaccaccatacacccctacaccaagatttcgactaaccttttttatatgtagcgtgggcttcacttccccaatgttgtttgacgagaggaagtatccttaccatcttatgctccagaagtttttgtgttccggcgggcataacgcacttttcgaaacttttaactgggctctgtcaatgggcggcaaagtgccagtgtccgagggcttggaacacagtgacttgcccgacggcaccggtgagttcttggacgcatggctgatgctggttgaaaaaatggttaacccgacaactgtgctagaatccccacacagtttgcctgcaaagcttcctgggggcgtgcagaacttccctcaattttctgccctccggtttctggtggtcacccagaaagctgccttcacttgtatcaaaaacctctggaaccgtaaacccctcaaagtctatggaggcagaatggcggaatccatgttggcaatcctgtgtcacatcctgagaggagaacccgtcattcgtgaaaggctttctaaggaaaaggaaggaagtagaggcgaagaggacacaggacaggaagaaggagggtcacgtagggagccccaagtgaaccagcaacagctgcagcagctgatggacatggggttcacaagggaacatgctatggaggccctgctcaacactagtaccatggagcaggccacagaatatttgctgactcacccacccccgatcatggggggcgtggtgagagatcttagtatgagtgaggaggatcagatgatgagggctatagctatgtctctgggacaggacattcccatggaccagagagccgagagtcccgaagaagtagcgtgtcggaaagaggaggaagagcggaaggctagagagaaacaagaagaagaagaggccaagtgtctggagaagttccaagatgctgatcctctggagcaggacgaactgcacacttttacagatacgatgctccccggttgctttcacctgctggacgagttgcctgacaccgtgtaccgcgtgtgtgacctcattatgactgccatcaagcgtaatggggcagattacagggacatgatacttaagcaggttgtgaatcaagtgtgggaggccgcggacgtcttgattaaggccgctttacccttaaccacctcggacacaaaaaccgtctcagaatggataagtcagatggctacactacctcaagcctccaacttagccacacgcatcctgctgttgacgcttctctttgaggaacttaagctgccgtgcgcttgggtagtggaaagtagcgggatcttgaatgtcctgattaagctgcttgaggttgtccagccctgcttgcaggccgccaaggagcagaaggaggttcaaaccccaaagtggattacaccagtgttgctgcttatcgatttttacgagaagaccgcgatctcctccaagcgaagggctcagatgacgaagtacttgcaaagcaacagcaataactggcggtggttcgatgaccggagcggccgctggtgcagctacagcgctagcaataattccacaattgacagcgcttggaaatccggggaaacaagtgtgagatttaccgccgggaggaggagatatactgtacagtttacaacaatggtgcaggggaccagcgctgaatag

SEQ ID NO: 277716 - DNA, 13125 bp, Artificial Sequence
  derived and/or modified sequence
atgaaggtagacagaaccaaacttaagaagactccaactgaggcacccgcagattgcagggcgctgatagataaattaaaagtgtgtaacgatgaacagctactcctagagctccagcagattaagacttggaacatcggaaaatgcgaactctatcactgggtggatctcctcgacagatttgatgggattctggcagatgcagggcagactgtggagaatatgtcttggatgttagtatgtgatcggcctgagagggaacagctgaagatgcttcttttggcggtgctgaatttcacggcccttcttatcgagtacagctttagtagacatctttactcatctatcgaacacctgaccacgctcctggccagcagcgacatgcaagtagtgctggccgtattgaacctgctttatgtgtttagtaagcgatctaactatattacacgcttggggtccgataagcgcaccccactgctgacacggctgcagcacctggcggagagctggggcggaaaggagaacggatttgggttggccgaatgttgcagggatttgcacatgatgaaatatccaccatccgctaccacactccattttgaattctatgcagaccccggagctgaggtcaaaatcgaaaagaggactacaagcaatactctgcattatatacatattgagcagttggataaaattagcgagagcccgagtgagattatggagtccctgactaagatgtacagcattcctaaggacaaacaaatgctactctttacacacatccgcctggcccacgggttttcaaatcacaggaagcgtctccaggcagtacaggccagattacacgccattagtatactcgtgtatagtaatgccctgcaagaatccgcaaattcaatcctgtacaatggcttgatcgaggagctagtcgacgttttgcagattacagacaaacagctgatggaaatcaaggccgctagtctccggacactcaccagcattgtccaccttgagcggacacctaagctgagtagcatcattgactgtacagggactgcttcctatcacggattcctgccagtattggtgcgcaattgtatccaggccatgattgatccaagcatggacccgtatccacaccagttcgcaaccgctctgtttagctttctataccacctcgcttcctatgacgctgggggagaagcccttgtaagttgcggaatgatggaggctcttctgaaggtgataaagttcttgggggacgaacaggatcagataacttttgtgacgcgcgcagtgcgtgtagttgacctgatcaccaatctggatatggcagcctttcagagccattccggactgtcaatatttatctatcggctagagcatgaagtggatttatgcagaaaagaatgtccatttgtgattaagcctaagatacaaaggccgaacactacgcaagagggggaggagatggagaccgatatggacggagtccagtgcattcctcagagggcagccctgctaaaatctatgctcaactttctcaagaaagcaatacaggatcccgctttcagtgatgggattcgccacgttatggatggctccttaccaacctcattgaaacatataatatcaaatgccgaatattatggaccctccctattcttgctggccactgaggtcgtgaccgtattcgtatttcaagaaccctcactgctttcctccctgcaggacaacggccttactgatgttatgcttcacgcgctgctgatcaaggacgtgccagccacaagagaggtacttggatcactgcctaatgtgtttagtgcactctgtctgaacgcaaggggtctgcagtccttcgtgcagtgtcagccattcgagagactctttaaagtgctgctgtcacccgattaccttcctgctatgcggagaagacgctctagcgaccccctgggggacaccgcaagcaacctgggatcagccgtcgacgagttgatgcggcaccagcctacactgaaaaccgatgcgacaaccgctattattaagctgttggaggaaatttgtaacctcgggagggatccaaaatacatttgtcagaaacctagcatccagaaggccgatggcaccgcgacagcacctccccctcggagtaaccacgccgctgaagaagctagtagcgaggacgaggaagaggaagaggtgcaggcaatgcagtcttttaatagtacccagcagaacgagaccgaaccgaatcagcaggttgtcggcaccgaggaaagaattcccattcccttgatggattatatccttaatgtcatgaaattcgtagagtctattttaagtaataatactacagacgaccattgccaggagttcgtcaaccagaagggtctcctccctctcgtgacaatcctcggcttaccgaacctgcccatagacttccccactagtgccgcatgccaagccgtggccggtgtgtgcaagtcgatcctgaccctctcccacgagccaaaggtactacaggagggactgttgcaattggactccattctaagctctctggagcccctccatcgacctatcgagtcccccggaggtagtgtactgctccgagaactcgcctgcgctgggaatgttgccgacgctaccctttccgcccaggctacgccactgcttcacgccctgacggccgcacatgcctacatcatgatgttcgtgcatacatgccgcgtcgggcaatccgaaattcgttctatatctgtgaatcagtggggctcccaattgggcctttcagtcctgagcaagctctcccagctgtactgcagcctggtctgggagagcacagtgttgctctcgctgtgcacacccaatagtcttccttcaggctgcgaattcggacaagccgacatgcagaaactggtccctaaggatgagaaggccggaacaactcaggggggaaagaggtcagacggcgaacaggacggcgcagcagggtcaatggatgcaagtacccagggcctgctggaaggcattggactggatggggacaccctggccccaatggaaaccgacgaaccaacagctagtgattctaaaggtaaaagtaagatcacaccagccatggcggcaagaattaagcagatcaagcctctgctgtccgcctcctccagactgggacgggcactcgccgaactcttcggtttattagtgaagctgtgtgttggcagtccagtccggcagcgtaggagccatcacgcagctagcactactacagcacctactcccgctgccagaagtaccgcttctgccctgaccaagcttcttaccaaaggattgagttggcaacctccgccttacactccaacaccccgttttcggctcacattctttatctgttcagtgggatttacgagccctatgcttttcgatgagcggaaatacccctaccatctgatgctgcaaaagtttctgtgtagcggcggacacaacgctttgttcgagactttcaactgggcactttccatgggcggaaaggtgcctgtgtctgagggcctggaacattccgatttgccagacggtacaggcgagttcctggatgcctggctgatgctggttgaaaagatggttaaccctaccacagttctggagtctccacacagtctgccagctaagctgccgggaggcgtccagaattttcctcagttttccgcgcttcgattcctggtggtcacacagaaggctgcctttacatgtatcaagaacctttggaacagaaagcccctgaaggtctatggaggtcgcatggccgagtctatgctcgcgatcctatgccatatactgaggggcgagcctgttattcgggagcgactgagtaaagaaaaagaaggttcaagaggtgaagaagacaccgggcaggaagaaggaggcagcaggcgcgagcctcaggtgaaccagcaacagttgcaacaactcatggacatggggtttactcgggagcatgctatggaagctctgctcaataccagtactatggaacaggcgacagaatatttgctcacacatcctcctcctataatgggaggtgttgtgcgtgacctctcaatgtccgaggaggatcagatgatgcgggcaatagccatgagcctagggcaggatattccaatggaccaaagggccgagtcacctgaagaagtggcctgccggaaggaagaggaggaaagaaaagccagggagaagcaggaagaagaagaggctaagtgtcttgagaagttccaagacgctgatccgctggagcaggatgagctgcacactttcacagacactatgcttcccggatgcttccacttgctggatgagcttcccgacactgtgtatcgggtctgcgacctaattatgaccgccattaaacgcaacggcgctgactacagagacatgatcctaaaacaggtcgtcaatcaggtgtgggaagctgccgacgttctgataaaagctgctctgccactgactacctctgacaccaaaacggttagtgagtggattagtcagatggctactttaccccaggcctccaacctggctacacggatactgttgctcacactccttttcgaagagctgaaactgccatgtgcatgggtagtggagtccagcgggatcctcaatgtcctgatcaagttactggaagtcgttcagccctgcttgcaggctgctaaagaacagaaggaggttcaaaccccaaaatggatcactcccgtcctgttgttaatcgatttctacgagaagaccgccatttcttccaagaggcgtgcccagatgaccaagtatctgcagtccaattctaacaactggaggtggtttgacgacaggtccggccgttggtgcagctactctgcctcaaacaacagcactatcgactcagcttggaagtctggcgagaccagcgtacgatttactgccggtaggaggcggtatacagtgcagtttaccacaatggtgcaagtgaatgaggaaaccggcaatagacggcctgttatgttgactctgttgcgagtgcctcgcctgaacaagaattcaaaaaattccaatggccaagaactcgagaaaacactcgaggagtccaaggagatggatataaaacgaaaggaaaataaagggaatgatacacctctcgcgctggaaagtacgaataccgaaaaagaaacgagcttagaggaaactaagataggcgagatcctaatacagggactgacagaggatatggtcaccgtgctaatcagagcttgcgtgagtatgttaggggttcccgtggacccagatactttgcacgccaccctcaggctgtgtcttagactgactagggaccataaatatgccatgatgtttgcagaacttaaatcaacccggatgatactgaacctcacccagtcatctgggttcaatgggttcacccctctggtcactctgttactacgccacattattgaggatccttgtacactcaggcacacaatggaaaaggttgtgcgctctgccgcaacaagcggggctgggtccaccacaagtggagtggtttcagggagcttgggctcaagggaaatcaactacatcctccgtgtgcttgggccagccgcatgtcggaaccccgatatcttcacagaagttgccaattgttgtattcgtattgctcttcctgcccctcggggatccgggaccgcgtccgatgatgaatttgaaaacttgaggatcaaaggccctaacgccgtgcaactagtgaagacgaccccactcaagccgtctccattgcccgtgattcccgacaccatcaaagaagtcatttatgatatgctgaatgctctggcagcttaccacgccccagaggaggcagacaaatcagaccccaaaccaggagtaatgacccaggaggtgggacaactactgcaagatatgggagacgatgtgtatcagcagtatcggtccctgacccgccagtcaagtgatttcgacactcaatctggattctctatcaattcacaggtgttcgcagccgacggggctagcaccgaaaccagcgcttcaggaaccagtcagggagaagcttcgactcctgaggaatcccgggacgggaagaaagacaaggagggggacagagcctcggaagagggaaaacagaaaggcaaaggtagtaagccgctgatgcctacgagcactatcctgcgactgctggctgagttagtgcgctcctacgtcggcattgctaccttgatcgctaattatagttacactgttggacaatctgagctcataaaggaggactgctcagtgttggccttcgtgctcgaccacctgttgccgcacacccagaatgctgaagataaggatacaccagccctcgctaggctgtttttggcctctctcgccgctgccggatcaggtactgacgcccaggttgcactggtgaatgaagttaaggcagcgctagggagagcactcgcgatggccgagtcgactgagaaacacgcccgactgcaggccgttatgtgcattatttcaacaatcatggaatcttgcccatccacttcatcgttttactcgagcgccacagccaagacccagcataacggaatgaataacatcatccgcctcttcctaaaaaaaggattagtcaatgacctggccagagttccgcactctttagacctgtcttcccccaatatggccaacaccgtgaacgccgctctgaagcctctggaaacactctcccggatcgtaaaccaaccaagctccctgttcggcagcaagtccgcctccagcaagaataagtccgagcaggacgcccaaggggcatcccaggattcttctagcaaccaacaggacccaggagagcccggagaggctgaagtgcaggaagaagaccatgatgtcacacagactgaggtggccgacggcgacatcatggatggcgaagccgaaactgactcagtggtcatcgccggtcagcccgaggtcttgagttctcaggagatgcaggtagaaaatgagctggaagaccttatagatgagctactggaacgcgatgggggttccggcaacagcaccattatcgtaagccgctcaggcgaagacgaaagccaggaggatgtactgatggatgaagccccatccaatctttctcaggcatctaccctccaggctaatagggaggactcgatgaatatcctcgacccagaagacgaagaggaacacactcaggaggaggattctagtgggagcaatgaagacgaagatgactcccaggatgaggaggaggaggaggaagaggacgaggaggatgaccaggaggatgatgaaggcgaagaaggtgacgaggacgacgacgacgacgggtccgagatggagctcgacgaggactatcccgacatgaacgcaagccctttggtcagattcgaacgcttcgatcgggaggacgatctcattatagagttcgacaacatgttctcaagtgcgactgatatccccccatctcccggaaatattcctacaactcacccacttatggtccggcatgcagatcactcttccctcacgctaggaagcggctcaagcacgactagactcacgcaaggaatcgggagaagccagaggacactccggcagctcaccgcaaatactggtcatactatccatgttcattatccaggcaacaggcagcccaacccgccactgatccttcaaagattattaggcccttctgccgcagctgacatactccagctgagtagtagtttacccttgcagtctcggggacgggcacggctgctggtagggaacgatgatgtccatatcattgcacgttccgatgacgagctgctggacgactttttccatgatcagagcactgccacctctcaagcagggaccttatccagtattccaacggctttgacgcgctggacggaggaatgcaaagtgctagacgcggagagcatgcacgattgcgtgagcgtcgtcaaggttagcatcgtgaaccatcttgagttccttagagacgaggaattagaggagagacgcgagaagagaagaaagcagctcgcggaagaggaaaccaagatcacggataaggggaaggaggataaagagaaccgtgaccagagcgcccagtgcacagcatcaaaatcaaatgactccactgagcagaatcttagtgacggaaccccgatgcctgattcctaccccacaactccatcttcgacggatgccgcaacctctgagagtaaagagactctgggaacccttcagagctcacaacagcagcccaccctccccactccacccgctttgggagaagtgccacaagagctgcaaagcccggctggtgaagggggttcttctacccaacttctcatgcccgtggagccagaggagttaggacccacccggccatctggcgaggcggaaaccacccaaatggagttgtctcctgcccctaccatcaccagcctcagcccagaacgggctgaagactccgacgccctgaccgctgtaagcagccagctggagggaagtcctatggataccagtagtcttgccagctgcacccttgaggaggcagtcggcgacacatctgcagcagggagctcagagcagcccagagcagggtcatcgacaccaggcgacgcgcctcccgctgtggctgaggtgcagggaagatctgacggctccggggagagcgcgcaacctcctgaagatagtagtccccctgcttcctctgagtcaagttcaacccgcgattcagctgtagccatcagcggagccgacagcagagggatattggaggaaccccttccttcaaccagcagtgaggaagaagaccccctagccggtattagtctccccgaaggagtggaccccagcttcctggcggcactccctgacgacattcggagagaagttctccagaatcaattgggaattaggccacccacacggaccgccccttctaccaattcgagcgccccagccgtggtcgggaatcccggagtcacggaggtgtcacccgagtttctggccgctcttcctccggctatccaggaggaagttttggcccagcagagagctgaacagcagcgacgcgagctggcccagaacgcttcctccgacacccctatggaccctgtgactttcatacagacgttaccgtcagacttacgcaggtccgtcctagaggacatggaagattctgtactagcggtcatgcctcctgacatagcggcagaggctcaggctctacgcagagagcaagaagctagacagcgccaactcatgcacgaaagactctttgggcattcctccacaagtgcgctgtccgctatactgcggtcaccagcattcacaagcagacttagtggaaatcggggtgtgcagtatacaaggttggcggttcagcgtggtgggacatttcaaatggggggatccagctcccacaacaggccgagcggatctaatgtggacacactcttacgactgcggggaaggctcctgctggaccatgaagctttatcctgtttgcttgtgctgctgtttgttgacgaaccgaaactgaatacgagtaggctgcatagggtgttgagaaacttgtgctaccacgctcaaacccggcattgggtaattcgttccctgctctcgatcctgcagaggtccagtgagtcggagctgtgcatcgaaacaccaaagctcacaactagcgaagaaaagggtaagaagtcctctaaatcctgtggaagcagtagccacgagaacaggcccttggatctccttcacaaaatggaatccaagtcgagcaatcagcttagttggctgtccgtgtccatggacgcggctctcggatgtcgaacaaacatctttcagattcaacggtccgggggaagaaagcacacagagaagcacgcttccgggggtagcaccgtgcatattcacccccaggctgccccagtggtgtgtaggcatgtgctcgacaccctgatacagctggcaaaagtcttcccctcccacttcacacagcagagaaccaaggaaaccaactgcgagagcgatagagagagggggaacaaggcatgcagtccttgttcttctcagagcagcagctctggcatctgcacagatttttgggatctactagtaaaactcgacaacatgaatgtgagtaggaaaggaaagaatagcgtgaagagcgtgccggtctctgccggtggagaaggcgagacttccccgtactctctggaggcttctccactgggccaactgatgaatatgttgtcacacccagtgatccgcaggtcctccttgctcaccgagaaattgcttagactcctgtctctcatttcgatagctttaccagaaaataaagtttccgaggcacaggcaaattcaggatccggagcatctagcacaacaacagcaacttctaccacctccacaactacgaccaccgccgcatccacaactccaacgcccccaacggcgccaacccccgtgacctccgctcccgcactggtggcagctaccgcaatatcgaccattgtggtggcagcgtccaccactgtgacaacacctaccaccgctacgacgactgtcagcataagcccaaccactaagggttcgaagagtcccgctaaagtgagcgatggcggttccagttctactgatttcaaaatggtgagcagcggtctgaccgaaaatcaactgcagctcagcgtcgaagtgctgaccagccacagctgcagtgaagaaggccttgaagacgctgcaaatgtactcctgcaactttcacgtggcgattccggtacgcgcgataccgtgcttaagctcctcctgaatggcgctaggcatcttggctatacactgtgtaaacaaattggaacactcctagcagagttacgggaatacaacctggagcagcagaggagagcacaatgcgaaacactgtctccagacggactgcccgaagaacaacctcagaccaccaagctcaaaggaaagatgcagtccagattcgacatggcagaaaatgtggtaattgtggctagccagaagcggccactggggggtagagaattgcagctcccatccatgtccatgttaacctccaagacttccacacaaaaattctttctcagagtgctgcaagtgatcattcagttgcgcgatgatactcgacgcgcaaacaaaaaagcaaaacagaccgggcgattaggcagctctggactgggttcagcctcttccatccaggccgcagttaggcagttggaagcagaggcagatgctattatccagatggtccgggaaggccagcgcgctaggaggcaacaacaagctgccacctccgagagttcccagtcagaagccagtgtaagaagagaggaaagccctatggatgtcgatcagccctcaccttcggctcaggacacacagtcaattgcgagcgatggcacccctcaaggagagaaagaaaaggaagaacggccacctgagttacccctgctcagtgaacagctttcattggatgaattatgggatatgctgggcgaatgtttgaaggagctggaggagtcccatgatcagcatgccgtgctggtactgcagccagcagtggaggccttctttttagtgcatgccaccgagagagagagcaagccacccgttcgagatacacgggaatcacagctagcccatatcaaagacgaacccccacctctgtcgcccgcacctctgacccctgcaacacctagcagcctggacccgttcttcagtagggaaccctcctcaatgcatatctcctctagcctgcccccagatacgcagaagtttctaagatttgctgagacacacagaaccgttctgaaccagatccttaggcagagtaccacacacctcgccgatggacccttcgccgtgctggtggattacatacgcgtccttgatttcgacgttaaacgaaagtatttccgtcaggagctggagagactcgacgagggcctgcgaaaagaagatatggccgtgcacgtgcgcagggatcacgtgtttgaagattcttaccgggaacttcatcgaaaaagtcccgaagagatgaagaaccgcttgtatatcgtgtttgaaggggaggagggacaagatgcgggaggattactgagggagtggtatatgatcattagccgggagatgtttaaccccatgtacgctctcttcaggacctcgcctggcgatcgggtgacttacacaataaacccaagtagccattgcaatccgaatcacttgtcttacttcaagttcgtcggcaggatagtggctaaggcggtctatgacaatagactgctcgagtgttattttacaagaagcttttacaagcatatcctgggcaagagcgtaaggtatacagacatggaatccgaagactatcatttctatcaggggctggtgtatctgctcgagaacgatgtgtctacacttggctacgacctaacttttagcacggaggtgcaggaatttggggtttgcgaggtgagagatctgaaaccaaacggcgctaatatactggttactgaggagaataagaaggaatacgtccatctggtctgtcaaatgcggatgacaggagcaatccgcaaacagctagccgcttttctggagggcttctacgagattatcccaaagcggctgatttcaatttttacggagcaggaattggagcttctcattagcggccttccgacgattgatattgatgacttgaaaagcaacaccgagtatcacaaatatcagagtaactccatacagatccagtggttttggagggcactccgttcatttgaccaagccgaccgagctaagtttctgcagtttgtgacgggaaccagcaaggttccgttgcaagggttcgcagccctcgaggggatgaatggcatacagaagttccagatccatcgggacgaccgaagcacggaccggctcccatccgcccacacatgttttaatcaactcgatttacctgcctatgaaagctttgagaagcttcgccatatgctgctccttgctatccaggaatgctcagaaggcttcgggctggcctag

SEQ ID NO: 277717 - DNA, 13125 bp, Artificial Sequence
  derived and/or modified sequence
atgaaagtcgataggactaagctcaagaaaacaccgacggaggcacccgctgactgcagagctttgatagataaattgaaggtgtgtaacgacgaacagctgctcctggagttacagcagatcaaaacctggaacattgggaagtgtgaactttaccattgggtggatttgcttgaccgatttgacgggatcctggcggatgctggacagactgtcgagaatatgagctggatgcttgtctgcgatcgccctgagcgagagcaactcaagatgcttctcctggctgttctgaacttcactgcactcctcatcgagtatagctttagcagacacctgtatagcagcatagagcacctgacaacgttgctcgcgagcagtgatatgcaggtggtactggccgtattgaacttgctgtacgtattcagcaaacgcagtaattacattaccagactcggctccgataagagaacgccgcttctgactagactccaacaccttgcagaatcatggggaggcaaggagaacggtttcgggcttgctgagtgctgtagggatctacatatgatgaagtatccccctagcgccacaaccctgcacttcgaattctatgccgatcccggagcagaagtgaaaatcgagaaacgcacgacttctaacactctccattacatccacatcgagcagctcgacaagatttccgaatctccctctgaaattatggagtcgctcacgaagatgtattccatcccaaaggataagcaaatgctcctttttacgcacatcagactcgcccatggattcagcaaccaccggaaacgcctgcaagctgtccaagctcggttgcatgccattagtattcttgtttactcaaacgcactccaggaatccgctaacagcatcttgtataatggcctgattgaggagttggtggacgtcctgcagattaccgataagcagctgatggaaatcaaggccgctagtttgcgaacccttacaagtatagtgcacctcgagcgcaccccaaagctgagctccatcatcgattgcacaggaactgcatcatatcatggattccttccagttcttgtccgaaattgcatacaagccatgattgacccaagtatggacccatatcctcaccaattcgcgaccgctttgttctcattcttgtaccacctggcctcttacgacgccggtggcgaagccctggtctcatgcggtatgatggaggccctgttaaaagtgataaaattcctgggagatgagcaggaccagatcacattcgtgaccagagctgtgagagtagtcgacctcattaccaacttggatatggcagctttccagtcgcatagcgggctgtctattttcatttatcgactggagcacgaggtcgacctgtgccggaaggagtgcccctttgtcattaaacctaagatccagaggcccaataccactcaggagggagaggaaatggaaacagatatggacggggtgcagtgcataccgcagcgggctgccctgctgaagtccatgctcaattttctaaaaaaagcaatccaggatcctgcatttagcgatgggattcgacatgttatggatgggtccctgcctaccagtttgaagcatatcatctcaaacgccgagtactatggaccaagtctgttcttgctggccaccgaagtcgtcaccgtgtttgtgttccaggagccctcccttctgtcaagcctacaggataatggactgacagatgttatgctgcatgcactgctcatcaaggatgtgcccgcaacccgggaggtgctgggcagtctgcccaatgttttcagtgccctctgtcttaatgccaggggcctgcaaagctttgttcaatgtcagccattcgagagactctttaaagtgttgctgtcaccggactacctgccagcaatgcgccgtagaagatcttccgaccccctgggtgatacagccagtaacctcggatcagcggtagacgagttaatgcgccatcaacctactttaaaaactgacgctaccaccgccatcattaagttgttggaagaaatatgcaatctcggcagagacccaaagtatatctgccagaagccaagtattcagaaagctgatggcactgccacagcccctccgccaagatctaatcacgctgccgaagaggcaagtagcgaggacgaggaggaggaagaagtgcaggcaatgcagtcctttaattctacacagcagaacgaaacagaacccaaccagcaggtagtaggcacagaggaacgaatacccatacctctgatggattatatacttaatgtcatgaaattcgtggaatccattctaagcaacaacactacagacgatcactgccaggagtttgtgaatcaaaaaggcttgttacccttagtgacgatattgggattacctaacctcccaatcgatttccctacttccgccgcatgccaggccgtggctggggtttgtaagagcattcttaccctttcccatgaacccaaggtgttacaggagggccttctgcaacttgacagcattctgagctccctcgaaccgctccatcggccaatagaatcacctggaggatcagtgttgctgagggagctggcctgcgcaggcaatgtcgccgacgcgacactgtccgcgcaagcaactccactgctgcacgcacttaccgctgctcacgcctacataatgatgtttgttcacacgtgtagggtggggcagtcggagatacgaagtataagcgtcaaccagtggggcagtcaactcggcctctccgtgctttcaaaactctcacaactttattgttcattggtttgggaaagcactgtgctgctaagtctgtgtacgccaaattctctgccctccggctgcgagttcgggcaggcagatatgcaaaagcttgtcccaaaggacgagaaagcaggtacgacacaagggggaaaacggtccgatggggaacaggatggagctgctggatctatggatgcatccacacagggacttctggaggggatcgggctcgacggcgacaccctcgcacccatggagactgatgagccaaccgcttccgacagcaagggtaagtctaagatcacgcctgctatggccgctagaataaaacagattaagcctcttctctcagcatcctccagacttggaagggcactcgcagagctctttggactgctggtcaaactgtgtgtcggcagtccggtgaggcagaggcgttctcatcacgccgcttctacaacaaccgccccaactccggcagctagatccaccgctagtgctcttactaaattgcttaccaaagggctcagctggcaacccccaccctatactcctacgccacgttttaggctgaccttttttatttgttcagtcgggtttacctcgcctatgcttttcgacgaaagaaagtacccttatcacctgatgttacaaaagttcctgtgctccggcggacacaacgccctcttcgagaccttcaattgggccttgtcgatggggggtaaggttcctgtatctgagggcctcgagcatagtgatttaccagatggcaccggtgaattcctcgatgcttggctgatgttagtggagaagatggtcaaccccaccacggtgctggaatcaccacactctctccccgcaaagcttcctgggggagtccagaatttccctcagttctccgctctaagatttctagttgttacacaaaaagcagcattcacgtgcattaaaaatctttggaatcgcaagccactgaaggtttatggaggccgaatggcggaatctatgctggctatcctgtgccatattttgcgcggtgagccggtgattcgcgaacggctgtccaaggagaaagagggttcacgcggagaggaggacaccggtcaggaggagggcggaagcaggcgagaaccccaagtgaatcagcagcagctgcagcaactaatggacatggggttcacacgcgagcatgccatggaagctctgttaaatacgtccactatggagcaagccaccgagtatctgctcacccacccaccccctatcatggggggagtcgtgcgcgatctgagcatgagcgaggaagatcagatgatgagagctattgctatgtctctggggcaagacatcccaatggatcaacgtgccgagtcccccgaggaagtcgcatgtcggaaagaggaggaggagaggaaggctagggagaaacaggaggaggaggaggccaaatgtctcgaaaaattccaggatgctgatcctctagaacaggacgagctgcacacctttaccgacaccatgctgccagggtgtttccacctattagatgaattgcccgatactgtttacagagtgtgtgacctgatcatgacagccattaagcgaaatggcgctgactacagggatatgatcctgaagcaggtcgttaaccaggtgtgggaagccgcagacgtgcttatcaaagctgctctgcccttaacaacctcagacacaaagacggtctcggaatggatctcacagatggctactctcccccaggcttctaatctggccaccaggattctgttgctgacgctactcttcgaggaactgaaactgccttgcgcttgggttgtggagtccagtggcatccttaacgtcttaataaagctcttggaagtggtccagccctgcttacaggctgctaaggaacaaaaggaagtgcaaacccccaaatggatcacgcccgttctgctgcttatagatttttacgagaagactgctattagctctaagcgcagagcccagatgactaaatacctgcagtctaactcaaataactggcgttggttcgatgatagatcagggagatggtgctcttattccgcttccaataatagcaccatcgactcagcttggaaatccggcgagacttcggttcgattcacggctgggcgtcgtcggtacacggtgcaattcactacgatggtgcaggtcaatgaggaaactggcaatcgccgtcctgtgatgctgaccctgcttagagtcccacggctcaacaaaaattccaaaaatagcaatggccaggagctcgaaaagacccttgaggaaagtaaggagatggacataaagaggaaggagaataagggaaacgatactcccctggccctcgagagtaccaacacagagaaggagacctcgctagaggagaccaaaattggggaaattctgatacaggggttaacggaagacatggtgactgtcctcattcgtgcatgcgttagcatgctcggtgtccccgtagaccccgataccctacacgctacattgagactgtgcctccggctcaccagggatcataaatacgcaatgatgttcgcggaattgaaatctacgcgcatgatcctaaatcttacacaatccagtggatttaatggatttacacccctcgttacgttgctgctccggcacataattgaagacccatgcacattgcggcacaccatggagaaggtggtgcggagtgcggcaaccagcggcgctggcagcactacaagcggtgtggtttcaggatctctcggctcccgggagatcaactacatattgcgcgtcttgggacccgctgcttgcagaaacccagacatctttacagaggtggcaaactgctgcataagaattgcccttccagccccaagaggttcaggtacggctagcgatgacgagtttgagaatttgcgcattaaaggaccaaatgctgtgcagctcgtgaagaccacgccacttaagcctagtccactccccgtgatccctgacactatcaaggaagtgatttatgatatgttaaatgcattggcggcttatcatgcaccagaggaggctgataagtctgatcccaaacctggcgtgatgacccaagaagtaggccagctgttgcaggacatgggcgatgacgtctaccaacagtatcgctctctgacgaggcagtccagtgattttgacacacagtctgggttctccatcaatagccaggtgttcgctgcggacggcgcttccacggagacctcagcatccgggacctcacagggggaggccagtacaccagaagagagtcgggatgggaaaaaagataaagagggtgaccgggctagcgaggagggcaagcagaaaggcaaggggagtaaacccctcatgcctacttctactatccttcggttactcgcagaactggtccgctcctatgtaggaatcgccactctgatcgctaattacagttacaccgtcggtcagagcgaactcataaaggaggactgctccgtgctggcttttgtgctggatcatctccttccccatacccagaacgcagaggacaaggacactccggcattagctcggctgtttctcgcaagcctcgctgccgctgggtcggggactgacgctcaagtggctctggtgaatgaggtcaaggccgctctcggcagagccctggccatggctgagagtacggagaaacatgctaggctacaggccgtcatgtgcataattagtacgattatggagtcctgtccatcaacttcatccttctacagttccgccaccgcgaagacgcaacacaacggaatgaacaatattattcggctgttcctgaagaaggggctggtcaacgacctcgcccgagtgcctcactcactggacttgtcttctcctaacatggcgaataccgtaaacgcagccctaaagcctttggaaacactcagccggattgtaaatcagccgtccagcttattcggcagtaagagcgctagctccaagaataagagcgaacaggatgctcaaggggcaagccaggatagctctagtaaccagcaggacccaggtgagcccggtgaggccgaggtgcaggaagaggatcatgatgtgacacaaaccgaggtcgccgacggcgatatcatggatggagaagctgagaccgattccgtggttatcgcgggtcagcccgaggtgctctcttcacaggaaatgcaggtagaaaatgaactggaggacctcatcgatgagctgctcgaacgggacggtggctctggaaatagcacgattatcgtgtctcgatccggggaagacgagagccaggaagatgtgctcatggacgaagcaccctccaatctatcacaagcctccactctacaggctaatcgcgaggacagtatgaatatcttagaccccgaggatgaggaggaacacacccaggaggaagactctagtggttccaatgaagacgaggacgactcacaagacgaggaggaggaggaagaagaggacgaagaagacgatcaggaggacgacgagggggaagagggagatgaggatgatgacgacgacggcagcgaaatggaactggatgaggattacccagacatgaatgctagtcccttagtccgctttgaaagatttgatcgagaggacgatcttataattgaatttgacaacatgttcagtagcgccacagacatcccccctagtcctgggaacatcccaacaactcaccctctgatggtgcgacatgccgatcatagcagcctcaccctgggaagcggtagctctacaactaggctgacgcaggggattggtcggagtcaaaggaccctccgacagttgacggccaacactggccataccattcacgttcattatcccggtaataggcagcccaacccacctttgattcttcagcgcctattaggaccatctgccgctgctgacattctccaactgagtagctccctgccactacagtcccgagggagagccaggctgctggtgggcaacgatgatgtgcacatcattgcgaggagtgacgacgagctgttagatgactttttccatgaccaatcaacagctacgtctcaagcagggacactaagctccattccgaccgcacttacaaggtggaccgaagaatgtaaggtgctggacgcagagagtatgcacgattgcgttagcgttgtgaaagtttccattgtgaatcatctggagttcttaagagatgaagaactggaggagaggcgagagaagcgaagaaaacagctagcggaggaagagaccaagatcacagataaaggcaaagaagacaaagagaatagagatcagtccgcccagtgcacagcttcgaaatcaaatgatagcaccgagcagaatctgtccgacggtacccctatgcccgacagttaccccactacaccgtctagtaccgatgccgctacctctgagtcaaaggagaccctaggaaccctccagtcctcacagcaacagccaaccctaccaacaccccctgccctaggcgaagtgcctcaagaactgcagagtccagcaggggaaggtggtagcagcacccagctactgatgcctgtcgaaccggaggagctcggcccaacaaggccctctggcgaagcggagaccactcagatggagctgagtccggctcccacgatcacaagtctctctccagaaagggccgaggactcggacgctcttactgccgtcagcagccagctggagggctcacctatggatacctcaagtctagcctcgtgcacgctggaagaagctgtgggggacacgtcagccgctggatcaagcgagcagcctagagcgggtagctctacccctggggacgcaccccctgccgtggcagaagtccaagggagatctgacggatcaggagagtctgctcagccccctgaagactccagccctccagcatctagcgaaagctcctccactcgtgacagcgcagtggccatttccggcgcagatagtcgagggattctggaggagccgctgcctagcacttccagcgaagaagaggaccctctcgccggaatcagtctgcccgagggtgtcgacccaagctttcttgcagcactgcccgatgatatccggagggaggtcttgcaaaatcagctggggataaggccccctacccggaccgcgccatccacaaactcatctgccccagctgtcgtgggaaatcctggggtaacagaagtgtctcccgagttcctggccgctctgcccccagcaattcaagaggaggtgctggcccagcagcgtgctgaacagcagcggagagaactggcgcaaaatgccagttctgacacaccaatggaccctgtgacatttatacagactctgcccagcgatttaagaaggtccgtgttagaggatatggaagattccgtattagccgtcatgccccctgatatcgccgcagaggctcaggcgcttcgacgggagcaggaagcccgacagcggcagcttatgcatgagcgtctgttcggccactctagcactagcgcactgagcgccattctacgctctccagccttcacaagtcgtttgagcggcaataggggggtgcaatatacacgccttgcagttcagagaggtggcacattccagatgggaggctcttcctctcataaccgacctagcgggagcaacgtcgacacactgctcaggctcagaggaagactcctgttagatcatgaggcactctcgtgcctgctggtgttgctcttcgtggatgagccgaagctgaacacctcaaggcttcatagggtccttcggaacctctgttaccacgcccaaacgcggcattgggtcatccgttctttgttgtctatcttgcagcgctctagtgaaagcgaactttgtatagagaccccaaagttaacaaccagcgaagagaaaggaaagaaatcgtcaaagagctgcggaagctcaagccatgaaaatagaccccttgatctacttcataagatggaaagcaaaagtagcaatcaactcagttggctatctgtttctatggatgctgcgcttggctgccgaactaatatcttccaaatacaacggtctggcggacggaagcacactgaaaagcacgcctcaggaggtagtacagtgcacattcacccacaggccgcacccgtcgtgtgtaggcacgtgttggatacactgattcagctggcaaaagtatttccatcccattttacacaacagaggacaaaagaaactaactgcgagtccgaccgagagcgaggcaataaagcctgcagcccttgcagctctcaatctagttcctccggcatttgcactgatttctgggatctactcgtgaagctcgataacatgaacgtttcccggaaggggaagaatagcgtgaaatccgtgcccgtgtcagctggcggagagggagaaacttccccctacagtttggaagctagcccccttgggcagctgatgaatatgctgtcgcacccagtgataaggcgttcctctttactgacagagaaactgctacgtcttctgagtctcatttccatcgcattgcccgaaaacaaggtgagtgaagctcaagccaattctggctctggggcatcctccacgactactgccactagcacgacatctaccaccactacaactgccgcttcgaccacaccaactcctcccaccgcccctacccccgtcaccagcgcccctgcactcgtagccgctactgccatcagcaccattgtagtagcagcgtctacaaccgtgacaacccccactacagctaccaccacagtgtccattagtcccactacgaaaggaagtaagtctcccgcaaaagtttccgacggtgggtcgagctccacagacttcaaaatggtgtcatccgggctaaccgagaatcaattgcagctttctgtggaggtcctaacatcgcactcatgctcggaggagggtctggaggacgcagcaaacgtcttattgcagctgtcccggggagactctgggacacgcgataccgtgctcaagctgttattgaacggtgctcggcaccttgggtatactctgtgcaagcaaataggcaccttgctagctgagctgagggagtataatttggaacaacagagaagagcccaatgtgaaacgctgtcgccagacggcctgcctgaggagcagcctcagacaaccaagttaaagggaaagatgcaatcccgattcgacatggccgagaatgtagttatcgtcgcgagccagaagcgccctttgggaggaagggaactgcagctgcccagtatgagtatgcttacaagcaagactagtacccaaaagttttttctacgcgtcctccaggtgataatccagctccgtgatgacacgcggagagcgaataagaaagccaaacagactgggcgtctcgggagcagcgggttgggctcggcatcctccatacaagccgcagtgcggcagctagaggcagaggccgacgcaattattcagatggtcagggaggggcagagggcccgacggcagcagcaggctgccacatctgagtccagtcaaagcgaagctagcgtgcggagagaggagtcacccatggacgtagatcagccatctccctctgcgcaggacacgcagtccatcgctagcgatgggaccccccagggcgagaaggaaaaagaagagcggcctccagagctccccctccttagtgagcagttgagcttggacgagctgtgggacatgctgggagagtgccttaaggagctggaggaatcccacgaccaacacgcagtgctggtcctccagcctgctgttgaagctttttttctggtgcatgctaccgagcgggagagcaaacctcccgtgcgcgacacccgcgaatctcagctggctcacatcaaagacgagccccctccgctctccccagcaccacttacacctgctacgccttcaagcctggatcccttctttagtcgtgagcccagtagcatgcacatctcttctagtttgcctccggacactcagaaatttctccgatttgctgagacccaccgcacagtcttaaaccagatcctgagacaatcgaccacgcacctagccgacggtccgttcgcagttctggtagattatataagggttctggacttcgacgtgaagcgcaaatactttcgccaagaattggaacggcttgacgaaggactgcgaaaggaagatatggccgtgcacgtgagacgcgaccacgtgtttgaggactcctaccgcgaactacataggaagagtcccgaagagatgaaaaaccgactttatatcgtttttgagggagaagagggccaagatgctggcggactcctccgcgagtggtacatgatcatttctcgcgaaatgttcaaccctatgtacgctctattcagaaccagccctggggacagggttacgtacaccattaacccaagcagtcactgcaacccaaaccatctgtcctactttaagttcgtcggcagaatcgtcgctaaggccgtctatgataatcggcttctggagtgctactttacaaggtccttctacaaacacattcttgggaaaagtgtgagatacaccgacatggagtctgaggactatcacttctatcaggggcttgtgtaccttcttgagaacgacgtatcaaccttaggttacgacctgacttttagcactgaagtgcaagaattcggcgtgtgtgaggtgcgcgatctgaagccaaatggggctaatatcttggttactgaggaaaataaaaaagaatacgtgcacctggtgtgtcagatgcgcatgacaggtgccattcgtaaacagctggctgcctttctggaggggttctatgaaatcatccccaagaggctgatcagcatcttcactgaacaggaactggaactcctaatcagcggtctgcctactatcgatatcgacgacctgaaatccaataccgaatatcataaatatcagagtaactccatccagatacagtggttctggagagcactgcggtcatttgatcaagctgacagagcgaaattcctacagtttgtcacgggcacctccaaagtgccactccagggatttgccgctttggaggggatgaacggtatacagaagtttcagatccaccgggatgataggtccacggaccgattaccgagtgcacatacttgcttcaaccagcttgacctgcctgcctacgagagtttcgagaaactacgccacatgctactcttggccattcaggaatgttcagagggctttggcctcgcatat

SEQ ID NO: 277718 - DNA, 5019 bp, Artificial Sequence
  derived and/or modified sequence
atgaaggtagatcgtacgaaactaaaaaaaacacccacggaagctcccgctgactgcagggctctgatcgacaagctgaaagtctgtaatgatgagcagctgctgcttgagctgcaacagattaagacctggaatatcgggaagtgcgagctgtatcattgggttgatttgctggatagattcgacggcattctggctgatgccggacagacagttgagaacatgagctggatgttagtgtgcgaccgcccagaacgtgagcagctgaaaatgctcctgctcgctgtgctcaactttacagctttgttgatagaatacagtttctctcgccatttgtatagcagtattgaacacctaaccacactgctcgcgagcagcgacatgcaggtggtgcttgccgtgctgaatctgctgtatgttttttccaagagatctaattatatcaccagactcggatcagacaaaaggacaccactgctgacccgactccagcatttggcggagagttgggggggtaaggaaaacggatttggcctggctgagtgttgccgagacctccacatgatgaaataccctccatctgcaactaccctgcacttcgagttttatgccgatccaggggctgaagtgaagatagaaaagcggaccacttcaaatacgttacactacatccatatcgagcagctggacaaaatctcagagtcccccagtgagattatggaatctcttacaaaaatgtacagcatcccgaaggataagcagatgctgctttttacgcatatccggctggcccacgggtttagcaaccataggaaaaggctccaggcggtccaggcgaggttgcacgcgatcagtattctagtgtattccaacgccctgcaggaaagcgccaactccatcctctacaacggccttatcgaggaattggtggatgtgctccagattacagataaacagctcatggaaataaaggctgcttctctccggacattaaccagcatcgttcacctagagagaacccctaaactgagctctattatagattgcacgggaacagcttcataccatgggttcctgccagtgctggtgagaaactgtatacaggccatgatcgaccccagtatggacccgtacccgcatcaatttgctactgccctcttcagctttctttaccacctcgccagctatgacgctggcggagaagcactggtttcttgcggcatgatggaggcattacttaaggtgatcaaatttctaggggacgagcaggaccagataacattcgtgaccagggcggtgcgggtcgtcgatctcattacaaacctcgacatggcagcattccaatctcacagtggcctgtccatatttatctatcgactagagcatgaggtcgacctatgccggaaagagtgccctttcgtgatcaagcctaaaattcaacgtcctaacaccacacaggaaggggaggagatggaaaccgacatggatggtgtgcaatgcattccccagcgagcagctcttctcaagtcaatgttaaacttcctcaagaaggccatccaagacccagctttctccgatgggatacgccacgtgatggatggtagtctgcctaccagcctgaagcacatcatcagcaacgctgagtactacggccctagtttgtttctgttggcgaccgaggtggttacggtgtttgtctttcaagaaccaagcttgttatcaagcctgcaagacaacgggttgacggacgtgatgctgcacgcactgctgatcaaggatgtacccgcaacaagagaggtgctgggaagcctgccgaatgtctttagcgccctttgcctgaacgcccgtggtctgcagagcttcgttcagtgtcaaccctttgagagactgttcaaggtgctcctgtcacctgactatctgcccgctatgcgccgacggagatcttccgacccgttgggcgacaccgcatcaaaccttggcagcgcagtcgacgagctgatgagacaccagcccactctgaagaccgacgccaccactgccatcattaagctcctcgaggaaatctgtaacttgggacgtgaccccaagtatatatgccagaaaccttctatccagaaggccgacggaaccgcaacggccccacccccacgatccaatcatgccgctgaagaagcttcctctgaagacgaagaggaggaggaggtccaggctatgcaatctttcaacagcacgcagcagaacgagaccgagcctaatcagcaggttgtggggacagaggaacgtatcccaatacccttgatggattacattttaaacgtgatgaaattcgtggagagcatcctgtctaataacactactgatgatcactgtcaggaattcgtcaatcagaagggcctgctgcctctggtaacaatcctgggcctgccaaacctacctattgattttccaacgtctgccgcatgccaagctgtggctggggtgtgcaaatcaatactgacgctgtcccacgagccaaaggtccttcaggagggactcttacaattagattcaatcttgtctagcctcgaacccttgcaccggccaatagagtcccccggagggagcgttctgttacgggagctggcctgcgcaggcaatgtcgccgacgcgacactgtccgcacaagccactcccctgcttcacgctctgactgccgcacatgcctacatcatgatgttcgtgcatacatgtcgggtcggacagtctgagatcaggtctatttccgtcaaccaatggggaagccagttaggcttatccgttctttctaagttgtctcagttatactgctctctggtgtgggaatcaacagtactgctgagcttgtgcacccctaattcactgccctctgggtgcgagtttggacaggccgacatgcagaaattagtgcctaaggacgaaaaagcagggaccacacaaggcggaaaacgaagcgatggcgagcaggatggggctgctggctccatggatgcgtctactcaaggactgctcgagggcataggactcgacggtgacaccctggccccaatggaaaccgatgaacccactgcatcagattctaagggcaagagcaaaataactcccgcaatggcggctcgtataaagcagatcaagccactactgtcggcaagttcgagattggggagagccctcgcagagttgttcgggctcttggtcaaattgtgtgtggggtcccccgtccggcaacgtcggagccaccacgctgcatcaactactacagcacccacacccgctgccaggtctaccgcctctgcgctcaccaaattactgaccaagggattgtcctggcagcccccaccatatacccccaccccccgattcagactcactttcttcatctgtagcgtgggctttacctcaccgatgctgttcgacgagcgtaagtatccatatcacctcatgctccagaagttcctctgcagcggcggtcacaatgcacttttcgaaacctttaactgggcactctcaatggggggaaaggtccccgtgagtgaaggtttggaacattctgatctgccagacggcacaggcgaattcctcgacgcttggttgatgctggttgaaaaaatggtaaaccccactacagttctggaatctccgcatagcctgccggctaagttgcccggtggcgtgcagaacttccctcaattctccgcactcaggttcctggtggtcacccagaaggctgctttcacatgtattaaaaatctgtggaacaggaaaccactcaaggtgtacgggggtcgcatggccgaatctatgctagcgattctatgtcatatcttgaggggggaaccggttattcgggagagactgtctaaggagaaagagggctcccgtggcgaggaagacaccgggcaggaagagggaggaagccgcagagagccacaggttaatcagcaacagttacagcagttaatggacatggggtttacgagggagcatgctatggaggcactactgaacaccagtactatggaacaggccaccgaatacttactcacccatccaccccctatcatgggcggagtggtacgtgacctttctatgagtgaagaggaccagatgatgcgagccatcgcaatgtccttaggtcaggacatccctatggatcagcgtgccgaaagccccgaagaggtggcatgcagaaaagaagaagaggagcgcaaagccagagaaaagcaagaggaagaagaggccaagtgtctggaaaaattccaggacgctgatccgctggagcaggatgaattgcataccttcacagacacaatgctgccaggctgtttccacctcctggacgaactgccagacaccgtataccgagtctgcgatctcattatgacggcaattaagcgcaatggcgcagattacagagacatgatcctgaagcaggtggttaaccaagtctgggaggccgcagacgtattgatcaaggcagcactccctctgacgacatccgacaccaagactgtgagtgaatggatcagccaaatggctactctgcctcaggccagcaatcttgccacacgaatcctcctccttacgttactcttcgaggaactgaagctcccatgtgcatgggtggtggagtcaagtggtatcctgaacgtgctcataaaacttctggaggtggtccagccctgtttgcaggccgctaaagaacaaaaagaagtgcagacaccgaagtggattacgcccgttctgctgctgatcgatttttatgagaagactgccatctcgtccaaacggagggcccaaatgaccaagtatctgcaatccaatagcaataattggagatggttcgatgacagatccggacgttggtgtagctatagcgcttctaacaattccactatagatagcgcgtggaagagtggggagaccagcgtccgctttacagccggtcgaaggaggtacacagtccagttcactaccatggtgcagggcacaagcgcagaatag

SEQ ID NO: 277719 - DNA, 5019 bp, Artificial Sequence
  derived and/or modified sequence
atgaaggtggacagaaccaagctgaagaagacccccaccgaggcccccgccgactgcagagccctgatcgacaagctgaaggtgtgcaacgacgagcagctgctgctggagctgcagcagatcaagacctggaacatcggcaagtgcgagctgtaccactgggtggacctgctggacagattcgacggcatcctggccgacgccggccagaccgtggagaacatgagctggatgctggtgtgcgacagacccgagagagagcagctgaagatgctgctgctggccgtgctgaacttcaccgccctgctgatcgagtacagcttcagcagacacctgtacagcagcatcgagcacctgaccaccctgctggccagcagcgacatgcaggtggtgctggccgtgctgaacctgctgtacgtgttcagcaagagaagcaactacatcaccagactgggcagcgacaagagaacccccctgctgaccagactgcagcacctggccgagagctggggcggcaaggagaacggcttcggcctggccgagtgctgcagagacctgcacatgatgaagtacccccccagcgccaccaccctgcacttcgagttctacgccgaccccggcgccgaggtgaagatcgagaagagaaccaccagcaacaccctgcactacatccacatcgagcagctggacaagatcagcgagagccccagcgagatcatggagagcctgaccaagatgtacagcatccccaaggacaagcagatgctgctgttcacccacatcagactggcccacggcttcagcaaccacagaaagagactgcaggccgtgcaggccagactgcacgccatcagcatcctggtgtacagcaacgccctgcaggagagcgccaacagcatcctgtacaacggcctgatcgaggagctggtggacgtgctgcagatcaccgacaagcagctgatggagatcaaggccgccagcctgagaaccctgaccagcatcgtgcacctggagagaacccccaagctgagcagcatcatcgactgcaccggcaccgccagctaccacggcttcctgcccgtgctggtgagaaactgcatccaggccatgatcgaccccagcatggacccctacccccaccagttcgccaccgccctgttcagcttcctgtaccacctggccagctacgacgccggcggcgaggccctggtgagctgcggcatgatggaggccctgctgaaggtgatcaagttcctgggcgacgagcaggaccagatcaccttcgtgaccagagccgtgagagtggtggacctgatcaccaacctggacatggccgccttccagagccacagcggcctgagcatcttcatctacagactggagcacgaggtggacctgtgcagaaaggagtgccccttcgtgatcaagcccaagatccagagacccaacaccacccaggagggcgaggagatggagaccgacatggacggcgtgcagtgcatcccccagagagccgccctgctgaagagcatgctgaacttcctgaagaaggccatccaggaccccgccttcagcgacggcatcagacacgtgatggacggcagcctgcccaccagcctgaagcacatcatcagcaacgccgagtactacggccccagcctgttcctgctggccaccgaggtggtgaccgtgttcgtgttccaggagcccagcctgctgagcagcctgcaggacaacggcctgaccgacgtgatgctgcacgccctgctgatcaaggacgtgcccgccaccagagaggtgctgggcagcctgcccaacgtgttcagcgccctgtgcctgaacgccagaggcctgcagagcttcgtgcagtgccagcccttcgagagactgttcaaggtgctgctgagccccgactacctgcccgccatgagaagaagaagaagcagcgaccccctgggcgacaccgccagcaacctgggcagcgccgtggacgagctgatgagacaccagcccaccctgaagaccgacgccaccaccgccatcatcaagctgctggaggagatctgcaacctgggcagagaccccaagtacatctgccagaagcccagcatccagaaggccgacggcaccgccaccgcccccccccccagaagcaaccacgccgccgaggaggccagcagcgaggacgaggaggaggaggaggtgcaggccatgcagagcttcaacagcacccagcagaacgagaccgagcccaaccagcaggtggtgggcaccgaggagagaatccccatccccctgatggactacatcctgaacgtgatgaagttcgtggagagcatcctgagcaacaacaccaccgacgaccactgccaggagttcgtgaaccagaagggcctgctgcccctggtgaccatcctgggcctgcccaacctgcccatcgacttccccaccagcgccgcctgccaggccgtggccggcgtgtgcaagagcatcctgaccctgagccacgagcccaaggtgctgcaggagggcctgctgcagctggacagcatcctgagcagcctggagcccctgcacagacccatcgagagccccggcggcagcgtgctgctgagagagctggcctgcgccggcaacgtggccgacgccaccctgagcgcccaggccacccccctgctgcacgccctgaccgccgcccacgcctacatcatgatgttcgtgcacacctgcagagtgggccagagcgagatcagaagcatcagcgtgaaccagtggggcagccagctgggcctgagcgtgctgagcaagctgagccagctgtactgcagcctggtgtgggagagcaccgtgctgctgagcctgtgcacccccaacagcctgcccagcggctgcgagttcggccaggccgacatgcagaagctggtgcccaaggacgagaaggccggcaccacccagggcggcaagagaagcgacggcgagcaggacggcgccgccggcagcatggacgccagcacccagggcctgctggagggcatcggcctggacggcgacaccctggcccccatggagaccgacgagcccaccgccagcgacagcaagggcaagagcaagatcacccccgccatggccgccagaatcaagcagatcaagcccctgctgagcgccagcagcagactgggcagagccctggccgagctgttcggcctgctggtgaagctgtgcgtgggcagccccgtgagacagagaagaagccaccacgccgccagcaccaccaccgcccccacccccgccgccagaagcaccgccagcgccctgaccaagctgctgaccaagggcctgagctggcagccccccccctacacccccacccccagattcagactgaccttcttcatctgcagcgtgggcttcaccagccccatgctgttcgacgagagaaagtacccctaccacctgatgctgcagaagttcctgtgcagcggcggccacaacgccctgttcgagaccttcaactgggccctgagcatgggcggcaaggtgcccgtgagcgagggcctggagcacagcgacctgcccgacggcaccggcgagttcctggacgcctggctgatgctggtggagaagatggtgaaccccaccaccgtgctggagagcccccacagcctgcccgccaagctgcccggcggcgtgcagaacttcccccagttcagcgccctgagattcctggtggtgacccagaaggccgccttcacctgcatcaagaacctgtggaacagaaagcccctgaaggtgtacggcggcagaatggccgagagcatgctggccatcctgtgccacatcctgagaggcgagcccgtgatcagagagagactgagcaaggagaaggagggcagcagaggcgaggaggacaccggccaggaggagggcggcagcagaagagagccccaggtgaaccagcagcagctgcagcagctgatggacatgggcttcaccagagagcacgccatggaggccctgctgaacaccagcaccatggagcaggccaccgagtacctgctgacccaccccccccccatcatgggcggcgtggtgagagacctgagcatgagcgaggaggaccagatgatgagagccatcgccatgagcctgggccaggacatccccatggaccagagagccgagagccccgaggaggtggcctgcagaaaggaggaggaggagagaaaggccagagagaagcaggaggaggaggaggccaagtgcctggagaagttccaggacgccgaccccctggagcaggacgagctgcacaccttcaccgacaccatgctgcccggctgcttccacctgctggacgagctgcccgacaccgtgtacagagtgtgcgacctgatcatgaccgccatcaagagaaacggcgccgactacagagacatgatcctgaagcaggtggtgaaccaggtgtgggaggccgccgacgtgctgatcaaggccgccctgcccctgaccaccagcgacaccaagaccgtgagcgagtggatcagccagatggccaccctgccccaggccagcaacctggccaccagaatcctgctgctgaccctgctgttcgaggagctgaagctgccctgcgcctgggtggtggagagcagcggcatcctgaacgtgctgatcaagctgctggaggtggtgcagccctgcctgcaggccgccaaggagcagaaggaggtgcagacccccaagtggatcacccccgtgctgctgctgatcgacttctacgagaagaccgccatcagcagcaagagaagagcccagatgaccaagtacctgcagagcaacagcaacaactggagatggttcgacgacagaagcggcagatggtgcagctacagcgccagcaacaacagcaccatcgacagcgcctggaagagcggcgagaccagcgtgagattcaccgccggcagaagaagatacaccgtgcagttcaccaccatggtgcagggcaccagcgccgagtag

SEQ ID NO: 277720 - protein, 359 aa, Artificial Sequence
  derived and/or modified sequence
MVDMDKLINNLEVQLNSEGGSMQVFKQVTASVRNRDPPEIEYRSNMTSPTLLDANPMENPALFNDIKIEPPEELLASDFSLPQVEPVDLSFHKPKAPLQPASMLQAPIRPPKPQSSPQTLVVSTSTSDMSTSANIPTVLTPGSVLTSSQSTGSQQILHVIHTIPSVSLPNKMGGLKTIPVVVQSLPMVYTTLPADGGPAAITVPLIGGDGKNAGSVKVDPTSMSPLEIPSDSEESTIESGSSALQSLQGLQQEPAAMAQMQGEESLDLKRRRIHQCDFAGCSKVYTKSSHLKAHRRIHTGEKPYKCTWDGCSWKFARSDELTRHFRKHTGIKPFRCTDCNRSFSRSDHLSLHRRRHDTM

SEQ ID NO: 277721 - DNA, 5434 bp, Artificial Sequence
  derived and/or modified sequence
ttttaaggaactccaccctaggtggagtcctcacgatagtcacacctctcctttgggcctagcagggccagagaaagacggaatcactctacccactcaggttgcccagagagcactttaggttctgactcgcgtggggcgcgaggtaccccgtggggcagctaggtgcctccaagaaaccccgccccagaggacccgcacgagttgctgccatttttcgctgaagcccctgccctggggctggtgttcttctctatgattctaccaatcgtcggcatttttttcctcccttctttctttttaggaaggcgctggggtgtgcggcggcaacggcggcggtgaagggatcctcttgtggtatctcctcgtgggttcctgtcttgaaggatttcttctccgcctcaactttatgttcaagtagcgctttgggggttgggttggttttcatagcccccacccccggccctctccttttaaagggtgtgtggagttcagaggatgggtggagagcgggcttggccggaactgaattggtagaggtaaaaggggaacggaggaccttaagctctggccacttcggcccagcgaacccactttatttttgtccaaggaaaagctgcaggggggaggattctttttaggaagtctactctgccggcccctgatttttgggttggatgcttgagagctttgtttcccttgttccgagagtggcccagctgggtctgaatcgactccctcccctttcgaccccctcctcattttccagcccggagaaataggggagtgggggcccaagaacgagaagacgagaacgcgtcgccctgcgctatgtcagaatggggcgggtgtgaggggaacagctctcttgcgatcagctcaggagtatgagcctcccggaggacggcatgagttctggacacttcaggagtcctcagctagtgacatggtcgatatggataaactcataaacaacttggaggtccaacttaattcagaaggtggctcaatgcaggtattcaagcaggtcactgcttctgttcggaacagagatccccctgagatagaatacagaagtaatatgacttctccaacactcctggatgccaaccccatggagaacccagcactgtttaatgacatcaagattgagcccccagaagaacttttggctagtgatttcagcctgccccaagtggaaccagttgacctctcctttcacaagcccaaggctcctctccagcctgctagcatgctacaagctccaatacgtccccccaagccacagtcttctccccagacccttgtggtgtccacgtcaacatctgacatgagcacttcagcaaacattcctactgttctgaccccaggctctgtcctgacctcctctcagagcactggtagccagcagatcttacatgtcattcacactatcccctcagtcagtctgccaaataagatgggtggcctgaagaccatcccagtggtagtgcagtctctgcccatggtgtatactactttgcctgcagatgggggccctgcagccattacagtcccactcattggaggagatggtaaaaatgctggatcagtgaaagttgaccccacctccatgtctccactggaaattccaagtgacagtgaggagagtacaattgagagtggatcctcagccttgcagagtctgcagggactacagcaagaaccagcagcaatggcccaaatgcagggagaagagtcgcttgacttgaagagaagacggattcaccaatgtgactttgcaggatgcagcaaagtgtacaccaaaagctctcacctgaaagctcaccgcagaatccatacaggagagaagccttataaatgcacctgggatggctgctcctggaaatttgctcgctcagatgagctcactcgccatttccgcaagcacacaggcatcaagccttttcggtgcacagactgcaaccgcagcttttctcgttctgaccacctgtccctgcatcgccgtcgccatgacaccatgtgagccgcacaggtcacactagagaagctgcgctggtatctttcctggtcgtgtgctgaggttgggacaattttttcctctttgacttcagcttgcatatggggttgaagcagcccactgagccaagttgaggagactggaggaaaagagagctggtctcccgtggggctcttcatattctaccttcacttctccactgtccagacccgtttttttcaacctccacatgggttgaattccagtgtggcacccatggctgccttcccatccccccctgctctgaaataggacatttttcctacagtaacaaaacaggaatcaaactcaaggctgtgaacaaacatacgctgctttattctttccaatttttctcttgttttctagaactcttatccatatgtttttaaaataagtacctaaaagtggtttgatagtgtcctaaacgacttttttaacttcctaaatggaaagagcataacaatgtagttgattggtaagatttacagggatttggtttctgagtttgaggcacattcccagtgaataagctgagtcccataccacactcaaaaggttttaataaatctaatcctatttcttcttaaagtttggttttcagacagtgctggtgcttctgcttcttaagttcatcaagggaatgaggagttcttgtccttctcctcctcttttttttcttttccactttctccttcaggattaaagattttgctgcacaattgttatttgttaggttaaatttggacaaatattcaaagcacacatagacatataagtaaggagaaaaatgttccaggagagtaggttgggcagtgacaggaacaaacagacctaggatgatcctgagaacaaatagaggggttcctttacttgtataggatatcaaaagtgctgttaatcacaaacctcattcaaatggcaggctgtcgagacagtgtcttgaggggctggctgtactgtttattttttcgtttacacaaagaagcaattgagtatattgcatgatgagaaatcacacactagggtcatgttatacagaagtaaggggttggaaaaatggaatgttgttcactccatggaattattggcattcattcctgtgtttcaaatgaaacatagatgcttttcatgaaaactgacctacaaaaagcaatttgatgttctgcaactgctatgaaaacctaagccatttattttagctgatagcagattgcataatatactcatttagctgcccaatcagattgttttataatattacctggggtacaaaatcctctgttcctggccctggaccacagatctacctccacatggcatatttcctttctggggtcaggggtaggggagggggctttgcatcacttgaatttagactcagcctctctttaaaagattgtctttatattgaacacctttttcttttcaaccctgcttgaatactttaggttactatttcctgaggctgtccattctcactatattgtagaattctagcaccaagaagggatcccgttaaccatctagtcctatccatccctcatattttacagatgagacaaatacgggtcagatttttttctccagatgtttctttgagcccttatacacctgcacgcttattctcctggggatcacataattttatttatttattttttgagagacggtttcactccatcacccaggctggagtgcagtggcgtaatcttggctcactgcaacctccgcctcctgggttcaagtgattctcctgcctcagcctcccaaatagcttggattacaggtgcgtgccaccacacctagctaagttttgtattattagtagagatggggtttcgccatgttggccaggctggtctcaaactcctgacctcaagtgatccccccacctcggcctcccaaagtgctgggatcacaggtgtgagtcaccacacctggccaggatcacattattaaaccaaattaaagtttatgtgattggttgcaatatttgtctaattttatatgttttcttcaggaaaactttagaactcaaaaatcatttacagctgattaaatagcaagtaaaatgtacttgtggtcattgccgtataacattaggcacacgcttctaacacttctataatatctagattttatttacctcattttaacttgcaatgtctgtctatctcatgaactctccataaatccaagaactgcctgtagttttcaaaatgacatgtgggtttttactgttatcattgttatttcgatagggctttttcctgattttgggtatacaagttccaaacttgcataataattgctaacgcactaggcgatatctagggccagtctgttaaaggggacctctaatgtagctataagacaggttggtaaagatgaactaacataagtttaagctaataattcagtagttgatgcagtatttcacagtagagcccgagcttactcatttttttcaaaatttggatcctgatactcctttttcagagttcagaactgaactgctcccctaagacctcagaatcttttgcattgagacatatgatctatttataaataaaggttatcaaatatcttgttgaactaattaggttgatcaaattaggatcccaaatattggggtccctgacatctgagcctttatctaaaaatgtttctgtaacataatgacagcctttatgtttgttaattgcctatagtaaagaagcaattttaagcctattctcatttccctctcccctacaaaaaatgataaaagctttccaattacttacatatgctctaacaagtgtctcaggattcattaacagaattttatagagtacagtaattcaaatatagcacagtacagagtttaccaaaaacacataaaactttgctagatagacagtgaggtggaaaggaactaaaatgtatctctcttgaatagcatttggggttcaattgaatttgttgtgtttacaacagcaaagcaccgttagcctggacagttgcttatggcatcgatagggttggataatattctgggatttgttgcagcagaattcctctatctgatgatcagcagttgaacataaacttcataattatagtaaaatttaggaaaaactatgagtgtgaagagtatgaactgattgggtagattaggcagagtgcattatgggcaagacaaaggttttcgatattaacttcttttaaaataaactttttattttcaaacagtttcagttttacagaaaaaatgtgaagctagtacagagaggtctcatttaccccacacccagtttctcctgttattagcatctcacattaatatgtggtatatttgttacaattaataaaacacattgatatgttaatattattaaaaaaaaaaaaaaa

SEQ ID NO: 277722 - DNA, 1080 bp, Artificial Sequence
  derived and/or modified sequence
atggtagacatggacaaactcatcaataatctggaggttcagctaaacagtgaggggggctccatgcaggtttttaaacaggtgacagcgtccgtcaggaaccgggacccaccagaaatagagtaccgatcaaatatgacatctcctacacttctggatgctaaccctatggagaaccctgcattatttaacgatataaaaattgagccccccgaggagctgcttgccagcgacttcagtttgccacaggtcgaaccggtggatttgagcttccacaagcctaaagcgccccttcagcccgctagcatgctgcaagcacctatacgaccccccaaacctcagtcgtctccccagacactcgtggtgtcgacttccaccagcgacatgagcacatcagcaaatatcccaacagtgctgacaccgggcagcgtactaactagctctcagtccactggatcccagcagatcttacatgtaatccacacaataccctctgtgagcctgcctaacaagatgggaggccttaagaccatcccagtggttgtgcagagccttcctatggtctataccaccctgccagccgacgggggccccgccgccatcaccgtgcctcttatcggtggtgatggaaaaaatgcagggtccgtcaaggtggaccctacaagtatgtcccctctcgaaatcccatccgactcagaagagagcactattgaaagcggaagtagtgccctgcagtccctccaggggctgcaacaggagccggctgcgatggcccagatgcaaggcgaggagagtctggacctgaaaaggcgtcgcatccatcagtgcgacttcgccggatgttccaaagtgtatacgaaatcctctcacctgaaagcacatcggagaattcataccggggaaaagccttacaaatgtacttgggacgggtgctcttggaagtttgctagatccgatgagctcactcgacacttccgtaagcacactggtatcaagccctttcgatgcaccgactgtaacaggagtttttccaggagcgaccacctgtcgctgcatcgccgccggcacgacacaatgtag

SEQ ID NO: 277723 - DNA, 1543 bp, Artificial Sequence
  derived and/or modified sequence
cccctgatttttgggttggatgcttgagagctttgtttcccttgttccgagagtggcccagctgggtctgaatcgactccctcccctttcgaccccctcctcattttccagcccggagaaataggggagtgggggcccaagaacgagaagacgagaacgcgtcgccctgcgctatgtcagaatggggcgggtgtgaggggaacagctctcttgcgatcagctcaggagtatgagcctcccggaggacggcatgagttctggacacttcaggagtcctcagctagtgacatggtcgatatggataaactcataaacaacttggaggtccaacttaattcagaaggtggctcaatgcaggtattcaagcaggtcactgcttctgttcggaacagagatccccctgagatagaatacagaagtaatatgacttctccaacactcctggatgccaaccccatggagaacccagcactgtttaatgacatcaagattgagcccccagaagaacttttggctagtgatttcagcctgccccaagtggaaccagttgacctctcctttcacaagcccaaggctcctctccagcctgctagcatgctacaagctccaatacgtccccccaagccacagtcttctccccagacccttgtggtgtccacgtcaacatctgacatgagcacttcagcaaacattcctactgttctgaccccaggctctgtcctgacctcctctcagagcactggtagccagcagatcttacatgtcattcacactatcccctcagtcagtctgccaaataagatgggtggcctgaagaccatcccagtggtagtgcagtctctgcccatggtgtatactactttgcctgcagatgggggccctgcagccattacagtcccactcattggaggagatggtaaaaatgctggatcagtgaaagttgaccccacctccatgtctccactggaaattccaagtgacagtgaggagagtacaattgagagtggatcctcagccttgcagagtctgcagggactacagcaagaaccagcagcaatggcccaaatgcagggagaagagtcgcttgacttgaagagaagacggattcaccaatgtgactttgcaggatgcagcaaagtgtacaccaaaagctctcacctgaaagctcaccgcagaatccatacaggagagaagccttataaatgcacctgggatggctgctcctggaaatttgctcgctcagatgagctcactcgccatttccgcaagcacacaggcatcaagccttttcggtgcacagactgcaaccgcagcttttctcgttctgaccacctgtccctgcatcgccgtcgccatgacaccatgtgagccgcacaggtcacactagagaagctgcgctggtatctttcctggtcgtgtgctgaggttgggacaattttttcctctttgacttcagcttgcatatggggttgaagcagcccactgagccaagttgaggagactggaggaaaagagagctggtctcccgtggggctcttcatat

SEQ ID NO: 277724 - DNA, 1080 bp, Artificial Sequence
  derived and/or modified sequence
atggtggacatggacaagctgatcaacaacctggaggtgcagctgaacagcgagggcggctccatgcaggtgttcaagcaggtgacagcctctgtgaggaacagagatcctcctgagattgagtaccgcagcaacatgaccagccccaccctgctggatgccaaccccatggagaacccagccctcttcaatgacatcaagattgagcccccagaggagctgctggccagtgacttcagcctgccccaggtggagcctgtggacctgtccttccacaagcccaaggcccccctgcagcctgcctccatgctgcaggcccccatccggccccccaagccccagagcagcccccagaccctggtggtgtccaccagcaccagtgacatgagcaccagcgccaacatccccaccgtgctgaccccaggctctgtgctgaccagcagccagagcacaggcagccagcagatcctgcacgtgatccacaccatccccagcgtgtccctgcccaacaagatgggcggcctgaagaccatccctgtggtggtgcagagcctgcccatggtgtacaccaccctgcctgcagatggcggccctgctgccatcaccgtgcccctgattggaggagatggcaagaatgccggctctgtgaaggtggaccccacctccatgagccccctggagatccccagcgacagcgaggagagcaccattgaaagtggcagcagcgccctgcagagcctgcagggcctgcagcaggagcctgctgccatggcccagatgcagggcgaggagagcctggacctgaagagaagacgcatccaccagtgtgactttgctggctgcagcaaggtgtacaccaagagcagccacctgaaggcccaccggcgcatccacactggagagaagccctacaagtgcacctgggatggctgctcctggaagtttgcccggagtgatgagctgaccaggcacttcaggaagcacacaggcatcaagcccttccgctgcacagactgcaacagaagcttcagcagaagtgaccacctgagcctgcacagaagaagacatgacaccatgtag

SEQ ID NO: 277725 - DNA, 1080 bp, Artificial Sequence
  derived and/or modified sequence
atggtggacatggacaagctgatcaacaacctggaggtgcagctgaactcggaggggggttcgatgcaggtatttaagcaagtgacagcgtccgtgagaaatcgcgatcccccagagatcgaataccgatccaacatgacatcacctacattactggacgctaatccgatggagaatccggctttgtttaacgacatcaaaatcgaaccaccggaagaactccttgcgtcagacttctcgctgccccaagtggagccggttgatttgtcgttccacaagcctaaggctcctctccagcctgcctcaatgcttcaggcaccaattaggccgcccaaaccccaatcaagcccccaaactctggtggtgtcaacaagcacaagcgacatgtccacttccgctaacatccccaccgtactcacacctggttctgtcctgacttcctcacaatcaacgggttcccaacagattctgcatgtgatccacactatcccttcagttagcctcccaaacaaaatgggcggcctgaaaacgatcccggttgtggtgcagtctttaccaatggtgtatacaaccctgcctgcagacggagggcctgcagccataaccgtgcctctcatcgggggcgacgggaagaacgctggatccgtgaaggtagacccgactagcatgagtcctctagagatcccatccgactccgaggagagcacgatagaatccggcagctccgccctgcagagtttacagggtctgcagcaggagcctgctgccatggcccagatgcagggtgaggagtcacttgacctgaagagacggagaattcatcagtgcgacttcgcaggttgcagcaaggtttacacgaaaagtagtcatttaaaggcccatcgaaggatccacacaggagagaaaccctataaatgtacctgggatggctgctcctggaagtttgccagaagcgatgaactgaccagacacttccgcaagcatactggaataaagcctttcaggtgtaccgattgtaacaggtctttctctagaagtgaccacctgagccttcacagacgacggcatgatacgatgtag

SEQ ID NO: 277726 - DNA, 1080 bp, Artificial Sequence
  derived and/or modified sequence
atggtcgacatggacaaactaattaacaacctggaggtccagctgaacagcgagggcggtagcatgcaggtgttcaaacaggtcaccgcttcggtgaggaatagggatccacccgagatagaatacagatcaaatatgacgtctccaacactcctagatgccaatcccatggagaacccggctctgtttaacgacataaagatcgagccccctgaagagctgctggcatccgacttttcactgccccaggtcgagcctgtagatctctcttttcacaagccaaaggcccctctgcagccagccagcatgctgcaagctcctatccgtccccctaagccacagtcatcacctcagactttggtagtgagcacatccaccagtgatatgagcacctcagcaaatattccaacggtcttaactccaggctctgttctcaccagttctcaaagcaccgggtcccagcagattttacatgtcatccacaccattccctctgttagcctacctaataagatgggtggactcaagacaatccccgttgtggtgcagagcctgccaatggtatacacaacactcccagctgatggtggccctgccgcaattacggtacctttgataggtggtgatggaaagaatgccggatccgtgaaagtcgatccaaccagcatgagcccactcgagatcccttctgactccgaggaaagcacaatagaatccggcagtagtgcactccagagtttgcagggtcttcagcaggagcctgcagcaatggcacaaatgcaaggggaggagtcattggacctgaagcggagacggattcatcaatgtgacttcgcgggatgctccaaggtgtatacaaaaagtagtcacctgaaggcgcacaggcggatacacaccggggaaaaaccttacaagtgcacctgggacggttgttcatggaagttcgccaggtcagacgagctaacaagacactttcgcaagcatacaggaattaaaccttttcgttgcacggattgcaacaggtcattttcacggtcggaccacctgtcactgcatagaagaagacacgacaccatgtag

SEQ ID NO: 277727 - DNA, 1080 bp, Artificial Sequence
  derived and/or modified sequence
atggtggacatggacaagctgatcaacaacctggaggtgcagctgaacagcgagggcggcagcatgcaggtgttcaagcaggtgaccgccagcgtgagaaacagagacccccccgagatcgagtacagaagcaacatgaccagccccaccctgctggacgccaaccccatggagaaccccgccctgttcaacgacatcaagatcgagccccccgaggagctgctggccagcgacttcagcctgccccaggtggagcccgtggacctgagcttccacaagcccaaggcccccctgcagcccgccagcatgctgcaggcccccatcagaccccccaagccccagagcagcccccagaccctggtggtgagcaccagcaccagcgacatgagcaccagcgccaacatccccaccgtgctgacccccggcagcgtgctgaccagcagccagagcaccggcagccagcagatcctgcacgtgatccacaccatccccagcgtgagcctgcccaacaagatgggcggcctgaagaccatccccgtggtggtgcagagcctgcccatggtgtacaccaccctgcccgccgacggcggccccgccgccatcaccgtgcccctgatcggcggcgacggcaagaacgccggcagcgtgaaggtggaccccaccagcatgagccccctggagatccccagcgacagcgaggagagcaccatcgagagcggcagcagcgccctgcagagcctgcagggcctgcagcaggagcccgccgccatggcccagatgcagggcgaggagagcctggacctgaagagaagaagaatccaccagtgcgacttcgccggctgcagcaaggtgtacaccaagagcagccacctgaaggcccacagaagaatccacaccggcgagaagccctacaagtgcacctgggacggctgcagctggaagttcgccagaagcgacgagctgaccagacacttcagaaagcacaccggcatcaagcccttcagatgcaccgactgcaacagaagcttcagcagaagcgaccacctgagcctgcacagaagaagacacgacaccatgtag

SEQ ID NO: 277728 - DNA, 1764 bp, Artificial Sequence
  derived and/or modified sequence
atggtgaccgccgcaatgctgctccagtgttgccccgtgcttgctaggggcccaaccagtctcctcggaaaagtggtcaagactcaccagtttttgttcgggattggtaggtgcccgatcctggcaacacagggacccaactgttcccagatccatttgaaagcgaccaaggcaggcggcgatagcccctcttgggccaaaggccactgcccgttcatgttgagtgaactccaggacggaaagagcaagattgttcagaaggctgctccggaagtacaggaggacgtcaaagccttcaagacggatttgccatcctctttggtctctgtatcgttgcggaagcctttcagtgggccacaggaacaggaacagataagtggcaaagtgactcacctcatccaaaataatatgccaggcaattacgtcttctcctacgatcagttcttccgcgacaaaattatggaaaaaaagcaggaccatacctatcgggtgttcaagaccgtgaacagatgggctgacgcgtatccatttgctcaacatttctctgaggctagcgtcgcatctaaagacgtaagcgtctggtgttccaatgattacctaggcatgagccggcaccctcaagtgcttcaggctacccaagagacccttcaacggcacggtgcaggagctggtggcacccggaacatttccggtacttcaaagttccacgtggaactggagcaggagctcgctgagctccatcagaaagatagcgctctgctgttcagctcttgcttcgtggcaaacgattctacgctgtttacactggccaagatcctcccaggctgtgaaatctacagcgacgcaggtaaccacgcaagcatgattcaaggcatcagaaacagtggggctgctaagttcgtgtttaggcataatgatcctgaccatctgaagaagctcctggaaaaatccaatccaaagattcccaagattgtagcattcgagactgtgcattccatggacggcgccatctgcccccttgaggaattgtgcgacgtctctcaccaatatggtgcactaacctttgtggacgaggttcatgcagtgggcctgtatggaagccgaggagcgggcattggcgagcgtgatgggatcatgcacaaaatcgatataatctccggtacacttggcaaggccttcggctgcgttggtgggtatattgcttccacgcgagatcttgtcgacatggttagatcttacgccgcgggtttcatcttcacaaccagcctgccacccatggtcctctctggggccctggaaagtgttcgactgttgaaaggtgaagaaggccaagccctgcgcagagcccaccagcgaaacgtaaagcacatgagacaactcctgatggatagagggctgcccgtgattccctgtccttcccacatcattcccattcgagtcggaaatgctgccttaaacagcaaactgtgcgacctgctgttatccaaacacgggatttacgttcaagctatcaactaccccacagttcctcgcggggaagagctgttaaggcttgctccatcaccgcatcactccccacagatgatggaagatttcgtggagaagttgttactcgcttggaccgctgtaggcctccctctgcaggatgtaagtgtcgctgcctgtaatttctgcaggaggccagtacatttcgaactgatgtccgagtgggaacggagttattttggcaatatgggcccacaatacgtcacaacctacgcatag

SEQ ID NO: 277729 - DNA, 1764 bp, Artificial Sequence
  derived and/or modified sequence
atggtgacagctgccatgctgctgcagtgctgccctgtgctggcccggggccccaccagcctgctgggcaaggtggtgaagacccaccagttcctgtttggaattggccgctgccccatcctggccacccagggccccaactgcagccagatccacctgaaggccaccaaggccggcggggacagccccagctgggccaagggccactgccccttcatgctgtctgagctgcaggacggcaagagcaagatcgtgcagaaggccgcccctgaggtgcaggaggatgtgaaggccttcaagacagacctgcccagcagcctggtgtctgtgtccctgaggaagcccttcagcggcccccaggagcaggagcagatcagcggcaaggtgacccacctgatccagaacaacatgcctggcaactacgtgttctcctatgaccagttcttccgggacaagatcatggagaagaagcaggaccacacctacagagtcttcaagacagtgaaccgctgggcagatgcctacccctttgcccagcacttcagcgaggcctctgtggccagcaaggatgtgtctgtgtggtgcagcaatgactacctgggcatgagccgccacccccaggtgctgcaggccacccaggagaccctgcagagacatggagctggagctgggggcaccaggaacatcagcggcaccagcaagttccacgtggagctggagcaggagctggccgagctgcaccagaaggacagcgccctgctcttcagcagctgctttgtggccaatgacagcaccctcttcaccctggccaagatcctgcccggctgtgagatctacagtgatgctggcaaccacgcctccatgatccagggcatcagaaattctggagctgccaagtttgtgttccgccacaatgaccctgaccacctgaagaagctgctggagaagagcaaccccaagatccccaagatcgtggcctttgaaacagtgcacagcatggatggagccatctgccccctggaggagctgtgtgatgtgagccaccagtacggggccctgacctttgtggatgaggtgcatgctgtgggcctgtatggcagcagaggagctggcatcggggagagagatggcatcatgcacaagattgacatcatcagcggcaccctgggcaaggccttcggctgtgtgggcggctacatcgccagcacccgggacctggtggacatggtgcgctcctatgctgctggcttcatcttcaccaccagcctgccccccatggtgctgagcggggccctggagagcgtgcggctgctgaagggggaggagggccaggccctgcggcgggcccaccagagaaatgtgaagcacatgaggcagctgctgatggaccggggcctgcctgtgatcccctgccccagccacatcatccccatccgggtgggcaatgctgccctgaacagcaagctgtgtgacctgctgctgagcaagcacggcatctacgtgcaggccatcaactaccccaccgtgcccagaggagaggagctgctgcggctggcccccagcccccaccacagcccccagatgatggaggactttgtggagaagctgctgctggcctggacagctgtgggcctgcccctgcaggatgtgtctgtggccgcctgcaacttctgcagaagacctgtgcactttgagctgatgtctgagtgggagaggagctactttggaaacatgggcccccagtatgtgaccacctacgcctag

SEQ ID NO: 277730 - DNA, 2027 bp, Artificial Sequence
  derived and/or modified sequence
aatgcagggccaggccggcagaaggcagggtgggtggggctgagtcagaggagaagggataaatgccaggtcctaacccaagtacccacctgtcattcgttcgtcctcagtgcagggcaacaggactttaggttcaagatggtgactgcagccatgctgctacagtgctgcccagtgcttgcccggggccccacaagcctcctaggcaaggtggttaagactcaccagttcctgtttggtattggacgctgtcccatcctggctacccaaggaccaaactgttctcaaatccaccttaaggcaacaaaggctggaggagattctccatcttgggcgaagggccactgtcccttcatgctgtcggaactccaggatgggaagagcaagattgtgcagaaggcagccccagaagtccaggaagatgtgaaggctttcaagacagatctgcctagctccctggtctcagtcagcctaaggaagccattttccggtccccaggagcaggagcagatctctgggaaggtcacacacctgattcagaacaatatgcctggaaactatgtcttcagttatgaccagtttttcagggacaagatcatggagaagaaacaggatcacacctaccgtgtgttcaagactgtgaaccgctgggctgatgcatatccctttgcccaacatttctctgaggcatctgtggcctcaaaggatgtgtccgtctggtgtagtaatgattacctgggcatgagccgacaccctcaggtcttgcaagccacacaggagaccctgcagcgtcatggtgctggagctggtggcacccgcaacatctcaggcaccagtaagtttcatgtggagcttgagcaggagctggctgagctgcaccagaaggactcagccctgctcttctcctcctgctttgttgccaatgactctactctcttcaccttggccaagatcctgccagggtgcgagatttactcagacgcaggcaaccatgcttccatgatccaaggtatccgtaacagtggagcagccaagtttgtcttcaggcacaatgaccctgaccacctaaagaaacttctagagaagtctaaccctaagatacccaaaattgtggcctttgagactgtccactccatggatggtgccatctgtcccctcgaggagttgtgtgatgtgtcccaccagtatggggccctgaccttcgtggatgaggtccatgctgtaggactgtatgggtcccggggcgctgggattggggagcgtgatggaattatgcataagattgacatcatctctggaactcttggcaaggcctttggctgtgtgggcggctacattgccagcacccgtgacttggtggacatggtgcgctcctatgctgcaggcttcatctttaccacttctctgccccccatggtgctctctggagctctagaatctgtgcggctgctcaagggagaggagggccaagccctgaggcgagcccaccagcgcaatgtcaagcacatgcgccagctactcatggacaggggccttcctgtcatcccctgccccagccacatcatccccatccgggtgggcaatgcagcactcaacagcaagctctgtgatctcctgctctccaagcatggcatctatgtgcaggccatcaactacccaactgtcccccggggtgaagagctcctgcgcttggcaccctccccccaccacagccctcagatgatggaagattttgtggagaagctgctgctggcttggactgcggtggggctgcccctccaggatgtgtctgtggctgcctgcaatttctgtcgccgtcctgtacactttgagctcatgagtgagtgggaacgttcctacttcgggaacatggggccccagtatgtcaccacctatgcctgagaagccagctgcctaggattcacaccccacctgcgcttcacttgggtccaggcctactcctgtcttctgctttgttgtgtgcctctagctgaattgagcctaaaaataaagcacaaaccacagca

SEQ ID NO: 277731 - DNA, 1764 bp, Artificial Sequence
  derived and/or modified sequence
atggtgaccgccgccatgctgctgcagtgctgccccgtgctggcccgcggaccaaccagcctactgggaaaggttgtgaagacacatcagttcttgttcggaatcgggcgctgccctatcctggccacgcagggccccaactgctctcaaatccacctgaaagctacgaaagccggcggggactcaccttcgtgggcaaagggccactgtccatttatgttgtccgaactccaggatggcaagtccaagatcgtccagaaagccgcacccgaagtccaggaggacgtgaaggccttcaagaccgacctgccttcaagcctggtctctgtttccctgaggaaaccattctcaggccctcaggaacaagaacagatttcgggcaaggttactcacctgatccagaacaatatgccaggcaactacgtcttctcctacgaccagttttttcgagacaagatcatggagaaaaagcaggaccatacttatcgcgtcttcaaaaccgttaatcggtgggctgatgcttatccttttgcacagcacttctccgaggctagtgtggccagcaaggatgtgtcagtgtggtgctcaaacgactatctgggtatgagtaggcatccgcaagtacttcaagctacccaggagacactgcagaggcatggagcaggtgccggaggcacacggaacatttctggcactagcaaatttcacgtcgagctcgaacaggaattggccgagctgcatcaaaaagacagcgcgctgctcttttcctcttgcttcgttgctaacgactctacccttttcaccctggccaagattctgcccggctgtgaaatctacagcgacgcggggaatcacgcctcaatgattcaggggatcagaaattctggagcagctaagttcgttttccgtcataacgaccctgaccatctcaaaaagctgctagagaagtcaaatcctaaaatcccaaagattgtagccttcgaaacagtccatagtatggatggcgccatttgccccctggaggaattgtgcgacgtgtcccatcaatacggtgcgctgaccttcgtggacgaggtacacgctgtgggactgtacggatcgcgcggcgcgggtattggagagcgcgacggcatcatgcacaaaatagatattataagtggtacccttggcaaggcgtttggttgtgtcggcgggtacattgcctctaccagagatcttgtggacatggtgcgcagctacgccgcgggattcatctttacgacctctcttcctccgatggttctgtccggcgctctcgagtcagtgagactgctaaagggcgaggagggacaggctctgcgccgcgctcatcaaaggaatgtgaaacatatgcgccagttgctaatggacagaggcctgccggttatcccatgcccatcccatattatccccatcagggtggggaacgccgctctaaattctaaactctgcgacttgctgctgagtaagcatgggatctacgtgcaggccatcaattatcctaccgtacctagaggcgaggaattgctgagactggcaccgtccccccaccactcaccccagatgatggaagactttgtagaaaaattgctgcttgcttggaccgctgtgggtctgccgctgcaagatgtcagcgtggctgcatgcaacttctgtagacgacccgttcactttgagctgatgtccgaatgggagcgctcttactttggcaacatgggcccccagtacgtgactacctacgcgtag

SEQ ID NO: 277732 - DNA, 1764 bp, Artificial Sequence
  derived and/or modified sequence
atggttactgccgctatgctgctgcagtgctgccccgtgctggcacggggtccaacaagtttactgggcaaggtggtgaaaacccaccagtttctttttgggatcggccgttgtcctattctcgctacccagggccctaactgctcccagatccaccttaaagccactaaagcagggggagactcacctagctgggccaagggccattgtccctttatgctgagtgagttgcaagacgggaaaagtaagatcgtccagaaggctgcaccggaggtgcaggaagatgtgaaagcctttaagactgacctgccttcatctttggtgtctgtctcattacggaaaccattttctggacctcaagagcaagaacagatttctggaaaggtcacacatcttattcagaataacatgccagggaattatgtgttctcttacgaccagttttttagagataagattatggagaaaaaacaagatcacacttatcgagtttttaaaaccgtaaataggtgggcagatgcctaccccttcgcccagcatttttccgaggcctccgtggcgtccaaagacgtgagcgtatggtgtagcaatgattacctcggaatgtctcgacaccctcaggtgctgcaagctacacaagaaacgctgcaacggcacggcgctggtgctggcggaacccgcaacatctccggcaccagtaagttccatgtagagctggagcaggagctggctgagctgcaccagaaggattcggctctgctctttagttcatgcttcgtggctaatgattctacgcttttcacactcgctaagatcttgcctggctgcgagatctacagcgatgcagggaaccatgcctccatgatccagggcatccgaaacagcggagcggcaaaattcgtttttaggcacaacgaccctgatcatttgaaaaagttgcttgaaaagtctaaccctaaaatcccgaaaatcgtagcattcgaaaccgtgcacagcatggatggcgctatttgccctctcgaggaactatgtgacgtttcgcaccagtatggagcccttacattcgttgacgaggtccacgccgtcgggctgtacggatcacgcggagccggaataggggagagggatgggatcatgcacaagatcgatatcattagcggcacgctgggcaaagccttcggttgtgtaggcggttacattgcgtctacgagggatctcgtggacatggtccgtagttatgctgcaggctttatctttaccactagtctacctcccatggtgctgagcggggcactggagtcggtgcggttgcttaaaggagaggaaggccaagcgctcaggagagcccaccaacgtaatgtcaaacacatgagacagctgttgatggatcgagggctgcccgttattccatgtcctagccatatcatacctattcgcgtgggtaacgctgctcttaactccaagctgtgcgatcttcttctgtccaagcatggtatctacgttcaggccataaactaccctacagtcccacgtggggaagagttgcttcggctggccccaagcccccatcactctcctcaaatgatggaagactttgtggaaaaactacttctcgcttggaccgcggtcggactccccttgcaggacgtgtcagtggccgcatgtaatttctgccggagacctgttcattttgagctgatgtcagagtgggagcgatcctactttggcaacatggggccacaatacgtgacgacctatgcttag

SEQ ID NO: 277733 - DNA, 1764 bp, Artificial Sequence
  derived and/or modified sequence
atggtgaccgccgccatgctgctgcagtgctgccccgtgctggccagaggccccaccagcctgctgggcaaggtggtgaagacccaccagttcctgttcggcatcggcagatgccccatcctggccacccagggccccaactgcagccagatccacctgaaggccaccaaggccggcggcgacagccccagctgggccaagggccactgccccttcatgctgagcgagctgcaggacggcaagagcaagatcgtgcagaaggccgcccccgaggtgcaggaggacgtgaaggccttcaagaccgacctgcccagcagcctggtgagcgtgagcctgagaaagcccttcagcggcccccaggagcaggagcagatcagcggcaaggtgacccacctgatccagaacaacatgcccggcaactacgtgttcagctacgaccagttcttcagagacaagatcatggagaagaagcaggaccacacctacagagtgttcaagaccgtgaacagatgggccgacgcctaccccttcgcccagcacttcagcgaggccagcgtggccagcaaggacgtgagcgtgtggtgcagcaacgactacctgggcatgagcagacacccccaggtgctgcaggccacccaggagaccctgcagagacacggcgccggcgccggcggcaccagaaacatcagcggcaccagcaagttccacgtggagctggagcaggagctggccgagctgcaccagaaggacagcgccctgctgttcagcagctgcttcgtggccaacgacagcaccctgttcaccctggccaagatcctgcccggctgcgagatctacagcgacgccggcaaccacgccagcatgatccagggcatcagaaacagcggcgccgccaagttcgtgttcagacacaacgaccccgaccacctgaagaagctgctggagaagagcaaccccaagatccccaagatcgtggccttcgagaccgtgcacagcatggacggcgccatctgccccctggaggagctgtgcgacgtgagccaccagtacggcgccctgaccttcgtggacgaggtgcacgccgtgggcctgtacggcagcagaggcgccggcatcggcgagagagacggcatcatgcacaagatcgacatcatcagcggcaccctgggcaaggccttcggctgcgtgggcggctacatcgccagcaccagagacctggtggacatggtgagaagctacgccgccggcttcatcttcaccaccagcctgccccccatggtgctgagcggcgccctggagagcgtgagactgctgaagggcgaggagggccaggccctgagaagagcccaccagagaaacgtgaagcacatgagacagctgctgatggacagaggcctgcccgtgatcccctgccccagccacatcatccccatcagagtgggcaacgccgccctgaacagcaagctgtgcgacctgctgctgagcaagcacggcatctacgtgcaggccatcaactaccccaccgtgcccagaggcgaggagctgctgagactggcccccagcccccaccacagcccccagatgatggaggacttcgtggagaagctgctgctggcctggaccgccgtgggcctgcccctgcaggacgtgagcgtggccgcctgcaacttctgcagaagacccgtgcacttcgagctgatgagcgagtgggagagaagctacttcggcaacatgggcccccagtacgtgaccacctacgcctag

SEQ ID NO: 277734 - protein, 303 aa, Artificial Sequence
  derived and/or modified sequence
MDTYSHQALKTGSFQKAKFNITGACLNDSDDDSPDLDLDGNESPLALLMSNGSTKRVKSLSKSRRTKIAKKVDKARLMAEQVMEDEFDLDSDDELQIDERLGKEKATLIIRPKFPRKLPRASLALTPTEFVNQEKLSLTLRRTIQQMRTWWKGLKASLGMVVALVAFLICSRPAGRWGDLTMLPSPRPQLLPALRRPSRACCAWPTCSPHRPHRLPLACRPGGLGDRIEAVGAPAVGWAQCLTVLLPSAPQGSGPSSGQHTGEPRARRRRRTPVWMNRTAWERASRMQSISILHWSLMMMTLL

SEQ ID NO: 277735 - protein, 148 aa, Artificial Sequence
  derived and/or modified sequence
MNRSRAIVQRGRVLPPPAPLDTTNLAGRRTLQGRAKMASVPVYCLCRLPYDVTRFMIECDMCQDWFHGSCVGVEEEKAADIDLYHCPNCEVLHGPSIMKKRRGSSKGHDTHKGKPVKTGSPTFVRELRSRTFDSSDEVILKPTGNQLT

SEQ ID NO: 277736 - protein, 953 aa, Artificial Sequence
  derived and/or modified sequence
IVQRGRVLPPPAPLDTTNLAGRRTLQGRAKMASVPVYCLCRLPYDVTRFMIECDMCQDWFHGSCVGVEEEKAADIDLYHCPNCEVLHGPSIMKKRRGSSKGHDTHKGKPVKTGSPTFVRELRSRTFDSSDEVILKPTGNQLTVEFLEENSFSVPILVLKKDGLGMTLPSPSFTVRDVEHYVGSDKEIDVIDVTRQADCKMKLGDFVKYYYSGKREKVLNVISLEFSDTRLSNLVETPKIVRKLSWVENLWPEECVFERPNVQKYCLMSVRDSYTDFHIDFGGTSVWYHVLKGEKIFYLIRPTNANLTLFECWSSSSNQNEMFFGDQVDKCYKCSVKQGQTLFIPTGWIHAVLTPVDCLAFGGNFLHSLNIEMQLKAYEIEKRLSTADLFRFPNFETICWYVGKHILDIFRGLRENRRHPASYLVHGGKALNLAFRAWTRKEALPDHEDEIPETVRTVQLIKDLAREIRLVEFNITGACLNDSDDDSPDLDLDGNESPLALLMSNGSTKRVKSLSKSRRTKIAKKVDKARLMAEQVMEDEFDLDSDDELQIDERLGKEKATLIIRPKFPRKLPRAKPCSDPNRVREPGEVEFDIEEDYTTDEDMVEGVEGKLGNGSGAGGILDLLKASRQVGGPDYAALTEAPASPSTQEAIQGMLCMANLQSSSSSPATSSLQAWWTGGQDRSSGSSSSGLGTVSNSPASQRTPGKRPIKRPAYWRTESEEEEENASLDEQDSLGACFKDAEYIYPSLESDDDDPALKSRPKKKKNSDDAPWSPKARVTPTLPKQDRPVREGTRVASIETGLAAAAAKLAQQELQKAQKKKYIKKKPLLKEVEQPRPQDSNLSLTVPAPTVAATPQLVTSSSPLPPPEPKQEALSGSLADHEYTARPNAFGMAQANRSTTPMAPGVFLTQRRPSVGSQSNQAGQGKRPKKGLATAKQRLGRILKIHRNGKLLL

SEQ ID NO: 277737 - DNA, 2862 bp, Artificial Sequence
  derived and/or modified sequence
atagtgcagagaggccgggtgttacctccacccgcccccctcgatactactaacctggcaggccgcaggactctgcaaggccgagcaaaaatggcttccgtgcccgtgtactgtctgtgccggctcccgtatgacgtcacaagatttatgatagagtgcgatatgtgccaggattggttccacggctcgtgtgttggtgtggaggaggagaaagctgctgatatagacctgtaccattgccctaattgcgaagttctgcacgggccatcgattatgaagaagcggcgaggatcgtccaaaggacacgacactcataagggcaagcctgtgaagacaggtagtccaaccttcgtccgcgaattaagatcgagaacgttcgactcttctgatgaggtaatactgaagcccaccgggaaccagctcacggtggagtttctggaggagaactcttttagcgtccccatcttggtacttaagaaagacggcctgggcatgaccctgccaagtccctccttcaccgtccgcgacgttgagcactacgttggttcagacaaagagatcgatgtgatcgatgtcacacgacaggctgactgcaaaatgaaactcggcgacttcgtgaagtattactactcaggcaagagggaaaaggtgctcaatgtgattagcctggaattttctgatactcgcctatcaaaccttgtagagaccccgaagattgtccgcaaactttcctgggtcgagaacctctggccagaagagtgtgtgtttgagcgtccaaacgtgcaaaaatattgccttatgtccgtgcgggacagctacacagacttccatatcgatttcggaggaacttcagtctggtaccacgtgctaaagggggaaaagattttttatctgatccgaccaaccaacgcaaacctgacgttattcgagtgctggtccagctcatcaaatcagaatgagatgttttttggggaccaggtggataaatgttacaaatgctcagttaagcaggggcaaactctctttattccaactggctggatccatgccgtattgacgcccgtcgattgcttggcctttggaggcaatttcctgcatagtcttaacatagaaatgcagctcaaggcttacgagattgaaaagcgtctgagtactgcagacctgttccgcttccccaatttcgaaaccatatgctggtatgtcggtaaacacatcctagatatctttagggggctgcgggaaaacaggcgccatccggctagctacctggtccatggagggaaagcccttaacttggcctttcgggcctggactagaaaggaggccctgccagatcacgaggacgaaatccccgagacagtaaggactgtacaattgataaaagacctggcaagagagattagactggtggaattcaacattaccggagcatgcctcaatgattccgatgacgacagtccagacttagacttggacggcaacgagagtccgctcgctctactaatgtctaacggctccacaaagcgggttaagtccctgtcgaaatcacgtagaacaaagattgctaaaaaagtggacaaggccaggctgatggccgagcaagtcatggaagacgagttcgacttggactctgatgacgaactacagatcgacgaaaggctaggcaaggagaaggccacccttatcatccgccccaagtttccgaggaaactcccgagagccaaaccttgttcagatccgaaccgagtacgcgagccaggggaggtggagtttgatatcgaggaggattacaccacagatgaggacatggttgagggagttgagggtaagctcgggaacgggtctggagccggtggcattctggacctgctgaaagcgagcaggcaggtcggaggacctgactacgctgctctgacagaagctcctgcctctccttcgacccaggaagcaatccaaggcatgctgtgtatggcaaacctgcagtcatctagcagctcgcctgcaacctcctcgctgcaggcttggtggaccggtggacaggatcgctcctctgggtcatctagttctggattgggcaccgtttccaactcacccgcctcccaacgcacacctggcaagcgaccaataaagcgccctgcctactggcggaccgaatctgaggaagaagaggagaacgcttccctggacgagcaggactccctgggtgcttgtttcaaggacgcggaatatatttatccctctctagagtccgatgatgacgaccctgcactcaagagcaggcccaaaaaaaagaagaattctgacgatgctccgtggagccccaaggctagagtgacccccacactgccaaaacaggatcgcccggtgcgagagggaacgagggtggcgtcgattgaaacaggcttggctgcagcagcagccaagctggcccaacaggagctgcagaaagcccaaaagaagaaatacatcaagaagaagcccctgcttaaggaagtggagcagcccaggccacaggattccaacctatctctcacagtccccgcccccaccgtggcggctacccctcagctggtaacctccagcagcccgctgccccctcctgaaccgaaacaggaagcactgagtggaagtttagccgaccatgagtatacggcccggccgaatgcgttcggcatggcgcaagcaaatcgtagcactaccccaatggctcccggagttttcctcacccagcgtcgtccttccgttggcagtcagtctaatcaggcaggtcagggaaagcgccctaaaaagggcctggctaccgccaaacaacggttagggcggattctcaagatccatcggaacgggaagctgttactgtag

SEQ ID NO: 277738 - DNA, 2862 bp, Artificial Sequence
  derived and/or modified sequence
attgtgcagaggggccgggtgctgcccccaccagcccccctggacaccaccaacctggccggccgccgcaccctgcagggccgggccaagatggcctctgtgcctgtgtactgcctgtgccgcctgccctatgatgtgacccgcttcatgattgaatgtgacatgtgccaggactggttccacggcagctgtgtgggcgtggaggaggagaaggctgctgacatcgacctgtaccactgccccaactgtgaggtgctgcacggccccagcatcatgaagaagagaagaggcagcagcaagggccatgacacccacaagggcaagcctgtgaagacaggcagccccacctttgtgcgggagctgcggagcaggacctttgacagcagtgatgaggtgatcctgaagcccactggaaaccagctgactgtggagttcctggaggagaacagcttctctgtgcccatcctggtgctgaagaaggatggcctgggcatgaccctgcccagccccagcttcaccgtgagagatgtggagcactacgtgggcagtgacaaggagattgatgtgattgatgtgacccggcaggccgactgcaagatgaagctgggggactttgtgaagtactactacagcggcaagcgggagaaggtgctgaatgtcatcagcctggagttcagtgacacccggctgagcaacctggtggagacccccaagatcgtgaggaagctgtcctgggtggagaacctgtggccagaagaatgtgtgtttgagcggcccaacgtgcagaagtactgcctgatgtctgtgcgggacagctacacagacttccacatcgactttggaggcacctctgtgtggtaccacgtgctgaagggggagaagatcttctacctgatccggcccaccaatgccaacctgaccctgtttgagtgctggagcagcagcagcaaccagaatgagatgttctttggagaccaggtggacaagtgctacaagtgcagcgtgaagcagggccagaccctcttcatccccaccggctggattcatgctgtgctgacccctgtggactgcctggccttcggcggcaacttcctgcacagcctgaacatcgagatgcagctgaaggcctatgaaattgagaagaggctgagcacagctgacctcttccgcttccccaactttgagaccatctgctggtacgtgggcaagcacatcctggacatcttccggggcctgcgggagaacagaagacacccagccagctacctggtgcatggaggcaaggccctgaacctggccttccgggcctggaccaggaaggaggccctgcctgaccatgaagatgagatccctgagaccgtgaggacagtgcagctgatcaaggacctggcccgggagatccggctggtggagttcaacatcactggagcctgcctgaatgacagtgatgatgacagcccagacctggacctggatggaaatgaaagccccctggccctgctgatgagcaatggcagcaccaagagggtgaagagcctgagcaagagcaggaggaccaagatcgccaagaaggtggacaaggcccggctgatggccgagcaggtgatggaggatgaatttgacctggacagtgatgatgagctgcagattgatgagcggctgggcaaggagaaggccaccctcatcatccggcccaagttccccaggaagctgccccgggccaagccctgcagcgaccccaacagagtgcgggagcccggggaggtggagtttgatattgaggaggactacaccacagatgaggacatggtggagggcgtggagggcaagctgggcaatggaagtggagctgggggcatcctggacctgctgaaggccagccggcaggtgggcggccctgactatgctgccctgacagaggccccagccagccccagcacccaggaggccatccagggcatgctgtgcatggccaacctgcagagcagcagcagcagccctgccaccagcagcctgcaggcctggtggacaggaggccaggacaggagcagcggcagcagcagcagcggcctgggcaccgtgagcaacagccctgccagccagaggacccctgggaagaggcccatcaagaggcctgcctactggaggacagaaagtgaggaggaggaggagaatgccagcctggatgagcaggacagcctgggcgcctgcttcaaggatgctgagtacatctaccccagcctggagagtgatgatgatgatcctgccctgaagagccggcccaagaagaagaagaacagtgatgatgccccctggagccccaaggcccgggtgacccccaccctgcccaagcaggacaggcctgtgcgggagggcaccagggtggccagcattgagaccggcctggccgctgctgctgccaagctggcccagcaggagctgcagaaggcccagaagaagaagtacatcaagaagaagcccctgctgaaggaggtggagcagccccggccccaggacagcaacctgagcctgactgtgcctgcccccaccgtggccgccaccccccagctggtgaccagcagcagccccctgcccccacctgagcccaagcaggaggccctgagcggcagcctggccgaccacgagtacacagcccggcccaatgccttcggcatggcccaggccaacagaagcaccacccccatggcccctggggtcttcctgacccagaggcggcccagcgtgggcagccagagcaaccaggccggccagggcaagaggcccaagaagggcctggccacagccaagcagaggctgggccgcatcctgaagatccacagaaatggcaagctgctgctgtag

SEQ ID NO: 277739 - DNA, 2862 bp, Artificial Sequence
  derived and/or modified sequence
atcgtgcagcggggccgggtgctgcccccccccgcccccctggacaccacaaacctggccggccgtcgcactttacaagggagagctaagatggcaagtgttcccgtctattgtctttgcaggttaccctatgatgtgaccagatttatgatagagtgtgatatgtgtcaggactggtttcatggttcctgtgtgggagttgaagaggagaaggccgccgatatagacctgtatcattgcccaaattgcgaggtgctacacggtccttccataatgaaaaagagaaggggtagttctaagggccatgatacgcacaagggtaagccagtcaagactggcagccctactttcgtgagggagcttcgcagtaggaccttcgatagttcagacgaagtaatcctgaaacctactgggaatcaactgactgtggagtttctcgaggaaaatagtttttcggtgccgatcctggtgttaaagaaagatggactgggtatgacactgcccagtcccagcttcacagtgagggacgtggagcactatgtgggaagcgataaggagattgatgtaatagatgtgactagacaggcagattgcaagatgaaactaggcgacttcgtcaagtactattatagcggtaagcgagaaaaagttctgaacgtcatctcccttgaattttccgatactcgtctgtcaaacttggtagaaactcctaagatagtgaggaaactatcttgggtcgaaaatctctggccggaagaatgtgtgtttgagcgccctaacgttcagaagtactgtttgatgagcgtgcgggactcatataccgacttccatattgactttggcggtacttctgtttggtatcacgtgctgaaaggggagaagattttttatttaatccggccgacaaatgccaatcttacccttttcgagtgctggagctcctccagtaatcagaacgagatgttcttcggcgatcaagtcgataagtgctataagtgttccgtgaagcagggtcaaaccctgtttatccctacagggtggatccatgccgtactaactcctgttgactgtctcgctttcgggggcaactttctccattccctgaacatcgagatgcaactgaaggcctacgaaattgagaagcgtctgtcaacagccgacctttttaggttcccgaacttcgaaacaatctgctggtacgtgggcaagcatatactggacatctttcgcggcctgagagagaatcggagacatcccgcttcctatctggtccacgggggaaaggcactgaatctggcatttcgcgcgtggacacggaaggaagccttgcccgatcacgaagatgagatacctgagaccgtgaggacagtgcagctgatcaaggacttagcacgcgaaattcgactagtcgagtttaacattacaggcgcttgccttaacgactctgacgatgattccccggatctggatctagatggcaatgaaagccctctggccctgctaatgagtaacggatccaccaagcgcgtaaagtccctgtcgaagtccaggcggaccaaaatcgccaaaaaggtcgacaaagcaaggcttatggctgaacaagtgatggaagatgaattcgatcttgacagtgacgacgagctgcagattgatgaacggctgggcaaagaaaaggcaactttgataattcggccgaagtttcctcggaagctcccaagggcaaagccttgctctgaccctaatagagtccgggaaccgggcgaggtggaattcgacatcgaggaggattataccaccgacgaggacatggttgagggagttgagggcaaacttggaaatggcagcggggccggcggtatcctcgatctgttaaaagctagcagacaggtaggcggcccagactatgccgctctaaccgaggccccggccagcccgagcactcaagaggcaattcagggtatgctatgcatggccaacctgcagtcttcatcttcttcccctgccaccagtagcctgcaggcttggtggaccggggggcaggatagatctagcggatcgtcctcaagtggtttgggaactgtgagcaatagccctgcttctcagagaacccctggcaagcggcccatcaagcgtccagcttactggcgtacagaaagtgaggaagaagaggaaaacgcgagcctcgacgagcaggacagtctcggcgcatgttttaaggatgctgaatacatatatccgtctttggaatctgacgatgatgaccccgcacttaagagcaggcccaagaaaaagaagaatagcgatgacgcgccatggtcgcctaaggcacgggtgacacccaccctccctaaacaggatcgacctgtgcgcgaaggtactagggtggcgtctattgagaccggcctcgctgccgctgccgccaagctggcccagcaggaactgcaaaaggcccagaaaaagaaatacatcaagaagaaacctcttctgaaagaagtggaacagccccgaccacaggactctaacctgagcctgacggttcccgccccgaccgtcgctgccacgcctcaattggtgacaagttcctctccgcttcctcccccggagcctaaacaggaagctctttcagggtctttagccgatcacgagtacaccgcccgcccgaacgcttttggaatggcacaggctaatcggagcacaacaccaatggccccaggagtattcctgacgcagaggagaccctcagtcggatcacagagcaaccaggcagggcagggaaaaagacctaaaaaaggcttagcgaccgccaagcagcgcctgggacgcatcttgaagatccatagaaatgggaagctcctcctgtag

SEQ ID NO: 277740 - DNA, 4651 bp, Artificial Sequence
  derived and/or modified sequence
gcggccgccagactaggcccaagccgcggtctccagtaggcccgaacggccgggccgaggggaatgttgtggaggaggctgctctgaagcaccgttgagcggctggcgccgcgcgacccagcggggggctcgaggggaaggcgagcgaggttcccggcggtacggggactatcccagaattcgacgcgcgtcgccgtaggggccggaactaccggacgagcctccgctgaggcgcttcgcagtcccggagctagcccggctgccggcgtgtcgctggggctgagctccgcgggcgtggagtccttgcagcccaaagcatgaggaggtccctgtaggattctggactgaagacgttcttgtcaggtttggggcgtgaggaggttcctgtcagttggggaagcgttaagattcctctatcgtccagagaggacgcgtgctgccgcctcccgcccctcttgacacgacgaacctggccggccgcagaacgctccagggccgagcgaagatggcctcggtgccggtgtattgcctctgccggctgccttacgatgtgacccgcttcatgatcgagtgtgacatgtgccaggactggtttcatggcagttgtgttggtgttgaagaggagaaggctgctgacattgacctctaccactgccccaactgtgaagtcttgcatgggccctccattatgaaaaaacgccgtggatcttcaaaggggcatgatacacacaaggggaaaccagtgaagaccgggagccctacgttcgtcagagagctccggagtaggacttttgacagctcagatgaagtgattctgaagcccactggaaatcaactgaccgtggaattcctggaagaaaatagcttcagtgtgcccatcctggtcctgaagaaggatgggttgggcatgacgctgccctcgccatcattcactgtgagggatgttgaacactatgttggttctgacaaagagattgatgtgattgatgtgacccgccaggctgactgcaagatgaagcttggtgattttgtgaaatactattacagcgggaagagggagaaagtcctcaatgtcattagtttggaattctctgataccagactttctaaccttgtggagacaccgaagattgttcgaaagctgtcatgggtcgaaaacttgtggccagaggaatgtgtctttgagagacccaatgtacagaagtactgcctcatgagtgtgcgagatagctatacagactttcacattgactttggtggcacctctgtctggtaccatgtactcaagggtgaaaagatcttctacctgatccgcccaacaaatgccaatctgactctctttgagtgctggagcagttcctctaatcagaatgagatgttctttggggaccaggtggacaagtgctacaagtgttccgtgaagcaaggacagacacttttcattcccacagggtggatccatgctgtgctgacgcctgtggactgccttgcctttggagggaacttcttacacagccttaacatcgagatgcagctcaaagcctatgagattgagaagcggctgagcacagcagacctcttcagattccccaactttgagaccatctgttggtatgtgggaaagcacatcctggacatctttcgcggtttgcgagagaacaggagacaccctgcctcctacctggtccatggtggcaaagccttgaacttggcctttagagcctggacaaggaaagaagctctgccagaccatgaggatgagatcccggagacagtgcgaaccgtacagctcattaaagatctggccagggagatccgcctggtggaattcaacatcactggtgcctgcttgaatgactcagatgacgactcaccagacttggaccttgatggaaatgagagcccattggccctattgatgtctaacggcagtacgaaaagggtgaagagtttatccaaatctcggcgaaccaagatagcaaagaaggtagacaaggctaggctgatggcagaacaggtgatggaagacgaatttgacttggattcagatgatgagctgcagattgacgagagattgggaaaggagaaggcgaccctgataataagaccaaaatttccccggaaattgccccgtgcgaagccttgctctgaccccaaccgagttcgtgaaccaggagaagttgagtttgacattgaggaggactatacaacagatgaggacatggtggaaggggttgaaggcaagcttgggaatggtagtggcgctggtggcattcttgatctgctcaaggccagcaggcaggtggggggacctgactatgctgccctcaccgaggccccagcttctcccagcactcaggaggccatccagggcatgctgtgcatggccaacctgcagtcctcatcgtcctcaccggctacctctagcctgcaggcctggtggactgggggacaggatcgaagcagtgggagctccagcagtgggctgggcacagtgtctaacagtcctgcttcccagcgcaccccagggaagcggcccatcaagcggccagcatactggagaaccgagagcgaggaggaggaggagaacgccagtctggatgaacaggacagcttgggagcgtgcttcaaggatgcagagtatatctatccttcactggagtctgatgatgatgaccctgctttgaaatctcgacccaagaaaaagaagaattcagatgatgctccatggagtcctaaagcccgcgtgaccccaactctgccgaagcaggaccgtcctgtgcgtgaggggacccgggtagcctctattgagacaggtttggctgcagcagctgcaaagctggcccagcaggagctacagaaggcccaaaagaagaaatatatcaagaagaagcctttgctgaaggaggtagaacagcctcgccctcaagactccaatctcagtctgacagtaccagcccccactgtggctgccacaccacaacttgtcacctcctcctcacccctgcctcctcctgagcctaaacaagaggccctgtcaggaagtctcgctgaccatgagtacaccgctcgtcccaatgcctttggcatggcccaggcaaaccgcagcaccacacctatggcccccggtgtcttcttgacccagcggcgcccttcagttggctcccagagcaatcaggcaggacaaggaaagcgtcccaaaaagggcctggccacagcaaagcagagactcggccgtatcctgaaaatccacagaaatggcaaactacttctacgacaggtcatcgttcaagcagaatgcagacaggccattcacgagcccaagttgaagagaagagacgcccatccgtgaaggagcagaccatccatccgatcctccccttcccctgtccttccttcgtggattgtctccattgtccagacagtgcccccacctcccaccgccttgcctcactggcaatctggactcgatggagaacatccccccacctccatttggcactacccaagtggagtgtacccttgccctttccacctgtaccacccactccaacctcaccccagcttgcccaatgcttctggggaatttaatagctaccatgcaggccacagggaatttgtgaggcttcttttgtcatctttgtatctccagtttgtctttcttttctccatagccctgcctctactttccttccttggaatcaggggttcctttagcccatttgctttctctaccttggggaccccaggggccaagcagttctccatctagtcacaccaaaggcaaaaagcctggctacctcccccctagcacgtgagtccctactcccctcccctctgtttctgcccagctttgcttattttggggatttcaaggcagcagagggtagtgaggggagagcaggagaagcctctgtcctgtataggcaactgcctgactatgcggtgactgctgtaaccaagatcaggtccccagcccttttgtccattaacaccccttcttgatctttcaaaggcagctaattgctagcaaatccccccgattccggccttttccctctatttctttgttagaagttttctgtggagctgaaacccagcctctgtttgactgggtttcatttagcttagttgggttcttagagccccctgtttgttgttttgtgttgtttccaatgaaaagcaagtttaccctcagagttatgcttttccaaagaggctgatgtctttgtttttgttttttttaatgtttcaggttctaagtgaagtgagttggggaggggttgggagtgttagtaatcaaggtttagaacaccatgagatagttacccctgatctccagtccctagctgggggctggacagggggaagggagagaggatttctattcacctttaatatatttttacaaaaaaagcaaacaatttaaaaacaagcccaccgcttctgtacatgtctaaatatatttttagaagtgggtaggattgtgaatttctgatgcagggcctttttataaataggttagggtagcatcattcagacttctctgttgtttttgtccctgtctttttcttatgttgtgttactaatgtaatttatattttttttagatcctccctttcctatagagataaaagtgatttatcttggc

SEQ ID NO: 277741 - DNA, 5753 bp, Artificial Sequence
  derived and/or modified sequence
gcggccgccagactaggcccaagccgcggtctccagtaggcccgaacggccgggccgaggggaatgttgtggaggaggctgctctgaagcaccgttgagcggctggcgccgcgcgacccagcggggggctcgaggggaaggcgagcgaggttcccggcggtacggggactatcccagaattcgacgcgcgtcgccgtaggggccggaactaccggacgagcctccgctgaggcgcttcgcagtcccggagctagcccggctgccggcgtgtcgctggggctgagctccgcgggcgtggagtccttgcagcccaaagcatgaggaggtccctgtaggattctggactgaagacgttcttgtcaggtttggggcgtgaggaggttcctgtcagttggggaagcgttaagattcctctatcgtccagagaggacgcgtgctgccgcctcccgcccctcttgacacgacgaacctggccggccgcagaacgctccagggccgagcgaagatggcctcggtgccggtgtattgcctctgccggctgccttacgatgtgacccgcttcatgatcgagtgtgacatgtgccaggactggtttcatggcagttgtgttggtgttgaagaggagaaggctgctgacattgacctctaccactgccccaactgtgaagtcttgcatgggccctccattatgaaaaaacgccgtggatcttcaaaggggcatgatacacacaaggggaaaccagtgaagaccgggagccctacgttcgtcagagagctccggagtaggacttttgacagctcagatgaagtgattctgaagcccactggaaatcaactgaccgtggaattcctggaagaaaatagcttcagtgtgcccatcctggtcctgaagaaggatgggttgggcatgacgctgccctcgccatcattcactgtgagggatgttgaacactatgttggttctgacaaagagattgatgtgattgatgtgacccgccaggctgactgcaagatgaagcttggtgattttgtgaaatactattacagcgggaagagggagaaagtcctcaatgtcattagtttggaattctctgataccagactttctaaccttgtggagacaccgaagattgttcgaaagctgtcatgggtcgaaaacttgtggccagaggaatgtgtctttgagagacccaatgtacagaagtactgcctcatgagtgtgcgagatagctatacagactttcacattgactttggtggcacctctgtctggtaccatgtactcaagggtgaaaagatcttctacctgatccgcccaacaaatgccaatctgactctctttgagtgctggagcagttcctctaatcagaatgagatgttctttggggaccaggtggacaagtgctacaagtgttccgtgaagcaaggacagacacttttcattcccacagggtggatccatgctgtgctgacgcctgtggactgccttgcctttggagggaacttcttacacagccttaacatcgagatgcagctcaaagcctatgagattgagaagcggctgagcacagcagacctcttcagattccccaactttgagaccatctgttggtatgtgggaaagcacatcctggacatctttcgcggtttgcgagagaacaggagacaccctgcctcctacctggtccatggtggcaaagccttgaacttggcctttagagcctggacaaggaaagaagctctgccagaccatgaggatgagatcccggagacagtgcgaaccgtacagctcattaaagatctggccagggagatccgcctggtggaattcaacatcactggtgcctgcttgaatgactcagatgacgactcaccagacttggaccttgatggaaatgagagcccattggccctattgatgtctaacggcagtacgaaaagggtgaagagtttatccaaatctcggcgaaccaagatagcaaagaaggtagacaaggctaggctgatggcagaacaggtgatggaagacgaatttgacttggattcagatgatgagctgcagattgacgagagattgggaaaggagaaggcgaccctgataataagaccaaaatttccccggaaattgccccgtgcgaagccttgctctgaccccaaccgagttcgtgaaccaggagaagttgagtttgacattgaggaggactatacaacagatgaggacatggtggaaggggttgaaggcaagcttgggaatggtagtggcgctggtggcattcttgatctgctcaaggccagcaggcaggtggggggacctgactatgctgccctcaccgaggccccagcttctcccagcactcaggaggccatccagggcatgctgtgcatggccaacctgcagtcctcatcgtcctcaccggctacctctagcctgcaggcctggtggactgggggacaggatcgaagcagtgggagctccagcagtgggctgggcacagtgtctaacagtcctgcttcccagcgcaccccagggaagcggcccatcaagcggccagcatactggagaaccgagagcgaggaggaggaggagaacgccagtctggatgaacaggacagcttgggagcgtgcttcaaggatgcagagtatatctatccttcactggagtctgatgatgatgaccctgctttgaaatctcgacccaagaaaaagaagaattcagatgatgctccatggagtcctaaagcccgcgtgaccccaactctgccgaagcaggaccgtcctgtgcgtgaggggacccgggtagcctctattgagacaggtttggctgcagcagctgcaaagctggcccagcaggagctacagaaggcccaaaagaagaaatatatcaagaagaagcctttgctgaaggaggtagaacagcctcgccctcaagactccaatctcagtctgacagtaccagcccccactgtggctgccacaccacaacttgtcacctcctcctcacccctgcctcctcctgagcctaaacaagaggccctgtcaggaagtctcgctgaccatgagtacaccgctcgtcccaatgcctttggcatggcccaggcaaaccgcagcaccacacctatggcccccggtgtcttcttgacccagcggcgcccttcagttggctcccagagcaatcaggcaggacaaggaaagcgtcccaaaaagggcctggccacagcaaagcagagactcggccgtatcctgaaaatccacagaaatggcaaactacttctgtgagccctcctgtgtcccacccctcacccctttacccccattgccttctccattgtcaactcttggggcactcctggatcctatctgccctggacaaggtgctgaggtgcattgtcctgctttcttgggacttaccaaaggcacggacccctccaccgactccttctagttcccttccccactttcactagagcatcctgcctgccttctccactgaggagcaggtaaatgggagaggtttccagctgactagaaccctcttttctactcgtccaaaccactcccgtcacctgccttgtctgttctttattcttcatcccccgctagagctggaaggcaggatgaggagaggtatgaaggagcctgagccatgaagtgggaagcccagtgcttgacactttctgcaactctagccctatatccagaagcctgcccacctccacccattctgtttgccccatttccccagtccagtggacatgccccacctccagacttgctcatgggagaaggctgtggtctctgccccctcttgccaaatgcttcatggaaatgaagaggaaggcctagagcctccttcctgccccactgtgggccatttccagaagtggcctagaaatgccaacttcacttacctttcaaaagaaaggtgattcctatcacttgtcaaggtagggagaggtcagatgcccaagcctttgaccacggttttgtagcctgttggaggaagctacttttagctggctacacatgaggccacttgttttagggtgagctccagggatttgcctggattttgaaatcatgtagaacattatccacgtggctgtggctgtggctgtggctgggccctggcaggtggaaaaccatctcccagaaacctgaaagcacctgccaatgacgcagataaccctggccctacagcctgcttgctccgcctataccacagagcacagcctggacattatggagggtgtggcgggacggcccacacctgggtcctccatcgggaacttttcatgcttctttctccacctgaggtcttggtctgaagaagacctcaggactcacatcttcactcctgggcctttgcacttccagacgacaggtcatcgttcaagcagaatgcagacaggccattcacgagcccaagttgaagagaagagacgcccatccgtgaaggagcagaccatccatccgatcctccccttcccctgtccttccttcgtggattgtctccattgtccagacagtgcccccacctcccaccgccttgcctcactggcaatctggactcgatggagaacatccccccacctccatttggcactacccaagtggagtgtacccttgccctttccacctgtaccacccactccaacctcaccccagcttgcccaatgcttctggggaatttaatagctaccatgcaggccacagggaatttgtgaggcttcttttgtcatctttgtatctccagtttgtctttcttttctccatagccctgcctctactttccttccttggaatcaggggttcctttagcccatttgctttctctaccttggggaccccaggggccaagcagttctccatctagtcacaccaaaggcaaaaagcctggctacctcccccctagcacgtgagtccctactcccctcccctctgtttctgcccagctttgcttattttggggatttcaaggcagcagagggtagtgaggggagagcaggagaagcctctgtcctgtataggcaactgcctgactatgcggtgactgctgtaaccaagatcaggtccccagcccttttgtccattaacaccccttcttgatctttcaaaggcagctaattgctagcaaatccccccgattccggccttttccctctatttctttgttagaagttttctgtggagctgaaacccagcctctgtttgactgggtttcatttagcttagttgggttcttagagccccctgtttgttgttttgtgttgtttccaatgaaaagcaagtttaccctcagagttatgcttttccaaagaggctgatgtctttgtttttgttttttttaatgtttcaggttctaagtgaagtgagttggggaggggttgggagtgttagtaatcaaggtttagaacaccatgagatagttacccctgatctccagtccctagctgggggctggacagggggaagggagagaggatttctattcacctttaatatatttttacaaaaaaagcaaacaatttaaaaacaagcccaccgcttctgtacatgtctaaatatatttttagaagtgggtaggattgtgaatttctgatgcagggcctttttataaataggttagggtagcatcattcagacttctctgttgtttttgtccctgtctttttcttatgttgtgttactaatgtaatttatattttttttagatcctccctttcctatagagataaaagtgatttatcttggc

SEQ ID NO: 277742 - DNA, 2862 bp, Artificial Sequence
  derived and/or modified sequence
atagtgcaaagggggcgagttcttccaccacctgcccctcttgatacaaccaatctagctggccgacgcacgctgcagggtcgggcaaaaatggccagcgtcccagtgtattgcctgtgtaggcttccctacgatgtgacacggttcatgattgaatgtgacatgtgccaggactggtttcacggaagttgcgtgggcgtggaagaggagaaagctgcagacatagacctgtaccattgtcccaattgcgaagttctgcatggtccatccatcatgaaaaagaggcgcggatcttcaaagggacatgacacacacaaggggaagccagttaaaactgggtcacccacctttgttcgagagctgagaagtcggactttcgatagtagcgatgaggtgattctaaagcctactggaaaccagcttacggtggagttcttggaggagaactccttttcagtgcctattctggtgctcaagaaggatggactaggcatgaccctgcctagcccatctttcaccgtgcgcgatgtggagcactacgtaggctctgacaaagagatcgacgtgatagatgttacccggcaagccgattgcaagatgaaactgggggactttgtgaaatactactacagtggaaaacgggaaaaagtcctaaacgtcatctctctggagttcagtgatacccgcctctctaatctcgtggaaacccccaaaatagttaggaagctgtcctgggtggagaacttatggcctgaagagtgtgtgttcgaaagacctaatgtccagaagtattgtctaatgtctgtgagagactcgtatactgatttccacattgactttggcggaacaagcgtgtggtatcatgttctaaaaggcgaaaaaattttttatctaatccggccaacaaacgcgaacctgacccttttcgaatgttggtcttctagctctaatcagaatgagatgtttttcggcgatcaagtggacaagtgctataaatgctccgtcaaacagggacagacactgtttatccccactggctggatccacgccgtgttaacaccagtggattgtctcgcctttggcggtaacttcttacatagcctcaatatagagatgcagctgaaggcctatgaaatcgaaaaacggcttagcactgccgacttatttagatttcctaactttgaaaccatttgctggtacgtgggaaaacatatactggatattttcaggggtttacgcgagaataggagacaccccgcatcttatttagtacacgggggtaaggcccttaacctggcgtttagagcgtggactcgcaaggaagctctacctgatcacgaagacgaaataccagaaacggtgaggacagtgcagttaatcaaggacctcgccagagagattagacttgtggaattcaacataaccggcgcttgccttaacgattctgatgatgacagccctgatctcgatttggacgggaacgagagtcctttggccctgctgatgtcaaacggctccactaagcgtgtaaaatctctctccaagtcccggcgaacaaagatcgctaaaaaagtcgataaggctcgtctgatggccgagcaggtaatggaggacgaattcgacctggattctgatgatgaactccagattgatgagaggctgggcaaagaaaaagccacccttatcatacgaccaaagttccctaggaaactgccgcgagctaagccctgctccgaccctaatcgagttagggagccaggcgaggttgagttcgatatagaagaggactacacaacggatgaagatatggttgagggcgtggaaggaaagctgggcaatggtagcggggctggtggtattcttgatcttctgaaagcctcccgccaggttggcggaccagactatgctgcccttactgaagcgccagcctctcccagtacacaggaggccatccaaggaatgctgtgcatggctaatttgcagtcatcttcttccagccccgcaacatcttccctgcaggcttggtggaccggtgggcaagatcgatcatctggatcatccagctcaggattggggaccgtatccaatagccctgcctcacagagaacacctggtaaacgaccaatcaaaaggcccgcatactggagaacagaatcagaagaggaggaggaaaacgcttccctggacgagcaggactctttaggtgcctgtttcaaggacgcggagtatatctatccttctctggaaagcgacgatgacgatccagcccttaagagccgtccaaagaagaaaaaaaacagcgacgacgcaccgtggtctcccaaggctagagtaacgcctacgttgcctaagcaagatcgccctgtgcgggaaggcaccagggtggcctctatcgaaacgggcttggccgcagcggcagcgaagctggcccagcaggagctgcagaaggcccagaagaaaaaatacatcaaaaagaaacctcttttaaaagaagtggagcagcccaggccccaggactctaacttatcactcaccgtccctgctcctaccgtcgcagccaccccccagttggtgacgtccagctcccctctcccacctccagagcctaaacaggaggccctttccggatcgctggccgatcatgagtataccgcacgcccaaatgctttcgggatggcccaggctaataggtccacaacacccatggctcccggtgtattcctcacccagaggcggcctagcgttggctcacagtctaaccaggcgggtcaggggaaaaggccaaagaaaggccttgcaacggctaaacaaaggctcggcaggatccttaagatccataggaatggaaaattactgctctag

SEQ ID NO: 277743 - DNA, 2862 bp, Artificial Sequence
  derived and/or modified sequence
atcgtgcagagaggcagagtgctgcccccccccgcccccctggacaccaccaacctggccggcagaagaaccctgcagggcagagccaagatggccagcgtgcccgtgtactgcctgtgcagactgccctacgacgtgaccagattcatgatcgagtgcgacatgtgccaggactggttccacggcagctgcgtgggcgtggaggaggagaaggccgccgacatcgacctgtaccactgccccaactgcgaggtgctgcacggccccagcatcatgaagaagagaagaggcagcagcaagggccacgacacccacaagggcaagcccgtgaagaccggcagccccaccttcgtgagagagctgagaagcagaaccttcgacagcagcgacgaggtgatcctgaagcccaccggcaaccagctgaccgtggagttcctggaggagaacagcttcagcgtgcccatcctggtgctgaagaaggacggcctgggcatgaccctgcccagccccagcttcaccgtgagagacgtggagcactacgtgggcagcgacaaggagatcgacgtgatcgacgtgaccagacaggccgactgcaagatgaagctgggcgacttcgtgaagtactactacagcggcaagagagagaaggtgctgaacgtgatcagcctggagttcagcgacaccagactgagcaacctggtggagacccccaagatcgtgagaaagctgagctgggtggagaacctgtggcccgaggagtgcgtgttcgagagacccaacgtgcagaagtactgcctgatgagcgtgagagacagctacaccgacttccacatcgacttcggcggcaccagcgtgtggtaccacgtgctgaagggcgagaagatcttctacctgatcagacccaccaacgccaacctgaccctgttcgagtgctggagcagcagcagcaaccagaacgagatgttcttcggcgaccaggtggacaagtgctacaagtgcagcgtgaagcagggccagaccctgttcatccccaccggctggatccacgccgtgctgacccccgtggactgcctggccttcggcggcaacttcctgcacagcctgaacatcgagatgcagctgaaggcctacgagatcgagaagagactgagcaccgccgacctgttcagattccccaacttcgagaccatctgctggtacgtgggcaagcacatcctggacatcttcagaggcctgagagagaacagaagacaccccgccagctacctggtgcacggcggcaaggccctgaacctggccttcagagcctggaccagaaaggaggccctgcccgaccacgaggacgagatccccgagaccgtgagaaccgtgcagctgatcaaggacctggccagagagatcagactggtggagttcaacatcaccggcgcctgcctgaacgacagcgacgacgacagccccgacctggacctggacggcaacgagagccccctggccctgctgatgagcaacggcagcaccaagagagtgaagagcctgagcaagagcagaagaaccaagatcgccaagaaggtggacaaggccagactgatggccgagcaggtgatggaggacgagttcgacctggacagcgacgacgagctgcagatcgacgagagactgggcaaggagaaggccaccctgatcatcagacccaagttccccagaaagctgcccagagccaagccctgcagcgaccccaacagagtgagagagcccggcgaggtggagttcgacatcgaggaggactacaccaccgacgaggacatggtggagggcgtggagggcaagctgggcaacggcagcggcgccggcggcatcctggacctgctgaaggccagcagacaggtgggcggccccgactacgccgccctgaccgaggcccccgccagccccagcacccaggaggccatccagggcatgctgtgcatggccaacctgcagagcagcagcagcagccccgccaccagcagcctgcaggcctggtggaccggcggccaggacagaagcagcggcagcagcagcagcggcctgggcaccgtgagcaacagccccgccagccagagaacccccggcaagagacccatcaagagacccgcctactggagaaccgagagcgaggaggaggaggagaacgccagcctggacgagcaggacagcctgggcgcctgcttcaaggacgccgagtacatctaccccagcctggagagcgacgacgacgaccccgccctgaagagcagacccaagaagaagaagaacagcgacgacgccccctggagccccaaggccagagtgacccccaccctgcccaagcaggacagacccgtgagagagggcaccagagtggccagcatcgagaccggcctggccgccgccgccgccaagctggcccagcaggagctgcagaaggcccagaagaagaagtacatcaagaagaagcccctgctgaaggaggtggagcagcccagaccccaggacagcaacctgagcctgaccgtgcccgcccccaccgtggccgccaccccccagctggtgaccagcagcagccccctgcccccccccgagcccaagcaggaggccctgagcggcagcctggccgaccacgagtacaccgccagacccaacgccttcggcatggcccaggccaacagaagcaccacccccatggcccccggcgtgttcctgacccagagaagacccagcgtgggcagccagagcaaccaggccggccagggcaagagacccaagaagggcctggccaccgccaagcagagactgggcagaatcctgaagatccacagaaacggcaagctgctgctgtag

SEQ ID NO: 277744 - protein, 1557 aa, Artificial Sequence
  derived and/or modified sequence
MEPGSDDFLPPPECPVFEPSWAEFRDPLGYIAKIRPIAEKSGICKIRPPADWQPPFAVEVDNFRFTPRIQRLNELEAQTRVKLNYLDQIAKFWEIQGSSLKIPNVERRILDLYSLSKIVVEEGGYEAICKDRRWARVAQRLNYPPGKNIGSLLRSHYERIVYPYEMYQSGANLVQCNTRPFDNEEKDKEYKPHSIPLRQSVQPSKFNSYGRRAKRLQPDPEPTEEDIEKNPELKKLQIYGAGPKMMGLGLMAKDKTLRKKDKEGPECPPTVVVKEELGGDVKVESTSPKTFLESKEELSHSPEPCTKMTMRLRRNHSNAQFIESYVCRMCSRGDEDDKLLLCDGCDDNYHIFCLLPPLPEIPKGVWRCPKCVMAECKRPPEAFGFEQATREYTLQSFGEMADSFKADYFNMPVHMVPTELVEKEFWRLVNSIEEDVTVEYGADIHSKEFGSGFPVSDSKRHLTPEEEEYATSGWNLNVMPVLEQSVLCHINADISGMKVPWLYVGMVFSAFCWHIEDHWSYSINYLHWGEPKTWYGVPSLAAEHLEEVMKKLTPELFDSQPDLLHQLVTLMNPNTLMSHGVPVVRTNQCAGEFVITFPRAYHSGFNQGYNFAEAVNFCTADWLPAGRQCIEHYRRLRRYCVFSHEELICKMAACPEKLDLNLAAAVHKEMFIMVQEERRLRKALLEKGITEAEREAFELLPDDERQCIKCKTTCFLSALACYDCPDGLVCLSHINDLCKCSSSRQYLRYRYTLDELPAMLHKLKVRAESFDTWANKVRVALEVEDGRKRSLEELRALESEARERRFPNSELLQQLKNCLSEAEACVSRALGLVSGQEAGPHRVAGLQMTLTELRAFLDQMNNLPCAMHQIGDVKGVLEQVEAYQAEAREALASLPSSPGLLQSLLERGRQLGVEVPEAQQLQRQVEQARWLDEVKRTLAPSARRGTLAVMRGLLVAGASVAPSPAVDKAQAELQELLTIAERWEEKAHLCLEARQKHPPATLEAIIREAENIPVHLPNIQALKEALAKARAWIADVDEIQNGDHYPCLDDLEGLVAVGRDLPVGLEELRQLELQVLTAHSWREKASKTFLKKNSCYTLLEVLCPCADAGSDSTKRSRWMEKELGLYKSDTELLGLSAQDLRDPGSVIVAFKEGEQKEKEGILQLRRTNSAKPSPLASSSTASSTTSICVCGQVLAGAGALQCDLCQDWFHGRCVSVPRLLSSPRPNPTSSPLLAWWEWDTKFLCPLCMRSRRPRLETILALLVALQRLPVRLPEGEALQCLTERAISWQGRARQALASEDVTALLGRLAELRQRLQAEPRPEEPPNYPAAPASDPLREGSGKDMPKVQGLLENGDSVTSPEKVAPEEGSDLELLSSLLPQLTGPVLELPEATRAPLEELMMEGDLLEVTLDENHSIWQLLQAGQPPDLERIRTLLELEKAERHGSRARGRALERRRRRKVDRGGEGDDPAREELEPKRVRSSGPEAEEVQEEEELEEETGGEGPPAPIPTTGSPSTQENQNGLEPAEGTTSGPSAPFSTLTPRLHLPCPQQPPQQQL

SEQ ID NO: 277745 - DNA, 4674 bp, Artificial Sequence
  derived and/or modified sequence
atggagcccggttcagatgactttctgcccccacccgagtgtcccgtatttgagccatcatgggcagagtttcgggaccccttgggctatatcgctaagattcggcctatcgccgaaaaaagtgggatttgcaagatcaggccaccagctgactggcagccaccgttcgccgtggaggtggataatttccgctttactccgagaattcagagattgaatgagcttgaagctcaaactagggtgaagctcaactacctagaccagatcgccaagttttgggagatacagggctcaagcctcaagatccccaatgtggagcgcaggattctggacctgtattccctgagtaagatagttgttgaagagggcggctacgaggcaatctgtaaggaccgaagatgggctcgggtggcacaacgcttaaattaccccccagggaaaaatattggatccttgttgcggagccactacgaacgcatagtctacccatatgaaatgtatcagagcggagcaaatctagtgcagtgtaatacgaggccattcgacaacgaggaaaaagacaaagagtataaaccgcactccattccgcttcgacaaagcgtccaaccgtctaagttcaactcctacgggcggagagccaagcgcctccagcccgatccggaacctacagaggaagatatcgagaagaaccccgaacttaagaagctccagatctatggcgcaggcccgaaaatgatggggctggggctgatggcaaaggataagacactccggaagaaggacaaggaagggcccgagtgtcctccaacagtagtggttaaggaggagctcggcggggacgtgaaagtcgagtctacctcacccaagacctttctggaatctaaagaggagttgtcccatagtccagaaccatgtactaagatgaccatgcggctacgtcgcaaccacagcaatgcacaatttatcgagtcctacgtgtgcaggatgtgctctagaggcgacgaggatgataagctgcttttatgcgacggttgcgacgataactatcatatcttctgcttattgcctcctcttccagagatccccaaaggcgtatggcgctgtccaaaatgcgtgatggcagagtgcaagaggcctcccgaggccttcgggtttgagcaggctactagggagtacaccctgcagagctttggggagatggccgactcttttaaagccgactattttaacatgcctgtccatatggttcctactgaacttgtcgagaaggaattttggaggctagtcaattcaatcgaagaagatgtgactgtggagtacggcgccgacatccactcaaaagagttcggctccggcttccctgtatccgacagcaagcgacatcttaccccggaggaagaagaatatgcgacctcaggttggaacctgaatgtcatgcccgtgctcgaacagtccgttctctgccatattaatgcagacatctcaggaatgaaggtgccttggctgtatgtggggatggtgtttagcgccttttgttggcatatcgaggaccattggtcttactctattaactatcttcattggggcgagcctaaaacctggtacggtgtccctagtctggctgcagaacacttggaggaggttatgaaaaagcttaccccagagttatttgacagtcaacctgacctcctgcatcaactggtgaccctgatgaacccaaatacactgatgagccatggagtcccagttgttagaaccaatcaatgtgccggtgagttcgtgattacgtttccccgtgcttatcacagtggctttaaccagggttacaatttcgcggaggcagttaacttctgtaccgcggactggctcccagccggtaggcagtgcatagaacactatagacggctaagacgatactgcgtcttcagccacgaagaattaatctgcaaaatggctgcctgccctgagaaacttgaccttaatttggccgctgcggtgcataaggagatgttcataatggtacaggaagaacggagactcaggaaggctcttctggaaaagggaatcactgaggcagagagagaagcttttgagctcttacctgatgatgaaaggcagtgtatcaagtgtaaaaccacatgttttctctccgcacttgcctgctacgactgtcccgatggcctggtgtgcctgtcgcacatcaatgatctctgtaagtgttctagctcgagacagtacttgaggtacaggtacacccttgatgaactgcctgccatgctgcacaaactcaaagtcagggccgagagctttgacacctgggcaaataaagtgcgcgtggcgcttgaagtcgaggacggacgaaagcggagcctcgaagagctgcgagcccttgagtcggaggcccgtgaaaggagattccctaacagtgagctgttacagcagctaaagaattgtttatctgaagccgaggcttgcgtctctcgggccttgggcctggtgtcaggtcaggaggcaggcccacacagggtcgctggactgcaaatgaccctaacggagctcagggcattcctggatcaaatgaataatctcccatgcgccatgcaccaaatcggagatgttaagggcgtgctcgagcaggtggaggcgtaccaggcagaagcccgagaagccctcgcatcactgcccagtagtcccgggctccttcagtctctgttggaacggggacgacagctaggcgttgaagtgcccgaggcccagcagttgcagcgtcaggtggaacaggctaggtggcttgatgaagttaaaagaaccctagctccttccgcgaggcgcggcactcttgctgtaatgcggggactgctggtcgctggcgcttctgtagcaccatccccggctgtcgacaaggctcaggcagagctccaagagctgctgactattgccgaaagatgggaagagaaggcgcacctgtgtcttgaggccagacagaagcatcctccggctacactggaagcgatcattcgcgaagcagaaaacatccccgtgcatttgccaaatatacaggccttaaaagaagcactggccaaggcccgggcctggattgccgacgttgacgagattcagaatggcgatcattacccgtgcttagatgatcttgaggggctggtcgccgtgggccgtgacctgcctgtgggcctggaagagctgcgacaactcgaactccaggttctgacggcccatagctggcgggagaaggccagtaagacatttttaaagaagaattcatgttatacgctgctggaggtgttatgtccatgcgcagatgcaggttccgactccactaagaggagcagatggatggaaaaagagctggggctgtacaagagtgatacagagctactgggactgagcgcccaggacctaagagatccggggagcgttatcgtcgctttcaaagaaggtgaacaaaaggaaaaggagggaatcctgcagttgagaaggacaaattctgccaaaccttcccctctggcatcgtcctcaaccgcttcgagcacgacatctatttgtgtctgtggccaggtcctcgctggggcaggcgcactgcagtgcgacttatgccaggattggttccatggacgatgcgttagcgtaccacgattgctttcttccccacgcccaaaccccacgagctctcccctgctggcgtggtgggagtgggataccaaatttttgtgtccgctttgcatgagatcacggcggccccgcctcgagactatccttgcccttctggtggccctgcagcgcctccctgtgcgcctgcccgaaggtgaggccctgcagtgtctcaccgaaagagcaatcagctggcaggggcgagcaaggcaggcattagcctccgaggacgtgacggcgctgttgggcaggctggccgaacttcgacagaggttacaggccgaacctaggcccgaagagcccccgaattaccccgctgccccggcgagcgatcctctgagggagggctccggaaaggatatgccgaaagttcaaggactgctcgagaatggggatagcgtcaccagccccgaaaaggtggcacctgaggaaggctccgaccttgagttattgagttccttactgccccagctaactggaccagtgttagaactgcctgaggctaccagagctccactcgaagagctcatgatggaaggcgatctgctggaggtgactttagacgaaaatcactctatctggcagctgttacaggccggtcaaccgcccgatctcgaacgcattagaaccttgctggaactcgagaaagccgaaagacatggatctcgggcccgggggagagcccttgaaaggcgtcggcgacgcaaggtggataggggtggcgaaggtgacgaccccgcccgcgaagagctggagcctaaacgagtgcggtcaagtggtccagaggccgaagaggtgcaagaagaggaagaactagaggaggagacgggcggtgagggaccacctgcacctattccaacaaccggctctccaagcacgcaggagaatcagaacggactagagccagccgaaggtacgacctcgggcccaagcgctccttttagcaccctgactcctcgactacacctgccctgtcctcaacagccacctcagcagcagctgtag

SEQ ID NO: 277746 - DNA, 4674 bp, Artificial Sequence
  derived and/or modified sequence
atggagcccggcagtgatgacttcctgcccccaccagaatgtcctgtgtttgagcccagctgggccgagttccgggaccccctgggctacatcgccaagatccggcccatcgccgagaagagcggcatctgcaagatccggcccccagctgactggcagcccccatttgctgtggaggtggacaacttccgcttcaccccccgcatccagaggctgaatgagctggaggcccagaccagggtgaagctgaactacctggaccagatcgccaagttctgggagatccagggcagcagcctgaagatccccaacgtggagcggcgcatcctggacctgtacagcctgagcaagatcgtggtggaggagggcggctatgaggccatctgcaaggaccggcgctgggcccgggtggcccagaggctgaactacccacctgggaagaacatcggcagcctgctgcggagccactatgagcgcatcgtgtacccctatgagatgtaccagagcggggccaacctggtgcagtgcaacacccggccctttgacaatgaggagaaggacaaggagtacaagccccacagcatccccctgcggcagagcgtgcagcccagcaagttcaacagctatggaagaagagccaagaggctgcagcctgaccctgagcccacagaagaagatattgagaagaaccctgagctgaagaagctgcagatctatggagctggccccaagatgatgggcctgggcctgatggccaaggacaagaccctgaggaagaaggacaaggagggccctgagtgcccccccaccgtggtggtgaaggaggagctgggcggagatgtgaaggtggagagcaccagccccaagaccttcctggagagcaaggaggagctgagccacagccctgagccctgcaccaagatgaccatgaggctgcggaggaaccacagcaatgcccagttcatcgagagctatgtgtgcaggatgtgcagcagaggagatgaagatgacaagctgctgctgtgtgatggctgtgatgacaactaccacatcttctgcctgctgccccccctgcctgagatccccaagggcgtgtggcgctgccccaagtgtgtgatggccgagtgcaagaggcctcctgaggcctttggatttgagcaggccacccgggagtacaccctgcagagctttggagagatggctgacagcttcaaggctgactacttcaacatgcctgtgcacatggtgcccacagagctggtggagaaggagttctggaggctggtgaacagcattgaggaggatgtgacagtggagtatggagctgacatccacagcaaggagtttggaagtggcttccctgtgtctgacagcaagaggcacctgaccccagaggaggaggagtatgccaccagcggctggaacctgaatgtgatgcctgtgctggagcagagcgtgctgtgccacatcaatgctgacatcagcggcatgaaggtgccctggctgtatgtgggcatggtgttttctgccttctgctggcacatcgaggaccactggagctacagcatcaactacctgcactggggcgagcccaagacctggtatggagtgcccagcctggccgctgagcacctggaggaggtgatgaagaagctgaccccagagctgtttgacagccagcctgacctgctgcaccagctggtgaccctgatgaaccccaacaccctgatgagccatggagtgcctgtggtgaggaccaaccagtgtgccggggagtttgtgatcaccttcccccgggcctaccacagcggcttcaaccagggctacaactttgctgaggccgtgaacttctgcacagctgactggctgcctgctggccggcagtgcatcgagcactaccgccgcctgcggcgctactgtgtgttcagccatgaggagctgatctgcaagatggccgcctgcccagagaagctggacctgaacctggccgctgctgtgcacaaggagatgttcatcatggtgcaggaggagcggcggctgaggaaggccctgctggagaagggcatcacagaggccgagcgggaggcctttgagctgctgcctgatgatgagcggcagtgcatcaagtgcaagaccacctgcttcctgagcgccctggcctgctatgactgcccagatggcctggtgtgcctgagccacatcaatgacctgtgcaagtgcagcagcagccggcagtacctgcgctaccgctacaccctggatgagctgcctgccatgctgcacaagctgaaggtgcgggcagagagctttgacacctgggccaacaaggtgcgggtggccctggaggtggaggatggcaggaagaggagcctggaggagctgcgggccctggagagcgaggcccgggagcggcgcttccccaacagcgagctgctgcagcagctgaagaactgcctgtctgaggccgaggcctgtgtgtcccgggccctgggcctggtgtctggccaggaggccggcccccaccgggtggccggcctgcagatgaccctgacagagctgcgggccttcctggaccagatgaacaacctgccctgtgccatgcaccagattggagatgtgaagggcgtgctggagcaggtggaggcctaccaggccgaggcccgggaggccctggccagcctgcccagcagccctggcctgctgcagagcctgctggagcggggccggcagctgggcgtggaggtgcctgaggcccagcagctgcagaggcaggtggagcaggcccgctggctggatgaggtgaagaggaccctggcccccagcgcccggcggggcaccctggccgtgatgaggggcctgctggtggccggggcctctgtggcccccagccctgctgtggacaaggcccaggccgagctgcaggagctgctgaccatcgccgagcgctgggaggagaaggcccacctgtgcctggaggcccggcagaagcaccccccagccaccctggaggccatcatccgggaggccgagaacatccctgtgcacctgcccaacatccaggccctgaaggaggccctggccaaggcccgggcctggattgctgatgtggatgagatccagaatggagaccactacccctgcctggatgacctggagggcctggtggccgtgggccgggacctgcctgtgggcctggaggagctgcggcagctggagctgcaggtgctgacagcccacagctggagggagaaggccagcaagaccttcctgaagaagaacagctgctacaccctgctggaggtgctgtgcccctgtgctgatgctggcagtgacagcaccaagaggagccgctggatggagaaggagctgggcctgtacaagagtgacacagagctgctgggcctgagcgcccaggacctgcgggaccccggctctgtgattgtggccttcaaggagggggagcagaaggagaaggagggcatcctgcagctgcggaggaccaacagcgccaagcccagccccctggccagcagcagcacagccagcagcaccaccagcatctgtgtgtgtggccaggtgctggccggggccggggccctgcagtgtgacctgtgccaggactggttccacggccgctgtgtgtctgtgccccggctgctgagcagcccccggcccaaccccaccagcagccccctgctggcctggtgggagtgggacaccaagttcctgtgccccctgtgcatgaggagcagaagaccccggctggagaccatcctggccctgctggtggccctgcagaggctgcctgtgcggctgcctgagggggaggccctgcagtgcctgacagagcgggccatctcctggcagggccgggcccggcaggccctggcctctgaagatgtgacagccctgctgggccgcctggccgagctgcggcagaggctgcaggccgagcccaggcctgaggagccccccaactacccagctgccccagccagtgaccccctgcgggagggcagcggcaaggacatgcccaaggtgcagggcctgctggagaatggagacagcgtgaccagccctgagaaggtggcccctgaggagggcagtgacctggagctgctgagcagcctgctgccccagctgaccggccctgtgctggagctgcctgaggccacccgggcccccctggaggagctgatgatggagggggacctgctggaggtgaccctggatgagaaccacagcatctggcagctgctgcaggccggccagcccccagacctggagcgcatccgcaccctgctggagctggagaaggccgagagacatggcagccgggcccggggccgggccctggagaggagaagaagaaggaaggtggacagaggaggagaaggagatgatcctgcccgggaggagctggagcccaagagggtgcgcagcagcggccctgaggccgaggaggtgcaggaggaggaggagctggaggaggagactggaggagagggccccccagcccccatccccaccaccggcagccccagcacccaggagaaccagaatggcctggagcctgctgagggcaccaccagcggccccagcgcccccttcagcaccctgaccccccggctgcacctgccctgcccccagcagcccccccagcagcagctgtag

SEQ ID NO: 277747 - DNA, 5245 bp, Artificial Sequence
  derived and/or modified sequence
cttgttcctccgccgttgcaatgaactattttctctcagtccggggtggtacttttgagtaaccccttccaaatagaaacccataccagcctatttagctcggtctccactatatgaaggtttcctagggcttggtgtgacgcaacgtatacgaggctcggaaggacaccccgcggaaggatccggtttgttgtggtgtggggaggggagacgctgacaaaccaagatggcggcggcggcgctgaaggccgcggcgtttgggaggtaactgtggtggcgaaggctgcggtagtggggaggcaaccacacagtttggaagaaacggagcgggacgaagaggcggtagcagtagagtcagcctgagactctcagagcacgacggccacacgcccccttaggccctcggcgggcggcggctgccccgcttagggcctagcctccgagcattgcctcggcttcaaacagcggcggcgccatgagtccttaagggcggtccaagcctcccgatccctggcccagacctcgggcccaccatggagccggggtccgacgatttcctaccgccaccggagtgcccggtgttcgagcctagctgggccgagttccgagaccctcttggctacatcgcgaaaatcaggcccatcgcagagaaatcgggcatttgcaagatccgcccacccgcggactggcagccaccctttgctgtggaagtggacaacttcaggtttaccccccgaatccagaggctgaatgagctagaggcccagacgagagtgaaactgaactacttggaccagattgccaaattctgggaaatccagggctcctccttaaagattcccaatgtagaacggcggatcttggacctctacagtctcagcaaaattgtggtggaggaaggtggttatgaagctatctgcaaggaccgtcggtgggctcgggtagcccagcgcctcaactatccaccaggcaaaaatattggctccttgctacgctcccactacgaacgcattgtttatccctatgaaatgtaccagtctggagccaaccttgtgcagtgtaacacacgtccatttgataatgaggagaaggacaaggaatacaaaccccacagcatccccctacgacagtctgtgcagccttccaagttcaacagctatggccggcgggccaagagactgcagcctgatccggaacccacagaggaagacattgagaagaatccagagctgaaaaagctacagatctatggggcaggccccaagatgatgggcctgggcctcatggccaaagacaagactctgcggaagaaagataaggaggggcctgagtgtccccccacagtagtggtgaaggaggagttaggtggggatgtgaaggtggagtcaacatcgcctaagaccttcctggagagcaaggaggagctgagtcacagcccagaaccctgcaccaagatgaccatgaggctacggaggaaccacagcaatgcccagtttattgagtcatatgtctgccggatgtgttctcgaggggatgaggatgacaagctcctgctgtgtgatggctgtgatgacaactaccacatcttctgcctgctgcctcctctgcctgagatccccaagggtgtctggcggtgcccaaagtgtgtcatggcggagtgtaagcggcccccagaagcctttggctttgagcaggctacccgggaatacactctgcagagctttggcgagatggccgactcctttaaagctgactacttcaacatgcccgtgcatatggtgcccacagaacttgtggagaaggagttctggaggctggtaaatagcattgaggaagatgtgactgttgagtatggagctgacatccattccaaagaatttggcagcggtttccctgtcagtgacagtaaacggcacctaacccccgaagaggaggagtatgctaccagtggttggaacctaaatgtgatgccggtgttggaacagtctgtactgtgccacatcaatgcagatatctctggcatgaaggtgccctggctctacgtgggcatggtcttctcagccttttgctggcatattgaggatcactggagttactccattaactacctccactggggtgagccgaagacctggtatggggtgccctcacttgcagcagaacatttggaagaagtgatgaagaagctgacacctgaactatttgatagccagcctgacctcctgcaccaacttgtcaccctcatgaatcccaacaccctcatgtcccatggtgtgccagttgtccgcacaaaccagtgtgcaggagagtttgtcatcaccttcccccgtgcttaccacagcggcttcaaccaaggctacaactttgccgaggctgtcaacttttgcactgctgactggttgcctgctgggcgccagtgcattgagcactaccgccggctccggagatactgcgtcttctcccatgaggagcttatctgcaagatggctgcctgcccagagaagctagacctgaacctggcggcagctgtgcataaggagatgttcatcatggtgcaagaagagcggcgtctacgaaaggccctgctggagaagggtatcacagaggctgagcgagaggctttcgagctgctcccagatgatgagcgccagtgtatcaagtgcaagactacgtgtttcctgtcagccctggcctgctacgactgcccagacggccttgtctgcctttcccacatcaatgatctctgcaagtgctccagtagccggcagtacctgcggtatcggtataccttggatgagcttcctgccatgctgcataagctgaaggttcgggctgagtcctttgacacctgggccaacaaagtgcgagtggccctggaggtggaggatgggcggaagcgcagccttgaagaactgagggcactagagtctgaagcccgtgagcggaggtttcctaatagtgagctgctgcagcaactaaagaactgcctgagtgaggcagaggcttgcgtgtcccgagctctgggactggtcagcggccaggaagctggcccccacagggtggctggtctacagatgaccctgactgagctccgggcctttctggaccagatgaacaacctgccttgcgccatgcaccagattggggatgtcaagggtgttctggaacaggtggaggcctaccaggctgaggctcgtgaggccctggcctcactgccctccagtccagggctactgcagtccctgttggagagggggcggcagctgggggtggaggtgcctgaggcccagcagctccagcggcaggtggaacaggcgcgatggctggatgaggtgaaacgcacactggccccctcagcccgaaggggcaccttggctgtcatgcgaggactgttggtcgcgggtgccagtgtagcccctagccctgctgtggataaagcccaggccgagctgcaggaactgctgaccattgctgaacgctgggaggagaaagcccacctctgcctggaggccaggcagaagcatccaccagccacacttgaggccataatccgtgaagcggaaaacatccctgttcacctgcccaacatccaggctctcaaggaggctcttgctaaggcccgggcctggattgctgatgttgatgagatccaaaatggtgaccactacccctgcctggatgacttggagggcctagtagctgtgggccgggacctacctgtggggctggaggagctgagacagctagagctacaggtactgacagcgcactcctggagggagaaggcctccaagaccttcctcaagaaaaattcttgctacacgctgctggaggttctctgcccatgtgcagatgccggctcagacagcaccaagcgcagccggtggatggagaaggagctggggttgtacaaatctgacacagagctgctggggctgtctgcgcaggacctcagggacccaggctctgtgatcgtggccttcaaggagggggaacagaaggagaaggagggtatcctgcagctgcgtcgcaccaattcggccaagcccagtccactggcatcatcgagcacggcctcctctacaacctctatctgtgtgtgtgggcaggtgctggctggggcgggagctctgcagtgtgacctgtgtcaggactggttccatgggcggtgtgtgtcagtgcctcgcctcctcagctctccgaggcccaatcccacctcatccccactgctggcctggtgggaatgggacaccaaattcctgtgtccactgtgtatgcgctcaaggcgcccgcgcctggagaccatcctggcactgctggtagccctgcagagactgcctgtgcggctgcccgagggcgaggccctgcagtgcctcacagagagggccatcagctggcaaggccgcgccaggcaggctctggcctctgaagatgtgactgctcttttgggacggctggctgagctccgccaacggctacaggctgaacctagacctgaggagcctcctaactaccctgcagcccctgcttctgaccccctcagagagggcagtggcaaggatatgcctaaggtccagggcttactggagaatggagacagtgtgaccagtcctgagaaggtagccccggaggagggctcagatctggagctgctgtcctcgctgttgccacagttgactggccctgtgttggaactgcctgaggcaacccgggcccccttggaggagctcatgatggagggggacctgctcgaggtgaccctggatgagaaccacagcatatggcagctgctgcaggctggacagcccccagacctggagaggatccgcacacttctggagctggagaaggcagagcgtcacgggagtcgggctcggggccgggccctggagaggcggcggcggcggaaggtggatcggggtggggagggcgatgacccagcccgagaggagctagagccaaagagggtacggagctcagggccagaggctgaggaggtccaggaggaggaagagctggaggaggagactgggggtgagggcccccctgcacccatccccaccactggcagccccagcacccaggagaaccagaatggcttggaaccggcggaagggaccacttcaggcccctcggcccctttctccactctgactccccggctgcatctgccctgcccacagcagccgcctcagcaacagttgtgacagtggctgagcctagcacagaccctgacagagacccc

SEQ ID NO: 277748 - DNA, 4674 bp, Artificial Sequence
  derived and/or modified sequence
atggagcccggcagcgacgacttcctgcccccccccgagtgccccgttttcgaaccgagctgggccgaattcagggaccccctggggtatattgctaaaattcgtcctattgccgagaaatccggtatttgtaaaattcgacctcccgctgactggcaaccaccctttgccgtagaggttgataattttagatttaccccacggatacagcggctgaacgagctggaagcacagacacgggttaaactgaattatttggatcaaattgccaagttttgggaaattcaggggtcatctttgaaaatccctaatgttgagcggagaatcctcgacttgtattctctcagcaagatagttgtagaggagggaggttatgaggccatctgcaaggatcggaggtgggctagggtcgcacagagactgaactaccctcccggaaagaacatcggctccctactcaggtctcattatgagcggattgtttacccctacgagatgtaccaaagcggcgctaacctggtgcagtgcaatacgaggccattcgataacgaggagaaagacaaagaatataaacctcactcaatcccacttcgccagtcagtacagccgagtaaattcaacagctacggccgcagggcaaaacgcctccagcctgaccctgaacctacagaagaagacattgagaaaaaccccgagctcaagaaactccagatttatggcgctgggcctaagatgatgggcctgggactcatggccaaagacaagacgctgcgaaaaaaggacaaagagggacccgaatgccctccaaccgttgttgtgaaggaggagttgggtggggatgtaaaagtcgaaagtacctctcccaaaacgtttctcgagtccaaggaagaactctctcattccccagagccctgtactaagatgacaatgcgcttgagacgcaaccacagtaacgcccaattcatcgagtcgtacgtgtgccgcatgtgttccaggggtgatgaggatgataaactcctcctgtgcgacggatgtgatgacaactatcacattttctgccttctgccccccctacctgagattccaaagggagtgtggagatgccccaaatgtgtgatggccgagtgcaagcgacctcccgaagcctttggattcgagcaagctacacgcgaatacactttacagtcgtttggcgagatggcagattcttttaaggcggattatttcaatatgcccgtgcacatggtacctaccgaattggtcgagaaggaattctggcggttggtgaacagtatcgaggaggacgtcaccgtggaatacggagctgacattcactcaaaggagttcgggagcggcttccctgtgtcggactctaagaggcacctgacacccgaggaggaagagtatgctaccagtggatggaacttgaacgtaatgcctgtgcttgagcagagcgttctctgccacatcaacgccgacattagtggaatgaaggtgccttggttatatgttggcatggtgttctccgccttttgctggcacatagaggatcattggagctactctataaactatctacactggggcgagcccaaaacatggtatggtgtgcctagccttgcagctgaacacctggaagaagtcatgaaaaaattaacgcctgaactttttgacagccaacctgacctgttgcaccagctggtgactctcatgaaccccaacaccctaatgagccacggggtgccagttgttcggacaaaccaatgcgcgggggaattcgttatcaccttccctagagcgtaccacagtggctttaatcagggatataatttcgccgaagcagtaaatttttgcacagcagattggcttcccgcagggcgccagtgtatcgagcactatagacgcctccgcaggtattgtgtcttctcacacgaggagctgatttgtaagatggctgcctgtcccgaaaaattggaccttaatttggccgcagccgtgcacaaggagatgttcataatggttcaagaggaaaggcggctgaggaaagcgctgctggagaagggcattacagaggctgagagggaggctttcgagctcttgccagacgatgaacgccaatgcatcaagtgtaagaccacctgctttttgtccgccttggcatgctatgattgtccagacggtctcgtttgtttgtcacatatcaatgacttgtgtaaatgctcatcctcccgacagtatctccgctaccgctatacactggacgaactgcccgccatgcttcacaaactcaaggtgagagccgagtcgtttgacacctgggctaataaggttagagtggccttggaggttgaggatggcagaaagcgtagtctcgaggagctgagagccctcgagtctgaagccagggagcgacgattcccaaatagtgagctgctccagcagctaaaaaattgcctctccgaagccgaggcttgcgtgtctcgcgccctcgggctcgtatcagggcaggaggctggcccccatcgcgtggccggcctacagatgacactgactgaacttagagcattcctagatcaaatgaacaacctgccatgtgccatgcaccagatcggtgacgtgaagggcgtcctggaacaggtcgaggcataccaggcagaagcaagggaggccctggcatccttgccttctagtcccggtttgttgcagagcttgttggaacgagggaggcagcttggagtggaggtccctgaggcccagcaactgcagcgacaagtggaacaagctcggtggctcgacgaggtgaaacgaaccctcgcaccttccgctcggagagggaccctagccgtgatgagaggtctgttggttgctggagctagcgtggccccaagccccgcagtggacaaggcccaagccgagctgcaggagttactgacaatcgccgagcggtgggaggagaaggctcatttgtgtctggaagctcggcagaaacatcccccagctactctggaagctatcattagggaggccgagaacattcccgtgcatctgcccaacatccaggccctcaaagaagcactggcaaaggcacgcgcctggatcgcagacgtggatgaaattcagaatggggaccactacccctgcttggatgacctagaggggctggtagcagtgggtcgtgacctgcctgtgggcctggaggagctgagacagctagagctgcaagttctcacagctcattcgtggcgcgagaaggcatctaaaacattcctgaagaagaactcttgttatactctgctggaggtgctgtgcccatgtgctgacgccggaagtgatagtaccaaacgcagcagatggatggagaaagagctcgggctttacaaatctgataccgaactcctgggtctcagcgcccaagatctgagggaccctgggagtgtcatagttgcattcaaagagggagagcagaaagagaaggaggggattttacagctccgacgcactaactctgccaagccaagccctttggccagctctagtacagccagtagtactacttctatatgcgtttgtggtcaggttcttgccggcgccggcgccctgcagtgcgatctctgccaggattggttccacgggcggtgcgtgagcgtgccccgcttgttaagctcacccagaccaaaccccaccagcagcccactgctggcttggtgggaatgggatactaaattcctctgtcccctatgtatgcgctcccggcggccccggctggaaaccatccttgcactactggtggcgctgcagcgtttgcccgtgcgactccctgagggagaagctctacagtgcctgactgaaagagccatcagctggcaggggagggctagacaagccctggcctctgaagatgtgaccgccctcctcgggcgcctagcagagctaagacaacgtctccaggccgagcctagaccagaagagcctcccaactacccagctgctcctgcctctgaccccttgagggaaggtagtggaaaggatatgcctaaagtccagggccttctcgagaacggcgactcagttacttccccagagaaagtggctccagaggagggttctgatctggagctcctgtctagcctcctaccacagctgacaggtcctgtgctcgagctccccgaggctacacgcgcaccgctcgaagagctcatgatggagggtgaccttcttgaagtcactttagatgaaaatcacagcatctggcagctgctgcaggccggccaaccccccgacctggagcgtatccggaccctgctcgaactcgaaaaggctgagcggcacggaagtcgggctcgtggaagggctctcgaaagacgacgacggcgtaaagttgaccgcggtggtgaaggggatgatcccgctcgggaggagctggaaccaaagcgagtccgctccagcgggccagaggccgaagaggtacaggaggaggaggagcttgaggaggagaccggcggcgagggaccgccagctcctatccctactaccggcagtccttccacccaagagaatcagaatggcctcgagccagcggaggggaccactagcggaccttccgccccgttttcaaccctgacacccaggctgcacctgccctgcccccaacagcccccacaacagcagttatag

SEQ ID NO: 277749 - DNA, 4674 bp, Artificial Sequence
  derived and/or modified sequence
atggaaccagggagcgacgatttcctgcccccacccgaatgcccagtgttcgaaccaagttgggccgagtttcgagatcctctgggctatatagctaaaattaggcccatcgccgagaagtccggcatttgcaagatccgacccccagccgattggcaaccccctttcgccgtcgaagtggacaactttaggtttacacccagaatccagcgacttaacgaactggaggcacagactcgcgtgaagcttaactatctagaccagattgcgaagttctgggagatccagggcagcagcctaaagatacctaacgtggagaggcgcattctcgacctctactcactgtccaaaattgtggtcgaggaggggggatatgaggcaatatgcaaggatcggaggtgggcgagagtcgcccagcggctcaactatccgccagggaaaaatatcgggtcactcctgaggagtcactacgagcggatcgtttacccatatgaaatgtatcagtccggagccaacctggtccagtgtaacactcggccatttgacaacgaggagaaggataaagaatacaaaccccactcgattcctctgcgccaatcagtgcagccgagtaaattcaacagctatggcagacgggcaaagcggctccaaccagatccagagcccacggaagaagatatcgaaaaaaaccccgaactgaagaagctgcagatttacggggctggccctaaaatgatgggcctgggactgatggccaaagacaagactctcagaaaaaaagacaaggaaggccctgaatgcccccctacagtggttgtcaaagaagaactaggtggcgatgttaaggtggagagcacatcccccaaaaccttcctggaatccaaggaggaactcagtcacagccccgaaccatgcaccaagatgacgatgcgactcagacggaaccatagcaatgcacagtttatcgaatcctacgtgtgtcgtatgtgctcccggggtgacgaggatgacaagctactgctgtgcgacggatgtgacgacaactatcatatattttgcctgctaccccctttgccggagatcccgaagggtgtatggcgatgtcccaagtgcgtcatggctgagtgtaagcggcctccagaagccttcgggttcgagcaagcaacacgggagtatactctacaaagctttggggagatggctgactcattcaaagcagattacttcaacatgccggtgcacatggtgcccactgagctcgtggagaaggaattctggcgactggtgaactccattgaagaggatgtgaccgtggaatacggcgctgatatacattcaaaggaatttggaagcggcttcccagtttctgatagtaagaggcacctcacccctgaggaggaagagtacgcaaccagcggctggaatctgaatgttatgcctgttctagagcagtctgtgctctgccacataaatgcggacatctccggcatgaaggtgccttggctgtatgttgggatggtgttctccgctttttgttggcacatcgaggaccattggtcatactcaataaactacttgcactggggggaacccaaaacctggtatggcgtgcccagcctcgccgcagagcacctggaagaagttatgaagaagcttacgccagagctattcgactctcaacctgacttactgcatcagcttgtgaccctgatgaaccccaatactctgatgtcacatggtgtgcctgtggtgcggactaatcaatgtgccggagagttcgtcatcaccttccctcgggcttaccactctggcttcaaccagggctacaattttgctgaagctgtgaacttttgcaccgccgactggcttccggctggacggcaatgtatcgagcactataggcgactacggagatactgtgtattcagccacgaggaacttatctgcaaaatggctgcgtgtccagagaagttagatttaaatctggccgcagcagtgcacaaggaaatgttcataatggtacaggaagaacgcaggcttcgtaaagcactgctagagaagggaatcactgaggccgagcgcgaggcattcgagctgcttccagatgatgagagacagtgtattaaatgcaagaccacatgctttctgtctgctttagcctgttacgattgtcctgatgggttggtatgtctttcacatatcaacgacctctgcaaatgctcaagtagcagacagtaccttagatatagatacaccctagatgagctcccagccatgttacacaagttgaaagtccgcgctgagtccttcgatacttgggcaaacaaggtcagggtggccctcgaagtagaggatgggaggaagcgctcgcttgaggagctacgcgctctggaaagcgaagctcgggagcggaggttccccaacagcgagctgcttcaacaactgaagaactgccttagtgaagccgaggcctgtgtctcgcgtgccctgggcttggtcagcggccaggaggctggccctcacagggtagccggacttcagatgacacttaccgaacttagagcatttctggaccagatgaacaatctgccctgcgctatgcatcagatcggtgatgtcaaaggcgttttagaacaggtggaggcgtaccaggccgaagcacgggaggccctggcgtcactccctagtagtccgggtttacttcagagcttgctggagcgcggaagacagctcggagtggaggttcctgaggcccagcagttgcagcgacaggtcgagcaggctaggtggcttgatgaggttaagcggacactggctccctccgcgagacgcggtaccctggcagtaatgcggggattgctggttgcgggagcctccgtagccccttcacccgcagtggacaaggcccaggcagagctgcaggagctgctgacgatcgcggaaagatgggaggagaaggcccacctgtgtctcgaagcaaggcagaagcatccacctgccaccctcgaggcaatcattagagaggcagaaaatattcctgtacaccttccaaacatacaagctctgaaagaagcgctggctaaggccagagcatggatagcagacgtcgacgaaatccaaaatggagatcactatccatgcctggacgatctcgaaggattagtagcggtcggccgtgacctcccagtcgggttggaggagctgcgccaactggaactgcaggtgctgactgcacactcatggagagaaaaagcgtctaagacgttcctgaaaaaaaactcgtgttacacacttctggaggtcctgtgtccctgcgccgatgcaggtagcgactctactaagcggtctcgctggatggaaaaggagctgggactttacaagagcgacaccgagttgctgggcctttcggctcaggatctgagggaccccggttcggtaatcgtggccttcaaagaaggagaacagaaggaaaaggagggcatccttcaacttcggaggactaactcagccaaacccagccccctggccagcagttctacagcatcatcaacaacttccatctgcgtctgcggacaggtgcttgcgggtgcaggtgcactccagtgcgacctgtgccaggattggtttcacggccgttgtgtcagtgtgccaagacttctttcttcaccgaggcctaacccaacctccagcccactactcgcctggtgggagtgggatacgaaattcctctgtccactatgcatgcggtcaagaagaccccgacttgagactattctggctcttctggtggccctgcagagattgcccgtccggctacccgagggcgaggctctgcagtgcctgaccgaaagagcaatctcttggcagggaagggccagacaggccctggcatctgaggatgtgaccgccctgctgggcaggctggcggaactgagacaaaggctgcaggccgagccaagacctgaagagcctcccaattatcctgccgctcccgctagcgacccactcagagagggttcagggaaggatatgcctaaggtacagggactgttggagaatggagattccgtaacatctcccgagaaggtggcacctgaggagggtagcgacttagaactcctgagctcactattaccccagttgacgggccctgtcttggaactgcccgaagcgactagagcgccactggaggaacttatgatggaaggagacctactcgaggtcaccctggatgagaatcactccatctggcaactgttacaagccggacagcctcccgacctcgagaggatcaggacattgctcgagctggagaaagcagaaagacacggaagtcgcgcaaggggtagagccctggagagaagaaggcgcaggaaagtggaccggggtggcgaaggagacgaccccgctcgtgaagaactggaacccaagagagtgcggtcatcaggccctgaggcagaggaggtccaggaggaagaggaactggaggaggagactggcggtgaagggcctcctgcgccaatcccgaccaccggctccccgagtacccaagaaaatcaaaatgggttggagcccgcagaaggcacgactagcggcccttccgccccttttagtaccttaacccccaggttacacctcccctgtccacagcagcctccacagcaacaactttag

SEQ ID NO: 277750 - DNA, 4674 bp, Artificial Sequence
  derived and/or modified sequence
atggagcccggcagcgacgacttcctgcccccccccgagtgccccgtgttcgagcccagctgggccgagttcagagaccccctgggctacatcgccaagatcagacccatcgccgagaagagcggcatctgcaagatcagaccccccgccgactggcagccccccttcgccgtggaggtggacaacttcagattcacccccagaatccagagactgaacgagctggaggcccagaccagagtgaagctgaactacctggaccagatcgccaagttctgggagatccagggcagcagcctgaagatccccaacgtggagagaagaatcctggacctgtacagcctgagcaagatcgtggtggaggagggcggctacgaggccatctgcaaggacagaagatgggccagagtggcccagagactgaactacccccccggcaagaacatcggcagcctgctgagaagccactacgagagaatcgtgtacccctacgagatgtaccagagcggcgccaacctggtgcagtgcaacaccagacccttcgacaacgaggagaaggacaaggagtacaagccccacagcatccccctgagacagagcgtgcagcccagcaagttcaacagctacggcagaagagccaagagactgcagcccgaccccgagcccaccgaggaggacatcgagaagaaccccgagctgaagaagctgcagatctacggcgccggccccaagatgatgggcctgggcctgatggccaaggacaagaccctgagaaagaaggacaaggagggccccgagtgcccccccaccgtggtggtgaaggaggagctgggcggcgacgtgaaggtggagagcaccagccccaagaccttcctggagagcaaggaggagctgagccacagccccgagccctgcaccaagatgaccatgagactgagaagaaaccacagcaacgcccagttcatcgagagctacgtgtgcagaatgtgcagcagaggcgacgaggacgacaagctgctgctgtgcgacggctgcgacgacaactaccacatcttctgcctgctgccccccctgcccgagatccccaagggcgtgtggagatgccccaagtgcgtgatggccgagtgcaagagaccccccgaggccttcggcttcgagcaggccaccagagagtacaccctgcagagcttcggcgagatggccgacagcttcaaggccgactacttcaacatgcccgtgcacatggtgcccaccgagctggtggagaaggagttctggagactggtgaacagcatcgaggaggacgtgaccgtggagtacggcgccgacatccacagcaaggagttcggcagcggcttccccgtgagcgacagcaagagacacctgacccccgaggaggaggagtacgccaccagcggctggaacctgaacgtgatgcccgtgctggagcagagcgtgctgtgccacatcaacgccgacatcagcggcatgaaggtgccctggctgtacgtgggcatggtgttcagcgccttctgctggcacatcgaggaccactggagctacagcatcaactacctgcactggggcgagcccaagacctggtacggcgtgcccagcctggccgccgagcacctggaggaggtgatgaagaagctgacccccgagctgttcgacagccagcccgacctgctgcaccagctggtgaccctgatgaaccccaacaccctgatgagccacggcgtgcccgtggtgagaaccaaccagtgcgccggcgagttcgtgatcaccttccccagagcctaccacagcggcttcaaccagggctacaacttcgccgaggccgtgaacttctgcaccgccgactggctgcccgccggcagacagtgcatcgagcactacagaagactgagaagatactgcgtgttcagccacgaggagctgatctgcaagatggccgcctgccccgagaagctggacctgaacctggccgccgccgtgcacaaggagatgttcatcatggtgcaggaggagagaagactgagaaaggccctgctggagaagggcatcaccgaggccgagagagaggccttcgagctgctgcccgacgacgagagacagtgcatcaagtgcaagaccacctgcttcctgagcgccctggcctgctacgactgccccgacggcctggtgtgcctgagccacatcaacgacctgtgcaagtgcagcagcagcagacagtacctgagatacagatacaccctggacgagctgcccgccatgctgcacaagctgaaggtgagagccgagagcttcgacacctgggccaacaaggtgagagtggccctggaggtggaggacggcagaaagagaagcctggaggagctgagagccctggagagcgaggccagagagagaagattccccaacagcgagctgctgcagcagctgaagaactgcctgagcgaggccgaggcctgcgtgagcagagccctgggcctggtgagcggccaggaggccggcccccacagagtggccggcctgcagatgaccctgaccgagctgagagccttcctggaccagatgaacaacctgccctgcgccatgcaccagatcggcgacgtgaagggcgtgctggagcaggtggaggcctaccaggccgaggccagagaggccctggccagcctgcccagcagccccggcctgctgcagagcctgctggagagaggcagacagctgggcgtggaggtgcccgaggcccagcagctgcagagacaggtggagcaggccagatggctggacgaggtgaagagaaccctggcccccagcgccagaagaggcaccctggccgtgatgagaggcctgctggtggccggcgccagcgtggcccccagccccgccgtggacaaggcccaggccgagctgcaggagctgctgaccatcgccgagagatgggaggagaaggcccacctgtgcctggaggccagacagaagcacccccccgccaccctggaggccatcatcagagaggccgagaacatccccgtgcacctgcccaacatccaggccctgaaggaggccctggccaaggccagagcctggatcgccgacgtggacgagatccagaacggcgaccactacccctgcctggacgacctggagggcctggtggccgtgggcagagacctgcccgtgggcctggaggagctgagacagctggagctgcaggtgctgaccgcccacagctggagagagaaggccagcaagaccttcctgaagaagaacagctgctacaccctgctggaggtgctgtgcccctgcgccgacgccggcagcgacagcaccaagagaagcagatggatggagaaggagctgggcctgtacaagagcgacaccgagctgctgggcctgagcgcccaggacctgagagaccccggcagcgtgatcgtggccttcaaggagggcgagcagaaggagaaggagggcatcctgcagctgagaagaaccaacagcgccaagcccagccccctggccagcagcagcaccgccagcagcaccaccagcatctgcgtgtgcggccaggtgctggccggcgccggcgccctgcagtgcgacctgtgccaggactggttccacggcagatgcgtgagcgtgcccagactgctgagcagccccagacccaaccccaccagcagccccctgctggcctggtgggagtgggacaccaagttcctgtgccccctgtgcatgagaagcagaagacccagactggagaccatcctggccctgctggtggccctgcagagactgcccgtgagactgcccgagggcgaggccctgcagtgcctgaccgagagagccatcagctggcagggcagagccagacaggccctggccagcgaggacgtgaccgccctgctgggcagactggccgagctgagacagagactgcaggccgagcccagacccgaggagccccccaactaccccgccgcccccgccagcgaccccctgagagagggcagcggcaaggacatgcccaaggtgcagggcctgctggagaacggcgacagcgtgaccagccccgagaaggtggcccccgaggagggcagcgacctggagctgctgagcagcctgctgccccagctgaccggccccgtgctggagctgcccgaggccaccagagcccccctggaggagctgatgatggagggcgacctgctggaggtgaccctggacgagaaccacagcatctggcagctgctgcaggccggccagccccccgacctggagagaatcagaaccctgctggagctggagaaggccgagagacacggcagcagagccagaggcagagccctggagagaagaagaagaagaaaggtggacagaggcggcgagggcgacgaccccgccagagaggagctggagcccaagagagtgagaagcagcggccccgaggccgaggaggtgcaggaggaggaggagctggaggaggagaccggcggcgagggcccccccgcccccatccccaccaccggcagccccagcacccaggagaaccagaacggcctggagcccgccgagggcaccaccagcggccccagcgcccccttcagcaccctgacccccagactgcacctgccctgcccccagcagcccccccagcagcagctgtag

SEQ ID NO: 277751 - DNA, 5076 bp, Artificial Sequence
  derived and/or modified sequence
atgaagctgcggggcgtgagcctggccgccggcctgttcctgctggccctcagcctgtggggacagccagcagaagcagcagcatgctacgggtgctcccccggatccaaatgtgattgttccggaatcaagggcgaaaaaggcgagagaggatttcccggccttgaaggacaccctgggcttcctgggtttcccgggcctgaaggcccgccgggcccgaggggacagaagggagatgacggtatccccggaccaccaggaccaaaggggatcagggggcctccaggcctgcccgggtttccaggcactcccggtctacctgggatgccaggccacgatggcgctccaggccctcaggggattcctggctgtaatggtaccaagggcgagaggggattcccggggtcacccgggtttcctggcttgcaggggcccccagggccacctggaatcccgggcatgaagggggaacccggatctattattatgagctcacttcctggcccgaaggggaatcccgggtacccagggcctcccgggattcagggcctacccggcccaacgggaatcccagggccaattggtccccctgggccccccggcttgatgggacctcccggaccccctggcctgccaggacctaagggaaacatggggcttaattttcagggaccaaagggcgaaaaaggtgagcaggggctccaaggaccaccagggccacccggccaaatttcagaacagaagcgtccgattgacgtcgagttccagaaaggagatcaggggctcccaggtgaccgcgggccgcccgggcccccgggcatccggggtcctccgggtcctcccggaggagaaaagggggaaaagggggaacagggagagccagggaagagaggcaagcccggcaaggatggagagaatggacagcccgggatacccggcctgccaggagaccctgggtatcctggcgagccgggcagggatggtgaaaagggtcaaaagggagacacgggccctccaggcccccccggtctggtcattcctcgacccgggacaggaattacgataggcgaaaaggggaacataggactgcccggtctcccaggcgagaaaggcgagagggggttccctggcatccaggggcccccaggactgcccgggccccctggcgctgctgtgatgggaccaccgggcccaccaggctttccaggagagcgggggcaaaaaggagacgagggtccacccggtatctctataccaggcccacctggcctggacggccagcctggcgcacccggcttgccaggtccgcccggcccggccggacctcatattcctccatccgacgaaatctgcgagcccggacctcccggcccccccggatcccccggggacaaggggctccagggagagcagggtgtgaagggagataaaggagacacgtgtttcaactgcattgggaccggcatcagtgggcccccaggacagccgggcttaccgggactcccaggaccccctgggagcctcggattccccggccaaaaaggcgaaaagggccaggccggagctacaggcccgaagggcctgcccgggatccccggcgctcctggagcacctgggttccctgggtccaagggggaacccggcgacatcctcacttttcctggtatgaaaggggacaaaggcgaactggggtcacctggcgccccaggtctgccgggattgcccggcacgcctggtcaggatggtctaccagggctaccggggcccaagggtgaacctggtgggatcacatttaagggggagcgtgggcctcctggcaaccccggactccccggcctccccggaaatataggccctatgggccctccagggttcgggccgccagggcccgtgggagagaaagggatccaaggcgttgctgggaatccaggacaaccggggattcctgggccaaagggcgatcctggacagacaattacccaacccggcaagcccggactgcctggcaatcctggccgagacggcgacgtcggcctgcccggggatcctggattacccggccagcccggactgccaggaatccctggctccaagggagagcccggcatcccaggcattggcctaccaggcccccctgggcccaaaggattccctggaattcccggcccaccaggggcccccggaactcctggccgaattggccttgagggtcctcccgggccaccagggtttccaggaccaaaaggcgaaccagggtttgctctcccgggtccacctgggccaccaggcttgcctgggtttaagggcgccttaggacctaagggagacagaggcttccccggtcctcccggcccgcctggccggaccggtctcgatggattgccaggaccaaagggggatgtgggaccaaacgggcaacctggtccaatgggacctcccgggctgcccggtataggggtacagggcccgcctggacctccagggattccaggtcctattgggcagcccggccttcatgggatccccggcgaaaagggggacccgggaccaccaggactggatgttccaggaccccctggagaacgagggtctccgggcatccccggcgcccctggacccatcggtccgccggggagccccggcctgcctgggaaggcgggagcatctggatttccgggaaccaagggtgagatggggatgatgggtccaccaggccccccaggtcctcttgggatccctgggaggtctggagtgccaggacttaaaggcgacgacggtttacagggccaacctggactgccaggccctacaggggagaagggaagtaagggcgaaccaggattgcctggccctcctgggcccatggaccctaaccttctgggtagcaagggcgagaagggcgaaccaggtctacctgggatccccggggtttcgggccctaaaggttaccagggactccccggcgatcccgggcaaccaggactgtcgggccagcctgggctccctggacccccgggacctaagggcaatcctgggttgccaggccaaccagggttgatcgggcccccaggcctgaaggggacgatcggggatatgggcttccctggccctcagggtgtcgagggacctcccgggccatccggagtgccgggacagcctggttcacccggactgcctgggcagaagggcgacaagggcgatccaggaatttcctccatcggcctgcccggcctgcctgggcctaaaggcgagccaggactgcctggctacccagggaatccaggcataaagggatcagtgggtgatcccggcctcccaggacttcccggcacaccaggggccaagggtcaacccgggctcccaggattcccagggacaccgggcccccccggccctaagggtatcagtgggcctcctggaaaccccggtctcccaggagagccaggccctgtgggcggtggcggacaccccggacaacctggccctcccggggaaaaaggcaagcccggccaagatggtattcccggacctgctggacagaagggcgagccaggccaacccggatttggcaatcccggaccccccggcctacctgggctctccgggcaaaaaggagatggcggtctacctggcattcccgggaatcccggactgcctggcccgaagggcgagcctggcttccacggtttccccggcgtgcagggcccgcccgggccccccggtagccctggcccagcacttgagggaccaaagggaaatcccggaccacaaggaccaccagggcgccccgggccaaccggttttcagggcctgcccggccccgaagggccgcccggtctgcccggtaatggaggcatcaagggtgaaaaaggcaaccctggccagcctggtctgcctgggctgcctggactgaagggcgatcaaggcccacccggccttcagggtaaccccgggaggccagggctgaatggcatgaagggagacccaggccttccgggcgttccaggtttccccggtatgaaagggccatcaggggtcccgggatccgctggaccagagggagaaccaggccttatcgggccgccaggcccacccggactgccaggaccgtctggacagtcaatcataattaaaggcgacgctggtccacctggaattccgggccaaccaggtttaaagggactgcctggcccacaggggccccagggactgcctggcccaactggccctcctggcgacccagggagaaacggcctcccaggattcgacggagcaggtggccggaagggcgacccgggcctacccggccagcccggcaccaggggcctggatggccctcctggacccgatgggttgcagggcccccctggtcccccggggacctcctccgtggcacatgggttcctgattacgcggcactctcaaaccacggacgcccctcagtgtccacagggcactctgcaagtctatgaaggcttcagtcttttatatgtccaggggaacaaaagggcccacgggcaggacctgggaactgcaggctcttgtctccggcgctttagcaccatgccatttatgttctgcaatatcaataacgtttgcaacttcgccagcagaaatgattacagctactggcttagcacaccagagccaatgcctatgtctatgcaaccgctcaaaggtcagtcaatccagccttttatctccagatgcgccgtctgtgaagccccggctgtcgttatcgctgtgcatagtcaaacaattcagattccacactgtccacagggatgggactcactatggatcggctattcttttatgatgcacacatctgctggcgcagaggggtctggccaggctctggcctctcctggctcctgcctggaggagttccggtccgccccattcatcgagtgtcacgggagaggcacctgtaattactacgccaatagttactccttctggctggccacggtcgacgttagcgacatgttctctaagccacagtcagaaaccttaaaagctggtgatctgcgcactaggattagcaggtgccaggtctgtatgaagcggacttag

SEQ ID NO: 277752 - DNA, 319 bp, Artificial Sequence
  derived and/or modified sequence
agcgccgggagactctgccgtcggtgcgtgcgcggacacgcacccgtcccccttggtctcgccgccagccatggccgccgctacggcctccccccgcagcctccttgttctcctccaggtggtagtgctcgctctggcgcagattagaggtccaccgggagagcggggccccccgggtcccccgggaccgccgggagtgcctggatccgacggcatcgacgggcctcctggacctgttggcctccctggtgagattggaatccgaggccccaagggggaccctggaccagatggaccatcggggcccccaggaccccct

SEQ ID NO: 277753 - DNA, 153 bp, Artificial Sequence
  derived and/or modified sequence
ccatcctttctgctgttctttctgccctcctttctacctttttcactgtcttcgctgtctttccttccgttcctgctttcgttcctgactggctcctttggccaagataaagtcttttctataactcatactcacacacatacacatacctag

SEQ ID NO: 277754 - protein, 675 aa, Artificial Sequence
  derived and/or modified sequence
MPRAQPSSASYQPVPADPFAIVSRAQQMVEILSDENRNLRQELEGCYEKVARLQKVETEIQRVSEAYENLVKSSSKREALEKAMRNKLEGEIRRMHDFNRDLRERLETANKQLAEKEYEGSEDTRKTISQLFAKNKESQREKEKLEAELATARSTNEDQRRHIEIRDQALSNAQAKVVKLEEELKKKQVYVDKVEKMQQALVQLQAACEKREQLEHRLRTRLERELESLRIQQRQGNCQPTNVSEYNAAALMELLREKEERILALEADMTKWEQKYLEENVMRHFALDAAATVAAQRDTTVISHSPNTSYDTALEARIQKEEEEILMANKRCLDMEGRIKTLHAQIIEKDAMIKVLQQRSRKEPSKTEQLSCMRPAKSLMSISNAGSGLLSHSSTLTGSPIMEEKRDDKSWKGSLGILLGGDYRAEYVPSTPSPVPPSTPLLSAHSKTGSRDCSTQTERGTESNKTAAVAPISVPAPVAAAATAAAITATAATITTTMVAAAPVAVAAAAAPAAAAAPSPATAAATAAAVSPAAAGQIPAAASVASAAAVAPSAAAAAAVQVAPAAPAPVPAPALVPVPAPAAAQASAPAQTQAPTSAPAVAPTPAPTPTPAVAQAEVPASPATGPGPHRLSIPSLTCNPDKTDGPVFHSNTLERKTPIQILGQEPDAEMVEYLI

SEQ ID NO: 277755 - protein, 182 aa, Artificial Sequence
  derived and/or modified sequence
MIKVLQQRSRKEPSKTEQLSCMRPAKSLMSISNAGSGLLSHSSTLTGSPIMEEKRDDKSWKGSLGILLGGDYRAEYVPSTPSPVPPSTPLLSAHSKTGSRDCSTQTERGTESNKTAAVAPISVPAPVAAAATAAAITATAATITTTMAAAAAPSPATAAATAAAVSPAAAGQIPAAASVASA

SEQ ID NO: 277756 - DNA, 2028 bp, Artificial Sequence
  derived and/or modified sequence
atgccccgggctcaaccttcttccgcttcctaccagccagttccagctgacccatttgctatcgtgtctagagcacagcagatggtggagatactcagtgacgagaaccgaaatctgaggcaggagctggagggctgttacgagaaagtggcccgactacagaaggtcgaaacagagatccaacgggtatccgaagcctatgaaaatctggtgaagtcctctagtaaaagggaggctcttgaaaaggcaatgaggaacaaactagaaggcgagattcggagaatgcacgacttcaaccgagatttgcgggaacgcctggagactgccaataagcagctggcagagaaggaatatgagggctctgaggataccagaaagaccatttcacaactgttcgccaaaaacaaggagagccagcgtgaaaaggaaaagctagaagccgagttggctaccgctcgctcgaccaatgaagaccagcgtcgtcacatcgagatccgtgatcaggcgcttagcaacgcgcaagccaaggtggtgaaactggaggaagaactgaagaagaagcaggtgtatgtggataaggtggagaagatgcaacaggcactagtgcagctgcaggcggcctgcgagaagcgcgagcagttagagcaccgattgagaactcggctggaacgcgaactggaatccctgcggatccagcagcgacagggcaattgccaacctacgaacgtgtcagagtacaatgccgctgcactgatggagttgctgcgcgaaaaggaagagagaatcctagcgctggaggcggatatgaccaagtgggagcagaagtatttagaagaaaacgttatgcgacattttgcgctcgatgcggcggcaacagtcgctgcacaacgcgatactaccgttataagccatagtccaaatactagttacgatacagccctggaggctagaatccagaaggaggaggaagaaatcctgatggctaacaaaaggtgcctggatatggagggtcgcattaagaccctccacgcacagatcattgagaaagatgcaatgattaaggtacttcagcagcgaagtcggaaagagccctcaaagacagagcagctgtcttgcatgcggcccgctaagagcctaatgagtatttctaacgccggaagcggactcctttcccactcttctaccttaaccggatctccgattatggaagagaaacgggatgacaagagctggaagggtagtctaggaattcttctgggtggagactatcgcgccgaatacgtgccctcaaccccgtcacccgtcccaccatctacccctctgctgagcgctcattccaaaaccggctctcgcgattgttctacccaaacggagagggggaccgaaagcaacaagactgcggcagtcgctcccatttccgtgcccgccccagtggcagcagccgctactgctgcggcgatcacagctactgccgccacaataaccactaccatggtggcagccgccccagtagccgtggccgcagccgccgctcccgccgccgctgccgcaccctctcccgcaaccgccgccgccactgccgccgccgtgagccccgctgcagctggccagatccctgcagcagccagtgtcgccagtgctgcagctgttgccccgagtgcagccgcagccgcagctgtgcaagtggcaccggcagcacccgcccctgtaccagcgcccgcccttgtgcccgtaccagctccggccgcagcccaggcatccgcaccagcacaaacccaagcaccaacttcagcccccgcggtggcaccaaccccagcgccaaccccgacccccgccgtggctcaggccgaggtacctgcctccccagctacggggccagggcctcaccggctgtctatcccttcactgacttgcaatcctgataaaactgatgggccagttttccattcgaataccctggaacggaaaacacccattcagatacttggccaggagcctgatgcggaaatggtggaatacctcatttag

SEQ ID NO: 277757 - DNA, 549 bp, Artificial Sequence
  derived and/or modified sequence
atgataaaggtcctgcagcagcggagtagaaaggaaccatccaagactgaacagttgtcctgcatgagaccagctaagagtctgatgagcatctcaaacgctgggtctgggttactgagtcattcgtctacactgaccggatctccgatcatggaagagaaacgagatgacaaatcttggaagggtagtctaggaattctgcttggcggagactatagggccgaatacgtgccttcaaccccgagccccgtacctccatctactccgcttctgagcgctcatagcaaaacaggtagcagggactgttccacccagactgagcggggtaccgaatctaacaaaacagccgctgtggcccccatctcagtgcccgctccagtcgccgcagcagctaccgcagccgccatcactgctactgcagcaaccataaccactaccatggccgctgccgccgcgccaagccctgcaacggcagctgcaaccgccgctgccgtgtcccccgctgccgccgggcaaatcccagcggccgcctctgtggcttcagcctag

SEQ ID NO: 277758 - DNA, 2028 bp, Artificial Sequence
  derived and/or modified sequence
atgccccgggcccagcccagcagcgccagctaccagcctgtgcctgctgacccctttgccatcgtgtcccgggcccagcagatggtggagatcctgagtgatgaaaatagaaacctgcggcaggagctggagggctgctatgagaaggtggcccggctgcagaaggtggagacagagatccagagggtgtctgaggcctatgagaacctggtgaagagcagcagcaagcgggaggccctggagaaggccatgaggaacaagctggagggggagatccggaggatgcatgacttcaacagagacctgcgggagcggctggagacagccaacaagcagctggccgagaaggagtatgagggcagcgaggacaccaggaagaccatcagccagctgtttgccaagaacaaggagagccagcgggagaaggagaagctggaggccgagctggccacagcccggagcaccaatgaagaccagaggaggcacatcgagatccgggaccaggccctgagcaatgcccaggccaaggtggtgaagctggaggaggagctgaagaagaagcaggtgtatgtggacaaggtggagaagatgcagcaggccctggtgcagctgcaggccgcctgtgagaagcgggagcagctggagcaccggctgcggacccggctggagcgggagctggagagcctgcgcatccagcagaggcagggcaactgccagcccaccaacgtgtctgagtacaatgctgctgccctgatggagctgctgcgggagaaggaggagcgcatcctggccctggaggccgacatgaccaagtgggagcagaagtacctggaggagaatgtgatgaggcactttgccctggatgctgctgccaccgtggccgcccagagggacaccaccgtcatcagccacagccccaacaccagctatgacacagccctggaggcccgcatccagaaggaggaggaggagatcctgatggccaacaagcgctgcctggacatggagggccgcatcaagaccctgcacgcccagatcatcgagaaggatgccatgatcaaggtgctgcagcagaggagcaggaaggagcccagcaagacagagcagctgagctgcatgaggcctgccaagagcctgatgagcatcagcaatgccggcagcggcctgctgagccacagcagcaccctgaccggcagccccatcatggaggagaagagagatgacaagtcctggaagggcagcctgggcatcctgctgggcggggactacagagcagaatatgtgcccagcacccccagccctgtgccccccagcacccccctgctgagcgcccacagcaagacaggcagccgggactgcagcacccagacagagcggggcacagagagcaacaagacagctgctgtggcccccatctctgtgcctgcccctgtggccgctgctgccacagctgctgccatcacagccacagctgccaccatcaccaccaccatggtggccgccgcccctgtggccgtggccgctgctgctgccccagctgctgctgctgcccccagccctgccacagctgctgccacagctgctgctgtgtccccagctgctgctggccagatcccagctgctgcctctgtggccagcgctgctgctgtggcccccagcgctgctgctgctgctgctgtgcaggtggccccagctgccccagcccctgtgcctgccccagccctggtgcctgtgcctgccccagctgctgcccaggccagcgccccagcccagacccaggcccccaccagcgccccagctgtggcccccaccccagcccccacccccaccccagctgtggcccaggccgaggtgcctgccagccctgccaccggccctggcccccaccggctgagcatccccagcctgacctgcaacccagacaagacagatggccctgtgttccacagcaacaccctggagaggaagacccccatccagatcctgggccaggagccagatgctgagatggtggagtacctgatctag

SEQ ID NO: 277759 - DNA, 549 bp, Artificial Sequence
  derived and/or modified sequence
atgatcaaggtgctgcagcagaggagcaggaaggagcccagcaagacagagcagctgagctgcatgaggcctgccaagagcctgatgagcatcagcaatgccggcagcggcctgctgagccacagcagcaccctgaccggcagccccatcatggaggagaagagagatgacaagtcctggaagggcagcctgggcatcctgctgggcggggactacagagcagaatatgtgcccagcacccccagccctgtgccccccagcacccccctgctgagcgcccacagcaagacaggcagccgggactgcagcacccagacagagcggggcacagagagcaacaagacagctgctgtggcccccatctctgtgcctgcccctgtggccgccgccgccacagctgctgccatcacagccacagctgccaccatcaccaccaccatggctgctgctgctgcccccagccctgccacagctgctgccacagctgctgctgtgtccccagctgctgctggccagatcccagctgctgcctctgtggccagcgcctag

SEQ ID NO: 277760 - DNA, 2028 bp, Artificial Sequence
  derived and/or modified sequence
atgccccgggcccagcccagcagcgccagctaccagcccgtgcccgcagatccttttgccatcgtgtctagggcccagcaaatggtcgagatcctgtccgatgaaaacaggaatctgagacaggaactggagggctgctatgagaaggtagccagactgcagaaagtcgagactgagatccagagagttagcgaggcgtacgaaaacctggtgaaatctagtagcaagagagaggccctagagaaagcaatgcgaaacaagcttgaaggcgagatccgtcgcatgcatgactttaaccgcgatctaagggagcgactggagaccgcaaacaagcagctggccgagaaggagtacgagggatcagaagatacccggaagacaattagccaactgttcgccaaaaacaaggaatcacagagagagaaggagaaactggaggctgagctggccacagcaaggtccaccaacgaggaccagaggcgtcacatagaaattagagatcaagcgcttagcaacgctcaggctaaggttgtgaaactcgaagaagagcttaagaagaagcaggtgtatgttgacaaggtggagaagatgcagcaggcgttagtgcagctgcaagccgcctgcgaaaagagagagcaactcgaacataggctccggacccggctagagagagagttggaaagcctgaggatccagcagcggcagggaaattgtcaacccactaacgtgagcgaatacaatgccgcagccttaatggagctccttagagaaaaagaagagcggattcttgctcttgaagcagacatgaccaagtgggaacagaaatatctggaagaaaacgttatgcgtcatttcgcactggatgcagccgctaccgttgccgcacagagagacaccactgtgatctcccactcccctaatacatcttatgatacagccctggaagcccgcatacaaaaggaggaggaagagatacttatggctaacaaacggtgtctcgatatggaaggccgtattaagacactacacgctcaaatcattgagaaggacgctatgattaaggtgctgcaacaaagaagtaggaaggaacccagcaagacagagcagctgagctgcatgagacctgccaagtctctgatgtcaatcagcaatgccgggagtgggcttctgtcccacagtagcaccttgaccggttctccaattatggaagaaaaaagggacgacaaatcctggaaaggaagccttggaatcctcctcgggggggattatagagctgagtatgtccctagtactcctagccccgtgccgccctctactcccctcttaagcgcccattccaagactggtagcagggattgttccacccagactgaacgcggaaccgaaagtaataagacagcagcggtggctccaatctctgtccctgccccggttgccgccgccgccaccgccgcagccatcaccgccacagcagctaccattaccacaactatggtggccgcagcacctgttgctgtagctgcagctgcagctccggctgcagctgccgcaccctctcccgccaccgccgccgccacagccgccgctgtttcccccgctgctgccggccagatacctgcagctgcctcagtggcctccgccgccgccgtggctccctcggctgccgccgcagctgcagtgcaggtagcccctgccgcgcctgccccagtgcctgcacctgctctggtgcctgtcccggcgcctgcggcagctcaggcatcagctcctgcccaaacacaggctcccacgagcgcccctgccgtcgcacccacgccagcgcctaccccaactcctgcggtggcacaggccgaggtgccggcatctcctgctaccggaccaggcccccacagacttagtatcccttcgctgacctgcaatcccgacaagaccgacgggccagtctttcattcaaataccctggaaagaaagacacctatccagatcttaggccaagagccagacgccgagatggttgagtacctgatttag

SEQ ID NO: 277761 - DNA, 549 bp, Artificial Sequence
  derived and/or modified sequence
atgatcaaggtgctgcagcagcggagccggaaggagcccagcaagacggagcaattatcttgtatgcgccccgccaagtctttgatgtcaatttctaatgctggcagcgggttgctgtcccactcaagcactttgaccggctcccctattatggaggagaaaagagatgataaaagttggaagggatcactgggtatcctgctggggggggactaccgcgctgagtatgtgccgtccacacctagcccagttccgccatccacccccttgctgtccgctcactctaaaactggatcacgcgattgtagcacacagacagagcgaggcaccgagagcaataagacagcagcggtcgctcccatatcagtaccagcccctgtggctgccgccgcaaccgcggcagcaatcacagcgactgctgcaaccattacaactaccatggctgctgcagcagcaccaagtccggcaacagccgctgcaactgctgctgcagtctccccagctgcggctggccagatccctgcagccgcttccgtcgcaagcgcctag

SEQ ID NO: 277762 - DNA, 300 bp, Artificial Sequence
  derived and/or modified sequence
atgagctgccagcagaaccagcagcagtgccagcccccccccaagtgtcctatcccgaaatatccacctaagtgtccttcgaaatgcgccagtagttgcccaccacctatctcgagctgctgcggctcctcaagcggtggctgcggatgttgttccagcgagggcggcggatgttgtctgagccaccaccggcatcacaggtcccattgccatcgcccaaagtcgagcaactgttacgggagtggcagcggccagcagtccggcgggtcggggtgctgttccggcgggggatgctgttag

SEQ ID NO: 277763 - DNA, 2028 bp, Artificial Sequence
  derived and/or modified sequence
atgcccagggcccagccttcatctgcttcttaccagcccgtcccagccgacccgttcgccatcgtctctcgagctcagcaaatggtcgagattctgtcagatgaaaacagaaatctccgacaagagttggagggatgttatgagaaggttgcccgtctacaaaaggtcgaaacagagatccaaagagtcagcgaggcctatgagaatctggtcaaaagctcttccaagcgcgaggcgcttgaaaaagccatgcggaataaactggaaggagagattagacgcatgcatgattttaaccgggacttacgggagcgattggaaacggcgaacaaacagttggccgagaaagagtatgaagggagcgaggatacaaggaagacaatctcccaattgtttgccaaaaacaaagagtctcagagagaaaaagaaaagctggaggccgagctcgcaaccgcacgcagtactaatgaggaccagcgccgacatatcgagatccgagaccaagcactctctaacgcccaggctaaagtcgtgaagctcgaagaagagctaaagaaaaagcaggtgtacgtggacaaagtggagaagatgcagcaggctttggtgcagttgcaagccgcttgtgagaaacgcgagcaattggagcatcggctccggacccgtctggagagggagctcgagagcttgagaatccagcaaaggcagggtaattgccaacctaccaacgtgtccgagtataacgctgctgcgctcatggaactcttaagagaaaaagaagagaggatcctggccttggaagctgacatgactaaatgggagcagaagtatttggaggagaatgtgatgcggcacttcgctctggacgccgcagcaaccgtggcagctcagagggacactactgttatttcgcattcgcctaatactagctacgatactgcattggaagctcgaatccagaaagaagaagaggaaattctgatggccaataaaagatgcctcgacatggagggaaggataaaaacccttcacgcacagatcatcgaaaaggacgcaatgattaaggttctgcagcagagaagcaggaaggagccatcaaagacagaacagctgagctgtatgcgcccagcgaaatctctaatgtctatctcgaacgccggttccggcctcctgtcgcattctagcacactgaccggctctccaatcatggaggaaaaaagagatgacaagtcatggaaagggagcctgggcatcctacttgggggtgattaccgagctgaatatgtgcccagcacaccaagccccgtaccaccgagtacacccctgttgagcgctcattccaagactgggtcacgggactgcagcacccaaacagagaggggaacagagtctaataagactgcggcagtggcgccaatcagcgttcctgcacctgttgctgctgcggcaactgccgctgcgattaccgccactgctgctaccattacgaccaccatggtcgccgcagcccctgttgccgttgccgctgctgcggctccagccgctgcggctgccccatccccagctactgcagctgctacagccgcagctgttagtccggctgcagctgggcagattcccgctgctgcctcagtcgcttccgcagccgcagttgcaccgtcggcagcggctgccgcagcagtccaggtcgcgccagcggctccagcccctgttcccgctccagccctagtgccggtcccagctcctgcggcagcacaggcctccgctcctgctcagacccaggctcccacgtctgctcctgcagtagctcctacccctgccccaaccccaactccagcagttgcacaggcggaagtgcccgcaagcccagcaacgggcccaggcccacaccggctcagtatccccagcttaacctgcaatcccgataaaacagacggtccagtcttccattcaaatactctcgagcgtaaaaccccaatacagatcctgggacaagagcctgatgccgaaatggtcgagtacctgatctag

SEQ ID NO: 277764 - DNA, 549 bp, Artificial Sequence
  derived and/or modified sequence
atgatcaaggtcctgcagcagcgctcaagaaaggaaccttccaagactgagcaactgtcctgtatgcgccctgccaagagcctaatgagcatttctaatgcagggagtgggctcctgagccacagcagcacgctaaccggctcaccaatcatggaagaaaagcgagacgacaagtcatggaaggggagcctcgggattctgctcggtggagattaccgagcggagtatgttccttccacacctagtcccgtgccaccaagcactccattgctaagtgcacatagcaaaactggctcccgcgattgtagcacccaaacagaacgtggcacggagagcaataagaccgccgctgtggcacccatctctgtccccgctccggtggccgctgccgcaactgcagcagcaattaccgccaccgccgcaaccattaccaccacaatggctgcggctgccgctccatctcctgccacagcagccgcaaccgctgctgcagtttctccagccgcagccggtcagatcccggctgcagcctctgtcgctagcgcgtag

SEQ ID NO: 277765 - DNA, 2028 bp, Artificial Sequence
  derived and/or modified sequence
atgcccagagcccagcccagcagcgccagctaccagcccgtgcccgccgaccccttcgccatcgtgagcagagcccagcagatggtggagatcctgagcgacgagaacagaaacctgagacaggagctggagggctgctacgagaaggtggccagactgcagaaggtggagaccgagatccagagagtgagcgaggcctacgagaacctggtgaagagcagcagcaagagagaggccctggagaaggccatgagaaacaagctggagggcgagatcagaagaatgcacgacttcaacagagacctgagagagagactggagaccgccaacaagcagctggccgagaaggagtacgagggcagcgaggacaccagaaagaccatcagccagctgttcgccaagaacaaggagagccagagagagaaggagaagctggaggccgagctggccaccgccagaagcaccaacgaggaccagagaagacacatcgagatcagagaccaggccctgagcaacgcccaggccaaggtggtgaagctggaggaggagctgaagaagaagcaggtgtacgtggacaaggtggagaagatgcagcaggccctggtgcagctgcaggccgcctgcgagaagagagagcagctggagcacagactgagaaccagactggagagagagctggagagcctgagaatccagcagagacagggcaactgccagcccaccaacgtgagcgagtacaacgccgccgccctgatggagctgctgagagagaaggaggagagaatcctggccctggaggccgacatgaccaagtgggagcagaagtacctggaggagaacgtgatgagacacttcgccctggacgccgccgccaccgtggccgcccagagagacaccaccgtgatcagccacagccccaacaccagctacgacaccgccctggaggccagaatccagaaggaggaggaggagatcctgatggccaacaagagatgcctggacatggagggcagaatcaagaccctgcacgcccagatcatcgagaaggacgccatgatcaaggtgctgcagcagagaagcagaaaggagcccagcaagaccgagcagctgagctgcatgagacccgccaagagcctgatgagcatcagcaacgccggcagcggcctgctgagccacagcagcaccctgaccggcagccccatcatggaggagaagagagacgacaagagctggaagggcagcctgggcatcctgctgggcggcgactacagagccgagtacgtgcccagcacccccagccccgtgccccccagcacccccctgctgagcgcccacagcaagaccggcagcagagactgcagcacccagaccgagagaggcaccgagagcaacaagaccgccgccgtggcccccatcagcgtgcccgcccccgtggccgccgccgccaccgccgccgccatcaccgccaccgccgccaccatcaccaccaccatggtggccgccgcccccgtggccgtggccgccgccgccgcccccgccgccgccgccgcccccagccccgccaccgccgccgccaccgccgccgccgtgagccccgccgccgccggccagatccccgccgccgccagcgtggccagcgccgccgccgtggcccccagcgccgccgccgccgccgccgtgcaggtggcccccgccgcccccgcccccgtgcccgcccccgccctggtgcccgtgcccgcccccgccgccgcccaggccagcgcccccgcccagacccaggcccccaccagcgcccccgccgtggcccccacccccgcccccacccccacccccgccgtggcccaggccgaggtgcccgccagccccgccaccggccccggcccccacagactgagcatccccagcctgacctgcaaccccgacaagaccgacggccccgtgttccacagcaacaccctggagagaaagacccccatccagatcctgggccaggagcccgacgccgagatggtggagtacctgatctag

SEQ ID NO: 277766 - DNA, 549 bp, Artificial Sequence
  derived and/or modified sequence
atgatcaaggtgctgcagcagagaagcagaaaggagcccagcaagaccgagcagctgagctgcatgagacccgccaagagcctgatgagcatcagcaacgccggcagcggcctgctgagccacagcagcaccctgaccggcagccccatcatggaggagaagagagacgacaagagctggaagggcagcctgggcatcctgctgggcggcgactacagagccgagtacgtgcccagcacccccagccccgtgccccccagcacccccctgctgagcgcccacagcaagaccggcagcagagactgcagcacccagaccgagagaggcaccgagagcaacaagaccgccgccgtggcccccatcagcgtgcccgcccccgtggccgccgccgccaccgccgccgccatcaccgccaccgccgccaccatcaccaccaccatggccgccgccgccgcccccagccccgccaccgccgccgccaccgccgccgccgtgagccccgccgccgccggccagatccccgccgccgccagcgtggccagcgcctag

SEQ ID NO: 277767 - protein, 465 aa, Artificial Sequence
  derived and/or modified sequence
MASQLTQRGALFLLFFLTPAVTPTWYAGSGYYPDESYNEVYAEEVPQAPALDYRVPRWCYTLNIQDGEATCYSPKGGNYHSSLGTRCELSCDRGFRLIGRRSVQCLPSRRWSGTAYCRQMRCHALPFITSGTYTCTNGVLLDSRCDYSCSSGYHLEGDRSRICMEDGRWSGGEPVCVDIDPPKIRCPHSREKMAEPEKLTARVYWDPPLVKDSADGTITRVTLRGPEPGSHFPEGEHVIRYTAYDRAYNRASCKFIVKVQVRRCPTLKPPQHGYLTCTSAGDNYGATCEYHCDGGYDRQGTPSRVCQSSRQWSGSPPICAPMKINVNVNSAAGLLDQFYEKQRLLIISAPDPSNRYYKMQISMLQQSTCGLDLRHVTIIELVGQPPQEVGRIREQQLSANIIEELRQFQRLTRSYFNMVLIDKQGIDRDRYMEPVTPEEIFTFIDDYLLSNQELTQRREQRDICE

SEQ ID NO: 277768 - DNA, 1398 bp, Artificial Sequence
  derived and/or modified sequence
atggccagccagctgacccagagaggcgccctgttcctgctgttcttcctgacccccgccgtgacccccacctggtacgccggcagcggctactaccccgacgagagctacaacgaggtgtacgccgaggaggtgccccaggcccccgccctggactacagagtgcccagatggtgctacaccctgaacatccaggacggcgaggccacctgctacagccccaagggcggcaactaccacagcagcctgggcaccagatgcgagctgagctgcgacagaggcttcagactgatcggcagaagaagcgtgcagtgcctgcccagcagaagatggagcggcaccgcctactgcagacagatgagatgccacgccctgcccttcatcaccagcggcacctacacctgcaccaacggcgtgctgctggacagcagatgcgactacagctgcagcagcggctaccacctggagggcgacagaagcagaatctgcatggaggacggcagatggagcggcggcgagcccgtgtgcgtggacatcgacccccccaagatcagatgcccccacagcagagagaagatggccgagcccgagaagctgaccgccagagtgtactgggacccccccctggtgaaggacagcgccgacggcaccatcaccagagtgaccctgagaggccccgagcccggcagccacttccccgagggcgagcacgtgatcagatacaccgcctacgacagagcctacaacagagccagctgcaagttcatcgtgaaggtgcaggtgagaagatgccccaccctgaagcccccccagcacggctacctgacctgcaccagcgccggcgacaactacggcgccacctgcgagtaccactgcgacggcggctacgacagacagggcacccccagcagagtgtgccagagcagcagacagtggagcggcagcccccccatctgcgcccccatgaagatcaacgtgaacgtgaacagcgccgccggcctgctggaccagttctacgagaagcagagactgctgatcatcagcgcccccgaccccagcaacagatactacaagatgcagatcagcatgctgcagcagagcacctgcggcctggacctgagacacgtgaccatcatcgagctggtgggccagcccccccaggaggtgggcagaatcagagagcagcagctgagcgccaacatcatcgaggagctgagacagttccagagactgaccagaagctacttcaacatggtgctgatcgacaagcagggcatcgacagagacagatacatggagcccgtgacccccgaggagatcttcaccttcatcgacgactacctgctgagcaaccaggagctgacccagagaagagagcagagagacatctgcgagtag

SEQ ID NO: 277769 - DNA, 1398 bp, Artificial Sequence
  derived and/or modified sequence
atggcttctcaactgacacaaagaggggctctttttttactcttttttctcaccccagctgtcacccccacttggtatgccggtagtggctactatcccgacgagtcgtacaacgaggtgtacgctgaagaagtgccgcaagcaccagctctcgactatcgagtccctagatggtgctacaccctcaacatccaggatggcgaggcaacctgttactcgcccaagggaggtaattatcattcaagcctggggacacgttgcgagcttagttgtgaccgcgggtttaggcttatcgggaggcgatctgttcagtgcctacctagtcggcgatggtccggaactgcttattgcagacaaatgcggtgccatgctctcccgttcatcacctcggggacttatacgtgtaccaatggagtgctactggattcgcggtgcgattactcttgcagttctggatatcatctcgagggggatcggtctcggatatgtatggaggacgggcggtggtccggcggcgaacccgtttgcgttgacattgacccccccaagattagatgccctcattccagggagaagatggccgaacccgaaaaactgaccgccagggtatattgggacccccccttggtcaaggatagcgccgatggcacgataaccagggtcaccctacggggcccggagccggggagtcattttccagaaggcgagcatgttatccggtataccgcttacgacagagcttataatcgggcatcatgtaaatttattgttaaggtgcaggtgaggcgctgccctacgcttaagccccctcagcacggatacctgacctgcactagcgctggcgacaactacggggctacctgcgagtatcattgtgacggcggatatgaccgccaggggactccgagtagggtttgccagtcatcccgacaatggtctggcagtccgcccatctgtgcccctatgaaaattaatgtgaacgtgaatagcgcagcgggtctgctggatcagttctacgaaaaacagcgacttctcattatctctgcccccgatccctcaaaccggtactacaagatgcagatctcgatgctccaacaatctacttgcggactggatctgcggcacgtgacgatcatcgaactagtggggcaacctcctcaggaggtcggaaggattagggaacagcagctcagcgcaaatatcatcgaggagctcagacagttccagcgtttgacaaggtcctacttcaatatggtccttatcgataaacagggaatcgaccgtgacaggtacatggagcccgttacccctgaggagatctttacctttatcgacgattatctattgagcaaccaggagttgacacagagaagagagcaacgcgacatctgcgagtag

SEQ ID NO: 277770 - DNA, 1398 bp, Artificial Sequence
  derived and/or modified sequence
atggccagccagctgacccagagaggagccctcttcctgctcttcttcctgaccccagctgtgacccccacctggtacgccggcagcggctactacccagatgagagctacaatgaggtgtatgcagaggaggtgccccaggccccagccctggactacagagtgccccgctggtgctacaccctgaacatccaggatggagaggccacctgctacagccccaagggcggcaactaccacagcagcctgggcacccgctgtgagctgagctgtgaccggggcttccgcctcatcggccgccgctctgtgcagtgcctgcccagccgccgctggagcggcacagcctactgccggcagatgcgctgccacgccctgcccttcatcaccagcggcacctacacctgcaccaatggagtgctgctggacagccgctgtgactacagctgcagcagcggctaccacctggagggggacaggagccgcatctgcatggaggatggccgctggagcggcggggagcctgtgtgtgtggacattgatcctcccaagatccgctgcccccacagccgggagaagatggccgagcctgagaagctgacagcccgggtgtactgggacccccccctggtgaaggacagcgcagatggcaccatcaccagggtgaccctgcggggccctgagcccggcagccacttccctgagggggagcacgtgatccgctacacagcctatgaccgggcctacaacagagccagctgcaagttcatcgtgaaggtgcaggtgcggcgctgccccaccctgaagccaccccagcacggctacctgacctgcaccagcgctggggacaactacggggccacctgtgagtaccactgtgatggcggctatgaccggcagggcacccccagccgggtgtgccagagcagccggcagtggagcggcagcccccccatctgtgcccccatgaagatcaacgtgaatgtgaacagcgctgctggcctgctggaccagttctatgagaagcagaggctgctgatcatcagcgccccagaccccagcaaccgctactacaagatgcagatctccatgctgcagcagagcacctgtggcctggacctgcggcacgtgaccatcatcgagctggtgggccagcccccccaggaggtgggccgcatccgggagcagcagctgagcgccaacatcatcgaggagctgcggcagttccagaggctgaccaggagctacttcaacatggtgctgattgacaagcagggcatcgaccgggaccgctacatggagcctgtgaccccagaggagatcttcaccttcattgatgactacctgctgagcaaccaggagctgacccagaggcgggagcagagggacatctgtgagtag

SEQ ID NO: 277771 - DNA, 1398 bp, Artificial Sequence
  derived and/or modified sequence
atggccagccagctgacccagcggggcgccctgttcctgctgttctttctcacacccgcagtgaccccaacatggtatgccggcagcggctattacccggatgagagctataatgaggtctatgctgaggaggtacctcaagctcctgccctcgactaccgagttccgcggtggtgctacacactgaacatccaagatggagaggcgacatgctactcgcccaagggcggaaactaccatagctcccttggcaccagatgcgaactatcctgcgatcgaggatttaggctcatcggccggagatcagtgcagtgtctgccttctcgccggtggtcgggcacggcatactgtcgccagatgcgatgtcacgccctcccatttatcacctcaggaacatatacttgtactaacggcgtccttttagactccaggtgcgactacagctgcagcagcggctatcacctggaaggggaccggagccgtatctgtatggaggacggaagatggagcggcggggaaccagtgtgtgtggacatcgatccacccaagataaggtgtcctcactctcgggaaaaaatggcagagcccgagaaactgaccgcacgcgtatattgggaccctccacttgtcaaggactccgccgatggcacgatcaccagggttacgctcaggggacctgaaccagggagccatttccctgaaggggagcatgttatccgttacaccgcttacgatcgggcatacaaccgggccagctgcaagtttatcgtgaaggtgcaagtgcgccgatgtccaacgctgaaacctccgcagcatggatacctgacatgtaccagcgcaggtgataattatggcgcgacctgcgaataccactgcgacggagggtacgaccggcagggaacaccttcccgcgtttgtcagtcgagccgacagtggagcggtagtccccccatttgcgcccctatgaagattaacgtgaatgttaactccgccgccggactgctcgaccagttttacgagaagcagagactcctgataatatcagcacccgatcccagcaatcggtactacaagatgcagatatccatgcttcaacagagcacgtgcggacttgatctgcgccatgtgacaatcattgagttagtcgggcaacccccacaggaggtgggcaggatccgcgagcagcaactgagcgccaatattattgaagagttgcgacagttccaacgcctgaccaggagctactttaatatggtgctgatcgataaacaaggcatcgatagagacaggtacatggagcctgtgactcccgaagagatatttactttcatcgatgattacttactgtccaaccaagagctcactcagaggcgcgagcagagggatatatgtgaatag

SEQ ID NO: 277772 - DNA, 1398 bp, Artificial Sequence
  derived and/or modified sequence
atggcctcacagctgactcagagaggggcactttttcttctgttcttcctcactccggctgtcaccccaacctggtatgcaggttccggttactaccccgacgaaagttacaatgaagtttatgctgaggaggtcccacaggctcctgctctcgactacagagtgccacgctggtgctatactctcaatattcaggatggtgaagccacgtgctactcgcctaaaggaggaaattaccactcatccctaggaactagatgcgaactgtcctgtgacaggggcttccgattaatcggccgtaggtcagtgcaatgcctgccctccagacgctggtccggtaccgcctactgccggcagatgcgatgccatgcactccctttcatcacatctggaacttatacttgcacaaacggcgtgcttctggatagcagatgtgactactcttgcagctcaggttaccatctcgaaggggaccggtcgcggatctgtatggaggatggaaggtggtcagggggtgaacccgtatgtgtggatatagaccccccaaaaatccggtgcccgcattccagagagaagatggccgagccagaaaagcttaccgcacgtgtttattgggacccacctttggtcaaagattccgctgatggtactatcacaagggtaaccctacggggacctgagcctggtagccattttccggaaggtgagcacgtcatcaggtataccgcgtatgatcgagcctacaaccgagccagttgtaaatttatcgttaaggtgcaagtcagacggtgcccgaccctcaaaccccctcagcacggatatttaacctgtacaagtgccggagacaactacggtgctacctgcgagtatcattgcgatggaggctatgaccgccagggcactccgagccgggtgtgccagtccagcagacagtggagcggtagtcctccgatctgcgcgccaatgaaaattaatgtcaatgttaattcggccgctgggctgctagaccagttttatgagaaacaacggctgctcatcatcagcgctcctgacccttccaatcggtattataagatgcagatcagtatgctgcaacagagtacttgcggtttggacctgcgccacgtcacaatcatcgagctggttggacagccacctcaagaggttggacggatcagggaacagcaattatctgcgaacatcattgaggagctgcggcagttccaaaggctcacacgttcctatttcaatatggtgctaatcgacaaacaggggatcgaccgcgatcggtacatggagccagtcacacccgaagaaatatttacattcatcgatgattacctgctgagcaaccaagagctcactcagagacgcgaacagcgcgatatttgcgagtag

SEQ ID NO: 277773 - DNA, 2138 bp, Artificial Sequence
  derived and/or modified sequence
agcagacggactgagttcctctaatccctgtgttccttctcccccatctttctaaaacccttctctgagagaggaataactatagcttcagggataatatagctttaaggaaacttttggcagatgtggacgtcgtaacatctgggcagtgttaacagaatcccggaggccgggacagaccaggagccactcgttctaggaatgttaaagtagaaggttttttccaattgatgagaggagcagagaggaaggagaaagaggaggagagagaaaaagggcacaaaataccataaaacagatcccatatttctgcttcccctcacttttagaagttaattgatggctgacttctgaaagtcactttcctttgccctggtacttcaggccatatacatcttttcttgtctccataatcctccctttcaaggatggccagtcagctaactcaaagaggagctctctttctgctgttcttcctaactccggcagtgacaccaacatggtatgcaggttctggctactatccggatgaaagctacaatgaagtatatgcagaggaggtcccacaggctcctgccctggactaccgagtcccccgatggtgttatacattaaatatccaggatggagaagccacatgctactcaccgaagggaggaaattatcacagcagcctgggcacgcgttgtgagctctcctgtgaccggggctttcgattgattggaaggaggtcggtgcaatgcctgccaagccgtcgttggtctggaactgcctactgcaggcagatgagatgccacgcactaccattcatcactagtggcacttacacctgcacaaatggagtgcttcttgactctcgctgtgactacagctgttccagtggctaccacctggaaggtgatcgcagccgaatctgcatggaagatgggagatggagtggaggcgagcctgtatgtgtagacatagatccccccaagatccgctgtccccactcacgtgagaagatggcagagccagagaaattgactgctcgagtatactgggacccaccgttggtgaaagattctgctgatggtaccatcaccagggtgacacttcggggccctgagcctggctctcactttcccgaaggagagcatgtgattcgttacactgcctatgaccgagcctacaaccgggccagctgcaagttcattgtgaaagtacaagtgagacgctgcccaactctgaaacctccgcagcacggctacctcacctgcacctcagcgggggacaactatggtgccacctgtgaataccactgtgatggcggttatgatcgccaggggacaccctcccgggtctgtcagtccagccgccagtggtcaggttcaccaccaatctgtgctcctatgaagattaacgtcaacgtcaactcagctgctggtctcttggatcaattctatgagaaacagcgactcctcatcatctcagctcctgatccttccaaccgatattataaaatgcagatctctatgctacagcaatccacctgtggactggatttgcggcatgtgaccatcattgaactggtgggacagccacctcaggaggtggggcgcatccgggagcaacagctgtcagccaacatcatcgaggagctcaggcaatttcagcgcctcactcgctcctacttcaacatggtgttgattgacaagcagggtattgaccgagaccgctacatggaacctgtcacccccgaggaaatcttcacattcattgatgactacctactgagcaatcaggagttgacccagcgtcgggagcaaagggacatatgcgagtgaacttgagccagggcatggttaaagtcaagggaaaagctcctctagttagctgaaactgggacctaataaaaggaggaaatgttttcccacagttctagggacaggactctgaggtgggtgagtttgacaaatcctgcggtgtttccaggcatccttttaggactgtgtaatagtttccctagaagctaggtagggactgaggacaggccttgggcagtgggttgggggtagaagttcttcctttcctaacccgggcccctgcccagctctccaaagtctttcagaaaagtaaatcctaaattcagtgatgaa

SEQ ID NO: 277774 - protein, 302 aa, Artificial Sequence
  derived and/or modified sequence
MSESQDEVPDEVENQFILRLPLEHACTVRNLARSQSVKMKDKLKIDLLPDGRHAVVEVEDVPLAAKLVDLPCVIESLRTLDKKTFYKTADISQMLVCTADGDIHLSPEEPAASTDPNIVRKKERGREEKCVWKHGITPPLKNVRKKRFRKTQKKVPDVKEMEKSSFTEYIESPDVENEVKRLLRSDAEAVSTRWEVIAEDGTKEIESQGSIPGFLISSGMSSHKQGHTSSVMEIQKQIEKKEKKLHKIQNKAQRQKDLIMKVENLTLKNHFQSVLEQLELQEKQKNEKLISLQEQLQRFLKK

SEQ ID NO: 277775 - DNA, 909 bp, Artificial Sequence
  derived and/or modified sequence
atgagcgagagccaggacgaggtgcccgacgaggtggagaaccagttcatcctgagactgcccctggagcacgcctgcaccgtgagaaacctggccagaagccagagcgtgaagatgaaggacaagctgaagatcgacctgctgcccgacggcagacacgccgtggtggaggtggaggacgtgcccctggccgccaagctggtggacctgccctgcgtgatcgagagcctgagaaccctggacaagaagaccttctacaagaccgccgacatcagccagatgctggtgtgcaccgccgacggcgacatccacctgagccccgaggagcccgccgccagcaccgaccccaacatcgtgagaaagaaggagagaggcagagaggagaagtgcgtgtggaagcacggcatcaccccccccctgaagaacgtgagaaagaagagattcagaaagacccagaagaaggtgcccgacgtgaaggagatggagaagagcagcttcaccgagtacatcgagagccccgacgtggagaacgaggtgaagagactgctgagaagcgacgccgaggccgtgagcaccagatgggaggtgatcgccgaggacggcaccaaggagatcgagagccagggcagcatccccggcttcctgatcagcagcggcatgagcagccacaagcagggccacaccagcagcgtgatggagatccagaagcagatcgagaagaaggagaagaagctgcacaagatccagaacaaggcccagagacagaaggacctgatcatgaaggtggagaacctgaccctgaagaaccacttccagagcgtgctggagcagctggagctgcaggagaagcagaagaacgagaagctgatcagcctgcaggagcagctgcagagattcctgaagaagtag

SEQ ID NO: 277776 - DNA, 909 bp, Artificial Sequence
  derived and/or modified sequence
atgtcagaaagtcaggatgaggtgccagacgaggtagaaaatcagtttatccttcggttacccctggagcatgcttgtaccgtgcgtaacctagcaaggagccagagcgtgaaaatgaaagataagctgaaaattgacctcctgcccgatggccgccatgcagtggtagaggtggaggacgtaccactagccgcaaagctcgtggacctcccttgcgttatcgaatcactcaggactctagataagaaaactttttacaaaacggctgacatatcgcagatgctggtttgcacagcggacggtgatattcatttgtctcctgaagagccagccgcatctactgacccgaacatcgtgcgcaagaaggaaaggggacgggaggagaagtgtgtgtggaaacatggtattaccccacccctaaaaaacgtaagaaagaagagatttagaaaaacccagaaaaaggttccagacgtgaaagagatggaaaagagtagcttcaccgagtacattgagtcacccgatgtggagaacgaggtgaaaagactgttgagaagcgacgcggaagctgtgtccacgaggtgggaagtgatcgcagaggatggtactaaggagatcgaaagccaaggaagcattcccggctttttaatctccagcggtatgagttcacacaagcaaggccacaccagctccgtgatggagatccaaaaacagatagagaaaaaagaaaagaagctgcacaagatccagaataaagcccaaagacaaaaggatttgatcatgaaagtcgagaatcttaccctcaagaaccattttcagtccgtgctcgagcagcttgagctgcaagaaaagcagaagaacgagaaacttatctcgcttcaggagcaacttcagcgatttctgaagaaatag

SEQ ID NO: 277777 - DNA, 909 bp, Artificial Sequence
  derived and/or modified sequence
atgtcagagagtcaggacgaagtccctgacgaagtcgagaaccagtttatattaagattgcccctcgaacatgcctgtacagtgaggaatctcgctcggagtcagagcgtgaagatgaaagataagctcaaaatcgacctgctccctgacggccgacacgctgtggtggaagtggaagacgtgcccttagccgcaaagcttgtggacctcccctgtgtcattgagagcttaaggacactcgacaagaagaccttttacaaaaccgccgacattagccagatgctggtctgcactgcggacggcgatatacacctgagccccgaagagccagctgcctcgacggatcctaatattgtccgaaagaaggagcgcgggcgcgaggaaaagtgcgtgtggaaacatggtataacccccccactgaagaacgtgagaaaaaaaagattccggaaaactcagaaaaaggtgcccgacgtcaaagagatggaaaaaagtagcttcactgagtacatcgaatcaccagacgtggaaaacgaggttaagcgactccttagatctgacgctgaggctgtgagtacgcgctgggaagtgatagctgaagacgggaccaaggaaatcgagagtcagggatctatacctggattcttaatttccagtggaatgtcaagccacaaacagggtcataccagctctgtcatggaaatccagaaacaaatcgagaagaaggaaaagaaactccacaagatacagaataaggcgcagaggcagaaggacctcataatgaaagtagagaaccttactctgaaaaatcactttcagtccgtgcttgaacagttggaattgcaggagaaacagaagaacgaaaaattgatttccctgcaggaacagctgcagaggttcctcaagaagtag

SEQ ID NO: 277778 - DNA, 909 bp, Artificial Sequence
  derived and/or modified sequence
atgtctgagagccaggatgaggtgcctgatgaggtggagaaccagttcatcctgcggctgcccctggagcacgcctgcaccgtgaggaacctggcccggagccagagcgtgaagatgaaggacaagctgaagattgacctgctgcctgatggaagacatgctgtggtggaggtggaggatgtgcccctggccgccaagctggtggacctgccctgcgtcatcgagagcctgcggaccctggacaagaagaccttctacaagacagctgacatcagccagatgctggtgtgcacagcagatggagacatccacctgagccctgaggagcctgctgccagcacagaccccaacatcgtgaggaagaaggagcggggccgggaggagaagtgtgtgtggaagcacggcatcaccccacccctgaagaatgtgaggaagaagcgcttcaggaagacccagaagaaggtgcctgatgtgaaggagatggagaagagcagcttcacagagtacatcgagagcccagatgtggagaatgaggtgaagaggctgctgcggagtgatgctgaggccgtgtccacccgctgggaggtgattgctgaagatggcaccaaggagattgagagccagggcagcatccctggcttcctgatcagcagcggcatgagcagccacaagcagggccacaccagctctgtgatggagatccagaagcagatcgagaagaaggagaagaagctgcacaagatccagaacaaggcccagaggcagaaggacctgatcatgaaggtggagaacctgaccctgaagaaccacttccagagcgtgctggagcagctggagctgcaggagaagcagaagaatgagaagctgatcagcctgcaggagcagctgcagcgcttcctgaagaagtag

SEQ ID NO: 277779 - DNA, 909 bp, Artificial Sequence
  derived and/or modified sequence
atgagcgagagccaggacgaggtgcccgacgaggtggagaaccagttcattctcagactccctctggaacacgcttgcaccgtacgaaatctggctaggagtcagtcggtgaagatgaaggacaagctgaaaattgatctcctgcctgacggcagacatgccgttgtcgaggtcgaagatgtgcctctggcagcgaaactggttgatctgccctgtgtgattgaaagccttagaaccctcgacaagaagacgttctacaagacagctgatattagccaaatgttggtctgtaccgcagacggtgatatccatctatccccagaagaaccagccgcttccactgaccctaatatagtcagaaagaaagaaaggggccgggaggaaaagtgcgtgtggaagcacggaattaccccccctctaaagaacgttcgcaagaagagattccggaagacgcagaaaaaggtcccagacgtgaaggaaatggagaaatccagcttcaccgagtacattgagtccccggacgtggaaaacgaggtgaagaggcttctgcggtccgacgccgaggccgtatccacccggtgggaggtgattgcagaggacggcacaaaggaaatcgagagtcagggttccatccctggcttcctcatttcgagtggcatgtcttcccacaaacagggccacacatctagtgtgatggagattcaaaagcagattgagaagaaggaaaaaaagctgcacaagattcagaacaaagctcaacggcagaaggaccttataatgaaggtggagaacctgactctcaaaaaccacttccagtctgttctcgaacagctggagctgcaggaaaaacagaaaaacgagaaacttataagtctgcaagagcagctccaaaggtttttgaaaaaatag

SEQ ID NO: 277780 - DNA, 909 bp, Artificial Sequence
  derived and/or modified sequence
atgagcgagagccaggacgaggtgcccgacgaggtggagaaccagttcattctccggctgcctctggagcacgcctgcaccgtgcgcaacctagccaggagtcaatctgtcaaaatgaaggacaaattgaagattgacctcttgccagacggcagacatgcggtggtggaggttgaggatgttcccctggcggccaagctcgtggatttaccgtgcgtgattgagtctctgcgtactctggataagaagacattttataaaacggctgatatctcgcagatgctggtgtgtaccgccgacggagacatccacctttcgccggaggagcccgcggcgagtacagatccgaatatcgtccggaagaaggaacgcggccgtgaagagaaatgcgtgtggaagcatggcattacacctcctcttaagaacgtgagaaagaaaagatttcgcaagacccagaagaaggttcccgacgtaaaagagatggagaaaagttcattcacggagtacattgagtcaccggacgtggagaatgaagtcaaacgcctgctgcgaagcgatgctgaggccgtaagcacgcgttgggaggtcatcgcagaggacggtactaaggagatcgagtctcagggcagcattccgggttttttaatctcgtccggaatgagctctcacaaacagggccatacatctagcgttatggaaatccaaaagcagattgaaaaaaaagagaagaagctgcacaagatccaaaataaagcccagcgccaaaaagatttgattatgaaggtggagaatctgacgctaaaaaaccattttcaatctgtgcttgagcagctagaactgcaggagaagcagaagaacgagaaactcatctccctgcaggagcaactccagcgctttcttaagaaatag

SEQ ID NO: 277781 - DNA, 909 bp, Artificial Sequence
  derived and/or modified sequence
atgtccgagagccaagatgaggtgcctgacgaagtggagaaccaatttatactaaggcttccccttgagcacgcctgcaccgtgaggaacctagcgaggtcccagagcgtcaagatgaaggataaattgaaaattgatcttctcccagatggccgacacgccgtagtggaggtcgaggatgtcccattggctgccaaattggtagatttgccatgcgtgatagagagcctgcgcacactcgacaaaaaaaccttttacaaaaccgccgatatcagccagatgttagtgtgcacagctgatggtgacattcacctgtcacccgaggaacccgctgctagcaccgaccctaatatcgtgcggaaaaaagagcgtgggagagaagaaaaatgcgtgtggaaacacggaattactccaccgcttaagaacgttcgcaagaagcgctttaggaagacccagaagaaggtgccagatgtgaaagagatggagaaatccagctttacagagtacatcgaaagtcccgacgtggaaaacgaagtaaaaagactgctccggtctgatgccgaagccgtttcaacacgatgggaggttattgcggaggatgggaccaaagaaatcgagagtcaaggcagtatccctggcttccttatctcgagcggcatgagctctcataagcaaggacatacctcatcagttatggaaatccagaaacaaatcgagaagaaggagaagaaattgcataagatacaaaacaaggcgcagcggcagaaggacctgattatgaaggtggagaatctcactcttaaaaaccacttccagtctgtcctggaacagttggagttacaggaaaagcagaagaatgagaaattgatctcccttcaggaacagctgcagagatttctgaaaaaatag

SEQ ID NO: 277782 - DNA, 909 bp, Artificial Sequence
  derived and/or modified sequence
atgagtgagtcccaagacgaggtacctgatgaggtcgagaaccaattcattttgcggctgcctttagagcacgcgtgcacagtacgcaacttggcgcgatcccaatcagtgaaaatgaaggacaaactgaaaattgatctgctgcctgatggacgtcacgcagtcgttgaagtcgaggacgtgcctttagccgctaagctggtggatctgccttgtgtgatagagtccttgaggaccctcgataagaagacattttacaagaccgcggatatcagtcagatgctcgtgtgcacggccgatggcgacatccacctgagccccgaggaacctgcggctagcaccgaccctaatattgttagaaaaaaggagcgcggacgggaggaaaagtgtgtgtggaagcacggcattacccctccattgaaaaacgtgagaaagaaacggttccgtaagacgcagaagaaggtgccagacgtcaaagaaatggagaaaagcagctttacagaatacatcgaatccccagacgtcgaaaacgaagtcaagaggctgctcagatcagatgccgaagctgtcagtacaagatgggaagtcatcgccgaggacggcactaaagaaatagagtctcagggaagcatccccggttttttgatttcatctggaatgagctcacacaagcaggggcacacgtcttccgtcatggaaatccagaagcagattgaaaagaaggaaaagaaactccataagattcagaacaaggcccagcggcagaaggacctaattatgaaagtggaaaatctcacacttaaaaatcactttcagtctgtcctggagcagctcgaactgcaagagaaacagaaaaacgaaaagctgatttcacttcaggagcagctgcagaggtttctgaagaaatag

SEQ ID NO: 277783 - DNA, 2107 bp, Artificial Sequence
  derived and/or modified sequence
atttgttcatcaaattacatcatgtaatttggattgactttggaaaatctacacatattggagaggagctaaggtaacgtctagaaataattaagttatgtcaaataaggtattgtctaactgtacacacatcattctagtgaggattatgggcaagatcttgtataatttagccagtactaccagaagtggtcaggagagggagcaagaggagtttttagtgatggttttctttttgctttcatgaactcaaaatcaagacatgagtgaaagccaggatgaagttcctgatgaagttgagaaccagtttatattgcgtctgcctctggaacatgcttgtactgtcaggaacctagcacgttctcaaagtgtcaagatgaaggataaactaaaaattgacttattgcctgatgggcgccatgcagttgttgaagtagaagatgtcccactagctgctaagctggttgacttgccttgtgttattgaaagcctgagaacgcttgataaaaaaaccttttataaaacagcagacatttctcagatgcttgtgtgcactgctgatggtgatatccacctttctccagaagaaccagctgcctctactgatcctaatatagtcaggaaaaaagaaagggggagagaagaaaaatgtgtctggaagcatggcattacgccaccacttaagaatgtcagaaagaaaaggttccggaaaacacaaaaaaaggtccctgatgtcaaagaaatggaaaaaagcagctttactgagtacattgaatctccagacgtggaaaatgaagtaaagagactgctgcgttcggatgctgaagccgtaagtacccgttgggaagtcattgctgaagatggaaccaaggaaatagaaagtcaaggctccatcccaggatttttgatatcctcgggaatgagcagccacaagcagggtcatacctcgtcagtcatggaaattcagaagcagattgagaaaaaggagaaaaagctccataagattcagaataaagcacaaagacagaaggatctcatcatgaaagtggaaaacctgacactcaagaatcattttcagtctgtgctggagcagcttgagttacaggaaaaacaaaaaaatgagaagctcatttccctacaggaacagttgcagcgttttctgaagaagtgaggagagccattggcgtggcccacaaaccttggattcaccatccagactgcagattggatgaaactgtgcacgtttttgtcccttcagttgccttatgttgaatcagttatatttatctgtaccttctttgctacttaaaatatgctcacagtttgtagtcatgtagaaaaggccagtataaaaatgtagtagacttaaagaccccactcgaccatgagactttctctttgtcaatttgggaattattattattaatttagaaatggggtcttgttatgttgcccaggctgaattcagactcctgggcttaagggatccttccgcctcagcctcctgagtagctgggactacagttgtgcaccaccacaccaaacaagaattgattatattgcttctgtgctatggtaccagcagattattcagccatgcttctaaaggcagtctagcctagaggccgtacagctgtttggtttgcatatgttttagcttttcttttggtttttagtatttcctaaaacataggggaaaaaacgaggtcatttctactaagcactaggacctgccatagtgagtttaagtgcctaccttgcagcagttaatactagattgtgttctgtctctgttcaggtaacaggactgcattcctgctcaaggatgattccttgctgctgcttatgttctgttgtttttaggatggagctggttgttattcaccaactaagggaacagttagagcagagatgaagaaattatgaactgttatccttattctgagccttctcctcctaaccctcatcagttaaggttaggaagaacaagatgccataatgcctatgaagacttctttaacaatcttgtttgggtttttttctaggtatattattagtgttttatggtctatgttctttaagcaataaataaattgttcattttaaa

SEQ ID NO: 277784 - DNA, 2132 bp, Artificial Sequence
  derived and/or modified sequence
attttacaaccccaacgaggtgggccatggagtgccccgagggacagctccccatttcttcagaaaatgattcaacaccaacagtttcaacatcggaagtaactagccaacaagaaccccaaattcttgtcgaccgtgggtctgaaaccacctatgaaagcagcgccgacattgctggcgacgaaggcacccagattcctgccgacgaggacactcaaacggatgcggacagcagcgcccaggctgctgcccaggccccagaaaacttccaggaagggaaagacatgagtgaaagccaggatgaagttcctgatgaagttgagaaccagtttatattgcgtctgcctctggaacatgcttgtactgtcaggaacctagcacgttctcaaagtgtcaagatgaaggataaactaaaaattgacttattgcctgatgggcgccatgcagttgttgaagtagaagatgtcccactagctgctaagctggttgacttgccttgtgttattgaaagcctgagaacgcttgataaaaaaaccttttataaaacagcagacatttctcagatgcttgtgtgcactgctgatggtgatatccacctttctccagaagaaccagctgcctctactgatcctaatatagtcaggaaaaaagaaagggggagagaagaaaaatgtgtctggaagcatggcattacgccaccacttaagaatgtcagaaagaaaaggttccggaaaacacaaaaaaaggtccctgatgtcaaagaaatggaaaaaagcagctttactgagtacattgaatctccagacgtggaaaatgaagtaaagagactgctgcgttcggatgctgaagccgtaagtacccgttgggaagtcattgctgaagatggaaccaaggaaatagaaagtcaaggctccatcccaggatttttgatatcctcgggaatgagcagccacaagcagggtcatacctcgtcagtcatggaaattcagaagcagattgagaaaaaggagaaaaagctccataagattcagaataaagcacaaagacagaaggatctcatcatgaaagtggaaaacctgacactcaagaatcattttcagtctgtgctggagcagcttgagttacaggaaaaacaaaaaaatgagaagctcatttccctacaggaacagttgcagcgttttctgaagaagtgaggagagccattggcgtggcccacaaaccttggattcaccatccagactgcagattggatgaaactgtgcacgtttttgtcccttcagttgccttatgttgaatcagttatatttatctgtaccttctttgctacttaaaatatgctcacagtttgtagtcatgtagaaaaggccagtataaaaatgtagtagacttaaagaccccactcgaccatgagactttctctttgtcaatttgggaattattattattaatttagaaatggggtcttgttatgttgcccaggctgaattcagactcctgggcttaagggatccttccgcctcagcctcctgagtagctgggactacagttgtgcaccaccacaccaaacaagaattgattatattgcttctgtgctatggtaccagcagattattcagccatgcttctaaaggcagtctagcctagaggccgtacagctgtttggtttgcatatgttttagcttttcttttggtttttagtatttcctaaaacataggggaaaaaacgaggtcatttctactaagcactaggacctgccatagtgagtttaagtgcctaccttgcagcagttaatactagattgtgttctgtctctgttcaggtaacaggactgcattcctgctcaaggatgattccttgctgctgcttatgttctgttgtttttaggatggagctggttgttattcaccaactaagggaacagttagagcagagatgaagaaattatgaactgttatccttattctgagccttctcctcctaaccctcatcagttaaggttaggaagaacaagatgccataatgcctatgaagacttctttaacaatcttgtttgggtttttttctaggtatattattagtgttttatggtctatgttctttaagcaataaataaattgttcattttaaatgg

SEQ ID NO: 277785 - DNA, 2737 bp, Artificial Sequence
  derived and/or modified sequence
ataaactacaacagagataaaatcagtggttctggaagtaactctgatatgatggaaaacagcaaggaagagggaactagctcttcagaaaaatccaagtcttcaggatcgtcacgatcaaagaggaaaccttcaattgtaacaaagtatgtagaatcagatgatgaaaaacctttggatgatgaaactgtaaatgaagatgcgtctaatgaaaattcagaaaatgatattactatgcagagcttgccaaaaggtacagtgattgtacagccagagccagtgctgaatgaagacaaagatgattttaaagggcctgaatttagaagcagaagtaaaatgaaaactgaaaatctcaaaaaacgcggagaagatgggcttcatgggattgtgagctgcactgcttgtggacaacaggtcaatcattttcaaaaagattccatttatagacacccttcattgcaagttcttatttgtaagaattgctttaagtattacatgagtgatgatattagccgtgactcagatggaatggatgaacaatgtaggtggtgtgcggaaggtggaaacttgatttgttgtgacttttgccataatgctttctgcaagaaatgcattctacgcaaccttggtcgaaaggagttgtccacaataatggatgaaaacaaccaatggtattgctacatttgtcacccagagcctttgttggacttggtcactgcatgtaacagcgtatttgagaatttagaacagttgttgcagcaaaataagaagaagataaaagttgacagtgaaaagagtaataaagtatatgaacatacatccagattttctccaaagaagactagttcaaattgtaatggagaagaaaagaaattagatgattcctgttctggctctgtaacctactcttattccgcactaattgtgcccaaagagatgattaagaaggcaaaaaaactgattgagaccacagccaacatgaactccagttatgttaaatttttaaagcaggcaacagataattcagaaatcagttctgctacaaaattacgtcagcttaaggcttttaagtctgtgttggctgatattaagaaggctcatcttgcattggaagaagacttaaattccgagtttcgagcgatggatgctgtaaacaaagagaaaaataccaaagagcataaagtcatagatgctaagtttgaaacaaaagcacgaaaaggagaaaaaccttgtgctttggaaaagaaggatatttcaaagtcagaagctaaactttcaagaaaacaggtagatagtgagcacatgcatcagaatgttccaacagaggaacaaagaacaaataaaagtaccggtggtgaacataagaaatctgatagaaaagaagaacctcaatatgaacctgccaacacttctgaagatttagacatggatattgtgtctgttccttcctcagttccagaagacatttttgagaatcttgagactgctatggaagttcagagttcagttgatcatcaaggggatggcagcagtggaactgaacaagaagtggagagttcatctgtaaaattaaatatttcttcaaaagacaacagaggaggtgctgattgtcaggaagttccacaagataaagatggctataaaagttgtggtctgaaccccaagttagagaaatgtggacttggacaggaaaacagtgataatgagcatttggttgaaaatgaagtttcattacttttagaggaatctgatcttcgaagatccccacgtgtaaagactacacccttgaggcgaccgacagaaactaaccctgtaacatctaattcagatgaagaatgtaatgaaacagttaaggagaaacaaaaactatcagttccagtgagaaaaaaggataagcgtaattcttctgacagtgctatagataatcctaagcctaataaattgccaaaatctaagcaatcagagactgtggatcaaaattcagattctgatgaaatgctagcaatcctcaaagaggtgagcaggatgagtcacagttcttcttcagatactgatattaatgaaattcatacaaaccataagactttgtatgatttaaagactcaggcggggaaagatgataaaggaaaaaggaaacgaaaaagttctacatctggctcagattttgatactaaaaagggcaaatcagctaagagctctataatttctaaaaagaaacgacaaacccagtctgagtcttctaattatgactcagaattagaaaaagagataaagagcatgagtaaaattggtgctgccagaaccaccaaaaaaagaattccaaatacaaaagattttgactcttctgaagatgagaaacacagcaaaaaaggaatggataatcaagggcacaaaaatttgaagacctcacaagaaggatcatctgatgatgctgaaagaaaacaagagagagagactttctcttcagcagaaggcacagttgataaagacacgaccatcatggaattaagagatcgacttcctaagaagcagcaagcaagtgcttccactgatggtgtcgataagctttctgggaaagagcagagttttacttctttggaagttagaaaagttgctgaaactaaagaaaagagcaagcatctcaaaaccaaaacatgtaaaaaagtacaggatggcttatctgatattgcagagaaattcctaaagaaagaccagagcgatgaaacttctgaagatg

SEQ ID NO: 277786 - protein, 1345 aa, Artificial Sequence
  derived and/or modified sequence
MSESKLNTLVQKLHDFLAHSSEESEETSSPPRLAMNQNTDKISGSGSNSDMMENSKEEGTSSSEKSKSSGSSRSKRKPSIVTKYVESDDEKPLDDETVNEDASNENSENDITMQSLPKDGLHGIVSCTACGQQVNHFQKDSIYRHPSLQVLICKNCFKYYMSDDISRDSDGMDEQCRWCAEGGNLICCDFCHNAFCKKCILRNLGRKELSTIMDENNQWYCYICHPEPLLDLVTACNSVFENLEQLLQQNKKKIKVDSEKSNKVYEHTSRFSPKKTSSNCNGEEKKLDDSCSGSVTYSYSALIVPKEMIKKAKKLIETTANMNSSYVKFLKQATDNSEISSATKLRQLKAFKSVLADIKKAHLALEEDLNSEFRAMDAVNKEKNTKEHKVIDAKFETKARKGEKPCALEKKDISKSEAKLSRKQVDSEHMHQNVPTEEQRTNKSTGGEHKKSDRKEEPQYEPANTSEDLDMDIVSVPSSVPEDIFENLETAMEVQSSVDHQGDGSSGTEQEVESSSVKLNISSKDNRGGADCQEVPQDKDGYKSCGLNPKLEKCGLGQENSDNEHLVENEVSLLLEESDLRRSPRVKTTPLRRPTETNPVTSNSDEECNETVKEKQKLSVPVRKKDKRNSSDSAIDNPKPNKLPKSKQSETVDQNSDSDEMLAILKEVSRMSHSSSSDTDINEIHTNHKTLYDLKTQAGKDDKGKRKRKSSTSGSDFDTKKGKSAKSSIISKKKRQTQSESSNYDSELEKEIKSMSKIGAARTTKKRIPNTKDFDSSEDEKHSKKGMDNQGHKNLKTSQEGSSDDAERKQERETFSSAEGTVDKDTTIMELRDRLPKKQQASASTDGVDKLSGKEQSFTSLEVRKVAETKEKSKHLKTKTCKKVQDGLSDIAEKFLKKDQSDETSEDDKKQSKKGTEEKKKPSDFKKKVIKMEQQYESSSDGTEKLPEREEICHFPKGIKQIKNGTTDGEKKSKKIRDKTSKKKDELSDYAEKSTGKGDSCDSSEDKKSKNGAYGREKKRCKLLGKSSRKRQDCSSSDTEKYSMKEDGCNSSDKRLKRIELRERRNLSSKRNTKEIQSGSSSSDAEESSEDNKKKKQRTSSKKKAVIVKEKKRNSLRTSTKRKQADITSSSSSDIEDDDQNSIGEGSSDEQKIKPVTENLVLSSHTGFCQSSGDEALSKSVPVTVDDDDDDNDPENRIAKKMLLEEIKANLSSDEDGSSDDEPEEGKKRTGKQNEENPGDEEAKNQVNSESDSDSEESKKPRYRHRLLRHKLTVSDGESGEEKKTKPKEHKEVKGRNRRKVSSEDSEDSDFQESGVSEEVSESEDEQRPRTRSAKKAELEENQRS

SEQ ID NO: 277787 - DNA, 4038 bp, Artificial Sequence
  derived and/or modified sequence
atgtcagagtccaagttgaatacacttgtccagaagttgcatgactttcttgcgcattcatcagaagaatctgaagagacaagttcgcctccccgactggctatgaatcagaataccgataaaatttcaggctcaggttccaactcggacatgatggaaaacagtaaagaggaaggcacgtcgtcttccgagaaatctaagtcctccgggtcatcccgcagtaagcgcaagccttctatcgtcactaagtacgtggagagcgacgatgaaaagccattggacgatgagacagtgaacgaagatgcctccaacgagaattcagaaaacgacataaccatgcagagcctgcccaaagacggactccatgggatcgtctcatgcacggcatgcggtcaacaggtgaatcactttcaaaaggattctatttatcggcatccatcccttcaggtattgatttgtaaaaactgcttcaaatactacatgagcgacgacatttcacgggattctgacgggatggacgagcagtgccgatggtgtgctgagggagggaatttaatctgctgcgacttctgccacaacgctttttgtaaaaaatgcattctaagaaatctcgggaggaaggagttgagcacaatcatggacgaaaataatcagtggtactgttatatctgtcatccggaaccgctcctggacctcgtcacagcctgcaattctgtgttcgaaaacctcgaacagctgctccagcagaataaaaagaagatcaaggtcgattccgaaaagtcgaacaaggtctatgagcataccagtcgcttctcgccaaagaaaactagcagcaactgcaacggtgaggagaaaaagctggacgactcttgcagtggttccgtaacctactcatactctgccctgattgttcccaaagagatgatcaagaaagcaaaaaagctgatcgaaactacagctaacatgaacagctcttacgtgaaatttctcaagcaggcaacggacaacagcgagatttcaagcgcgactaaactcagacagctgaaagctttcaagagtgtcctggccgatatcaaaaaagcacacttagccctggaagaagacctgaatagtgagtttagagctatggacgcagtcaataaagaaaaaaacaccaaggagcacaaagtgattgatgccaagtttgaaaccaaggcgcgcaaaggcgagaaaccgtgcgccctggagaaaaaagatatctccaagagcgaggccaagctgagccgcaagcaggtagacagcgaacacatgcaccagaacgttccgaccgaggagcaacgtacgaataaaagtacaggcggggagcataagaagtctgaccggaaagaagagccccagtacgaacccgccaacacgtctgaagacctcgacatggatattgtatctgtgccaagttcagtgcctgaggacatctttgaaaatctggagaccgccatggaggttcagtcatctgttgaccaccagggagatggctcttccggcactgaacaggaggttgagtcaagcagcgtcaaactgaacatctcttcgaaggacaatcgtggcggggccgactgtcaggaggtgcctcaagacaaggatggttacaagagctgtgggcttaaccccaagttagagaagtgcggcctgggacaagaaaactcagacaacgagcacctcgtggaaaatgaggtgtctcttctgcttgaggaatcagacctgaggagatcgccccgggtcaagactacgcccctgcggaggccaactgagaccaaccccgttacttccaacagcgatgaggaatgtaacgagactgtgaaggagaagcaaaagctaagtgttccggtccggaaaaaggataaacgaaacagctccgattctgctatcgataaccccaaacccaataaactgcccaaaagcaaacagagcgagaccgtggaccagaactctgactcggacgaaatgctcgctatactgaaggaggtctcacgtatgagtcactcgtctagtagtgatacagacataaacgagattcataccaaccataagaccctgtatgacctcaaaacacaggcgggcaaggatgacaaaggtaaacgcaagaggaagtcttctaccagtggatcggactttgacacaaaaaaagggaaaagcgctaagagttccattatcagcaagaagaagcggcagacacaaagtgaaagctccaactatgacagtgagctcgagaaggagattaagtccatgtccaaaattggggccgcaaggacgaccaaaaagcggatccccaataccaaagactttgattcatccgaggatgagaagcactcaaagaagggcatggacaaccagggtcacaagaatctgaagactagccaggaggggagttctgatgacgccgaacgtaaacaggaacgagaaacattcagttctgccgaggggacagtggataaggataccactattatggagctgagagatcgtctgccaaagaagcagcaagccagcgcctctaccgacggcgttgacaagctgtccggaaaggagcaatcatttacttctctcgaagtccgtaaagtggccgagacaaaggaaaaaagtaaacatttaaaaacaaagacgtgcaaaaaagtgcaggacgggctgtcagatatcgccgagaaatttctgaaaaaggaccagagtgatgagacgtctgaggatgacaaaaaacagagtaaaaaggggactgaggagaaaaaaaagccttctgacttcaagaagaaagttattaagatggaacagcagtacgagtcttcctcagacggaactgagaaactcccagaacgggaagagatttgccactttccgaaagggatcaagcagatcaagaacggcaccaccgacggggaaaagaaatcgaagaaaatacgggacaaaacaagcaaaaaaaaagatgagttgtcggactacgccgaaaagtccacaggtaaaggagactcctgcgattccagcgaggacaagaagtctaagaacggggcctatggccgagaaaagaagagatgcaaactcctgggcaagagttcccggaagcggcaggattgctcaagctcggacaccgagaagtattcaatgaaagaagatggctgcaatagttccgacaaacgcctgaagcggattgagcttcgagagcgtaggaatctgtcatctaaacggaatacaaaagaaattcagtctggttcctcttcttcggacgcagaagagagcagtgaggacaacaaaaagaaaaagcagcgcacttcttcgaaaaaaaaggccgttatcgtgaaggaaaagaagagaaacagtctccgtaccagtaccaagcgcaagcaagccgatatcactagcagtagcagctctgacatcgaggacgatgaccaaaactctatcggagaaggaagctctgatgagcagaagatcaagccggtcactgagaatcttgtcttaagttcccacaccggattctgtcagagctctggcgatgaagctctttccaagagcgtcccagtgaccgtggatgatgacgacgacgataacgatccagaaaaccgtatagcaaagaaaatgctgcttgaggagattaaggcaaacttgtcgagtgatgaggacggctcatccgacgatgagcccgaagaaggcaaaaaacggacagggaaacaaaacgaggaaaacccgggcgacgaagaggcaaagaaccaggtgaactctgaatccgactcagattccgaagagagtaagaagcctagatatcgtcaccggcttctgcgccataagctcaccgtgtcagatggtgaatctggcgaggaaaagaaaacaaaacctaaggaacataaggaggtaaagggccgaaatagacggaaagtgagcagcgaggactcggaagacagcgactttcaggaatccggcgtgagcgaagaggtgagcgagtccgaagacgaacagaggcctaggacccgcagtgccaagaaggcagagctcgaagaaaaccaacggtcttag

SEQ ID NO: 277788 - DNA, 4038 bp, Artificial Sequence
  derived and/or modified sequence
atgtctgagagcaagctgaacaccctggtgcagaagctgcatgacttcctggcccacagcagcgaggagagcgaggagaccagcagccccccccggctggccatgaaccagaacacagacaagatcagcggcagcggcagcaacagcgacatgatggagaacagcaaggaggagggcaccagcagcagcgagaagagcaagagcagcggcagcagccgcagcaagaggaagcccagcatcgtgaccaagtatgtggagagtgatgatgagaagcccctggatgatgaaacagtgaatgaagatgccagcaatgaaaattctgaaaatgacatcaccatgcagagcctgcccaaggatggcctgcacggcatcgtgtcctgcacagcctgtggccagcaggtgaaccacttccagaaggacagcatctaccgccaccccagcctgcaggtgctgatctgcaagaactgcttcaagtactacatgtctgatgacatcagccgggacagtgatggcatggatgagcagtgccgctggtgtgccgagggcggcaacctgatctgctgtgacttctgccacaatgccttctgcaagaagtgcatcctgaggaacctgggcaggaaggagctgagcaccatcatggatgagaacaaccagtggtactgctacatctgccaccctgagcccctgctggacctggtgacagcctgcaacagcgtgtttgagaacctggagcagctgctgcagcagaacaagaagaagatcaaggtggacagcgagaagagcaacaaggtgtatgagcacaccagccgcttcagccccaagaagaccagcagcaactgcaatggagaggagaagaagctggatgacagctgcagcggctctgtgacctacagctacagcgccctgattgtgcccaaggagatgatcaagaaggccaagaagctgattgagaccacagccaacatgaacagcagctatgtgaagttcctgaagcaggccacagacaacagcgagatcagcagcgccaccaagctgcggcagctgaaggccttcaagtctgtgctggccgacatcaagaaggcccacctggccctggaggaggacctgaacagcgagttccgggccatggatgctgtgaacaaggagaagaacaccaaggagcacaaggtgattgatgccaagtttgagaccaaggccaggaaaggagagaagccctgtgccctggagaagaaggacatcagcaagtctgaggccaagctgagcaggaagcaggtggacagcgagcacatgcaccagaatgtgcccacagaggagcagaggaccaacaagagcactggaggagagcacaagaagagtgacaggaaggaggagccccagtatgagcccgccaacaccagcgaggacctggacatggacatcgtgtctgtgcccagctctgtgcctgaggacatctttgagaacctggagacagccatggaggtgcagagctctgtggaccaccagggagatggcagcagcggcacagagcaggaggtggagagcagctctgtgaagctgaacatcagcagcaaggacaacagaggaggagctgactgccaggaggtgccccaggacaaggatggctacaagagctgtggcctgaaccccaagctggagaagtgtggcctgggccaggagaacagcgacaatgagcacctggtggagaatgaggtgtccctgctgctggaggagagtgacctgcggcgcagcccccgggtgaagaccacccccctgcggcggcccacagagaccaaccctgtgaccagcaacagtgatgaagaatgtaatgaaacagtgaaggagaagcagaagctgtctgtgcctgtgaggaagaaggacaagaggaacagcagtgacagcgccatcgacaaccccaagcccaacaagctgcccaagagcaagcagagcgagaccgtggaccagaacagcgacagtgatgagatgctggccatcctgaaggaggtgtccaggatgagccacagcagcagcagtgacacagacatcaatgagatccacaccaaccacaagaccctgtatgacctgaagacccaggccggcaaggatgacaagggcaagaggaagaggaagagcagcaccagcggcagtgactttgacaccaagaagggcaagagcgccaagagcagcatcatcagcaagaagaagaggcagacccagagcgagagcagcaactatgacagcgagctggagaaggagatcaagtccatgagcaagatcggggccgcccggaccaccaagaagaggatccccaacaccaaggactttgacagcagtgaagatgagaagcacagcaagaagggcatggacaaccagggccacaagaacctgaagaccagccaggagggcagcagtgatgatgctgagaggaagcaggagcgggagaccttcagcagcgctgagggcaccgtggacaaggacaccaccatcatggagctgcgggaccggctgcccaagaagcagcaggccagcgccagcacagatggagtggacaagctgagcggcaaggagcagagcttcaccagcctggaggtgaggaaggtggccgagaccaaggagaagagcaagcacctgaagaccaagacctgcaagaaggtgcaggacggcctgagtgacattgctgagaagttcctgaagaaggaccagagtgatgagaccagtgaagatgacaagaagcagagcaagaagggcacagaggagaagaagaagcccagcgacttcaagaagaaggtgatcaagatggagcagcagtatgagagcagcagtgatggaacagagaagctgcctgagcgggaggagatctgccacttccccaagggcatcaagcagatcaagaatggcaccacagatggagagaagaagagcaagaagatccgggacaagaccagcaagaagaaggatgagctgagtgactatgcagagaagagcactggaaaaggagacagctgtgacagcagcgaggacaagaagagcaagaatggagcctacggccgggagaagaagcgctgcaagctgctgggcaagagcagcaggaagaggcaggactgcagcagcagtgacacagagaagtacagcatgaaggaggatggctgcaacagcagtgacaagaggctgaagagaattgagctgcgggagaggaggaacctgagcagcaagaggaacaccaaggagatccagagcggcagcagcagcagtgatgctgaggagagcagcgaggacaacaagaagaagaagcagaggaccagcagcaagaagaaggctgtgattgtgaaggagaagaagaggaacagcctgcggaccagcaccaagaggaagcaggccgacatcaccagcagcagcagcagtgacattgaagatgatgaccagaacagcattggagagggcagcagtgatgagcagaagatcaagcctgtgacagagaacctggtgctgagcagccacacaggcttctgccagagcagtggagatgaggccctgagcaagtctgtgcctgtgacagtggatgatgatgatgatgacaatgaccctgaaaatcgcatcgccaagaagatgctgctggaggagatcaaggccaacctgagcagtgatgaagatggcagcagtgatgatgagcctgaggagggcaagaagaggacaggcaagcagaatgaggagaaccctggagatgaggaggccaagaaccaggtgaacagcgagagtgacagcgacagcgaggagagcaagaagccccgctaccgccaccggctgctgcggcacaagctgactgtgtctgatggagagagcggggaggagaagaagaccaagcccaaggagcacaaggaggtgaagggcaggaacagaaggaaggtgtcctctgaggacagtgaagattctgacttccaggagagcggcgtgtctgaggaggtgtctgagagtgaagatgagcagaggcccaggaccaggtctgccaagaaggccgagctggaggagaaccagaggagctag

SEQ ID NO: 277789 - DNA, 4038 bp, Artificial Sequence
  derived and/or modified sequence
atgagcgagagcaagctgaacaccctggtgcagaagctgcacgacttcttggctcattcctccgaggaatccgaagaaacaagctctccgccgagactcgcaatgaatcagaacacagataagattagcgggtccggttcaaatagcgacatgatggaaaactcaaaggaggaagggactagttcttccgaaaagagcaaatcatctggcagctcccggtctaagcgaaaaccctctattgttaccaagtacgtagagtcggatgacgagaaaccgctggacgacgaaacagtgaatgaagatgcgtccaatgaaaacagcgagaacgacatcactatgcagtcactgccaaaggacggtctgcacggaatagtttcatgcaccgcctgtggacagcaggtgaatcactttcagaaagactctatatatcggcacccatcactgcaggtgttgatatgcaaaaactgcttcaagtattatatgtccgacgatataagccgggactccgatgggatggatgagcagtgtagatggtgtgcagaaggtggcaatcttatttgctgtgatttttgtcataatgccttctgtaaaaagtgtattctccggaatcttgggcgaaaggagctctccacgatcatggacgaaaataatcagtggtattgctatatctgtcatccagagcccctgctggacctagtaacagcctgtaacagtgtgtttgaaaatcttgagcaactcctgcagcagaacaaaaaaaagataaaggtcgactctgaaaaatctaataaggtgtatgaacacaccagccggttctcaccaaagaaaacctcctctaactgcaatggtgaggagaagaaacttgatgacagttgctcagggagcgtaacatattcctatagcgccctcattgtgccgaaggagatgatcaaaaaagctaagaagctcattgaaacaacagctaacatgaactcatcgtacgtgaagttcctgaagcaggccacggacaactctgaaatcagtagtgctactaaactgaggcagctaaaagcctttaaaagcgtactagccgacatcaagaaggcgcaccttgctctggaggaagatttgaacagcgagtttcgagccatggatgctgtcaacaaggagaagaacacaaaagaacataaggttattgatgcaaagtttgaaacgaaggccaggaaaggtgagaagccctgcgccttggaaaagaaagatatcagcaaaagcgaggccaaactatcccgaaagcaagtcgactctgaacatatgcatcagaatgtgccaacagaagagcagaggacaaataagtcaaccggtggggagcataaaaagtctgatagaaaagaggagccccagtacgagcctgctaatacttcagaagacctcgatatggacattgtgtcagtccccagctctgtccccgaagacatctttgaaaatcttgagaccgcgatggaagtccaatcttctgtagaccaccaaggggacggttcttctggaacggagcaggaggtcgagagtagcagcgtcaagttaaatatcagcagtaaggataataggggcggtgctgactgccaagaagttccgcaggacaaggatggatataagtcctgcgggttgaatcctaaattggagaaatgcggcctgggccaggaaaattcagacaacgaacacctggtcgagaatgaagtcagcctcctccttgaagaatccgatctcaggcggtctcctcgggtcaagactactcctctgcgccggcccactgaaacaaacccagtcacgtcaaattctgatgaagagtgtaacgagacagttaaagagaagcaaaaattatcagtgcccgtgagaaaaaaggacaagagaaattcttccgactcggccatcgacaacccaaaacctaacaaactacccaaatctaaacaatcggaaaccgttgatcagaacagcgatagtgatgaaatgcttgccatcctgaaggaggtgtcaaggatgtcacatagcagctcatcagatacagatataaatgaaatccatacgaaccataagacattgtacgacctcaagactcaggcaggtaaggacgataaaggaaaaaggaaacgcaagagctctacttctggcagcgactttgatacgaagaaaggcaaaagcgccaagagtagcataatctctaaaaaaaaaagacagacacagtccgagtcctccaattacgacagcgagctggagaaggagatcaagtctatgtccaaaattggagctgcgcgcacaaccaagaagcggatccccaatactaaagactttgacagctcagaggatgaaaaacactctaagaagggcatggacaatcaaggccataagaatctgaagacctctcaggagggaagcagcgacgatgctgagagaaaacaagaacgtgagacgttcagttctgcagagggtactgtagacaaggacaccacaatcatggagctgcgagatcggttgcccaaaaaacaacaggcaagtgcgtccaccgatggtgttgataagctgtccgggaaggagcagtcatttacctccctggaggtcaggaaagttgcggaaaccaaggagaagagcaaacacttaaaaaccaagacgtgcaaaaaagttcaggatggcctcagcgacatagccgaaaaattcctcaagaaggaccaaagcgatgaaacctcagaggacgacaagaagcaatcaaaaaaaggcaccgaagaaaagaagaagcccagtgacttcaaaaagaaggtgatcaagatggaacagcagtacgaatcatctagtgacggaactgagaagctaccagagcgggaggaaatctgccatttccctaaggggattaagcagatcaagaacgggacaaccgatggcgagaagaagagtaagaaaatccgcgataagacaagcaaaaaaaaggatgagcttagtgactatgccgagaagagtacaggcaaaggcgacagttgcgactccagcgaggacaagaagtcaaaaaatggggcatacgggcgcgaaaaaaagcggtgcaaactccttggtaaaagttcgaggaagagacaggattgtagctccagcgatactgagaagtactcgatgaaggaggacggatgtaactcttccgataaaagacttaagaggattgagctcagggagcgcaggaacctgagcagcaaacgcaacaccaaggagatccaatctggttcgtcctcttctgatgctgaggagagtagcgaggacaataagaaaaaaaagcagagaacttcatctaagaagaaggccgtgatcgtcaaggagaaaaagagaaattctctgaggacaagcacaaaacggaagcaggccgacatcacaagttcttccagttccgacatagaggacgatgaccaaaacagcataggtgagggttcttcagacgaacagaagatcaaaccagtgactgaaaatctcgtcctttcttctcataccggcttttgtcagagctctggagacgaagccctgagcaaatcagttccggtaactgtcgatgatgatgatgacgataatgatcccgaaaatcggatcgcgaagaagatgttattggaggaaatcaaggccaacctctccagtgacgaagatggctcatcagatgatgagcctgaagaagggaagaagcgtactggcaagcagaatgaagaaaaccccggagacgaggaggcgaagaatcaggtcaactctgaatccgattcagactctgaagagtcaaaaaagccaagatataggcaccgccttctgagacacaagctaacagtctctgatggagagtcaggcgaggagaaaaagacgaaaccaaaggagcacaaggaagtcaaaggccgcaaccggaggaaggtctcctcagaggatagcgaagattcggacttccaggaatccggcgtttctgaggaggtttccgagtcagaggatgagcagcgcccacgtacccggtccgctaagaaagccgaactggaagagaatcagaggagctag

SEQ ID NO: 277790 - DNA, 4038 bp, Artificial Sequence
  derived and/or modified sequence
atgtccgagtcgaagttaaatactctcgtccaaaagctacatgacttcctggcacattcctcagaggaatccgaggagacgtcatctccaccccgtctggcaatgaatcagaatacagacaagattagtggttctggttctaactccgatatgatggaaaattctaaggaagaagggaccagcagttcagaaaagtcaaaaagttctgggtcttcccgtagtaagcggaagccctccatcgtgacgaagtacgtagaaagtgatgacgagaagccgctggatgacgaaactgttaacgaggatgccagtaacgagaacagcgagaacgacattacgatgcagagtctgccaaaagacggactgcacgggatagtctcatgtacagcctgtggtcagcaggtcaatcacttccagaaagacagcatctatcggcacccctccctacaggtgctaatctgcaagaattgttttaagtattacatgagtgacgacatttcaagagatagtgatggaatggatgagcaatgccgttggtgcgctgaggggggaaatttgatatgttgtgatttttgccataacgctttctgcaagaagtgtattctcaggaatctggggagaaaggaactatcaaccattatggatgaaaacaatcaatggtactgttatatttgccacccggagcccctcttggatctcgtaacggcctgtaattccgtgtttgagaacctcgagcagctcttacagcaaaataagaaaaagatcaaagtagacagcgagaaaagcaacaaagtatatgaacataccagccgtttctccccgaagaagacatcatccaactgcaacggtgaggagaaaaaattagacgattcctgcagtggctccgtgacttattcttacagcgcacttatcgtgcccaaagaaatgataaaaaaggcgaagaaattaattgaaactacagcgaatatgaacagctcatacgtgaaatttttgaagcaggccaccgataactcagagatctcttcggctactaaactgagacagttgaaggcgtttaaatccgtgctggccgatattaagaaggctcacttggccctggaagaggacctgaactcagaattccgagctatggatgccgtgaataaagaaaagaacacgaaagaacacaaggtgatcgatgccaagtttgagaccaaggcaaggaagggcgagaagccgtgcgcccttgaaaaaaaagacatcagcaaatcggaggcaaaactcagcaggaagcaggtggattctgagcatatgcaccagaatgtaccaaccgaagagcagcggactaataagtcaacgggtggcgaacacaagaagtcggataggaaagaggaaccgcagtatgagccggcaaataccagcgaggatctggacatggacatcgtgtcggttcccagctctgtgcccgaggacatattcgagaacctggaaaccgccatggaggtccagtcttccgtggaccaccagggtgatggcagctctgggactgaacaggaggttgagagctcttcggtgaaactgaatatttccagcaaagacaaccggggaggtgcggattgccaggaagtgccccaagacaaagacgggtataagagttgtggactgaacccgaagctcgagaagtgtggcctcgggcaggagaatagcgacaatgaacacttggtggagaacgaagtaagtcttttgcttgaggaaagtgatctccgtcgttcaccacgcgtgaaaacaacccccctgcggaggcccaccgagacgaaccccgttaccagcaactccgatgaggagtgtaatgaaaccgtgaaagagaagcaaaagctttccgtgcctgtgagaaagaaggataagcgcaacagcagtgactcagctattgacaacccgaaaccgaacaaactccccaaatcaaagcagtcagaaacagtggaccagaactctgactccgatgaaatgctcgctattcttaaggaggtgagtagaatgtcccacagcagctcttcggataccgatatcaacgaaatacatacaaatcacaaaactctgtatgacttaaaaactcaggcaggcaaagatgacaagggaaagcgtaaacgtaagtctagtactagcggcagcgacttcgataccaaaaaaggtaagtcagcaaagtcctctatcatttctaaaaagaagcgccagacccagtctgagtcaagcaattatgattccgagttagagaaagagattaaatctatgtctaagataggcgcagcacgcacaacgaaaaagagaatccccaacacaaaggacttcgatagcagtgaggatgagaaacacagtaagaaaggaatggacaaccaggggcacaagaatctaaaaacttcgcaggaaggatcctctgatgatgcggagaggaaacaagagagagagacattttcaagcgctgaggggacagtggataaagacactacaatcatggaactgcgcgacaggctccctaagaaacagcaggcgtctgcgagcaccgacggcgttgacaagcttagcggaaaggaacagtctttcaccagcttagaagttcgcaaggttgccgagaccaaagaaaaatcaaaacatctgaagacaaaaacgtgtaaaaaggtgcaggatggactctcagacattgcggagaaatttctgaagaaggaccaatcagatgagacatccgaagacgacaagaaacaatctaagaaaggcactgaagaaaagaaaaagcccagtgatttcaagaaaaaggtaattaagatggaacaacagtatgaaagttcttccgacggaaccgagaagctgccagagagggaagagatctgtcattttccaaaaggtattaaacagataaaaaacggcaccacagacggagagaagaagtcaaagaagatcagagataagacctccaagaagaaggacgagttgtcggactatgccgagaagtccactgggaaaggagactcttgtgacagctctgaggataagaagagtaaaaacggtgcctatgggcgtgagaagaaacggtgtaagttactaggcaaatcttctcggaaaaggcaggactgctcaagtagcgacactgagaaatattccatgaaggaagacgggtgtaattcatctgacaagcgactcaagcgcattgagctgcgagagaggaggaatttgtctagcaagaggaacacaaaggaaatacaatccggatccagctcatccgacgccgaggagtccagcgaggataataagaagaagaagcaacgcacatcgagtaaaaagaaagccgtgattgtgaaagagaaaaaacgtaattctctgaggactagcactaaacgcaagcaagcagacatcacaagcagttctagctcagatattgaggatgacgaccagaatagcataggtgagggctcaagcgatgagcagaagataaagccagttacagagaatcttgtgctgagttcccacacaggtttctgccaaagtagcggcgacgaggcactcagcaagtctgtgccagttactgtcgatgacgatgacgatgataacgaccccgaaaacagaattgcaaagaagatgcttctggaggaaataaaggcaaacctttcatccgacgaagacggctcatctgatgacgagcccgaagaagggaagaagcgtactggcaagcagaatgaggagaatccaggagacgaagaggcgaagaatcaggtgaatagtgagtctgactctgacagcgaggaaagtaaaaaaccgagatatcgccaccgactgctgcggcataaacttaccgttagtgacggggagtcgggcgaggagaaaaagacgaaacccaaagagcataaagaggttaaggggagaaacagacggaaagtcagttcagaagattcggaagactcagacttccaggagtctggagtgtctgaggaagtgagtgagagcgaggacgagcagcgcccaagaactaggtccgctaaaaaagcagaacttgaggaaaatcagaggtcgtag

SEQ ID NO: 277791 - DNA, 4252 bp, Artificial Sequence
  derived and/or modified sequence
ggcggcggcagcggtgtcgctttgtttccgcggctcctgcggcggtggcagtggtagcggcctttgagctgtggggaggttccagcagcagctacagtgacgactaagactccagtgcatttctatcgtaaccgggcgcgggggagcgcagatcggcgcccagcaatcacagaagccgacaaggcgttcaagcgaaaacatgaccgctgagcccatgagtgaaagcaagttgaatacattggtgcagaagcttcatgacttccttgcacactcatcagaagaatctgaagaaacaagttctcctccacgacttgcaatgaatcaaaacacagataaaatcagtggttctggaagtaactctgatatgatggaaaacagcaaggaagagggaactagctcttcagaaaaatccaagtcttcaggatcgtcacgatcaaagaggaaaccttcaattgtaacaaagtatgtagaatcagatgatgaaaaacctttggatgatgaaactgtaaatgaagatgcgtctaatgaaaattcagaaaatgatattactatgcagagcttgccaaaagatgggcttcatgggattgtgagctgcactgcttgtggacaacaggtcaatcattttcaaaaagattccatttatagacacccttcattgcaagttcttatttgtaagaattgctttaagtattacatgagtgatgatattagccgtgactcagatggaatggatgaacaatgtaggtggtgtgcggaaggtggaaacttgatttgttgtgacttttgccataatgctttctgcaagaaatgcattctacgcaaccttggtcgaaaggagttgtccacaataatggatgaaaacaaccaatggtattgctacatttgtcacccagagcctttgttggacttggtcactgcatgtaacagcgtatttgagaatttagaacagttgttgcagcaaaataagaagaagataaaagttgacagtgaaaagagtaataaagtatatgaacatacatccagattttctccaaagaagactagttcaaattgtaatggagaagaaaagaaattagatgattcctgttctggctctgtaacctactcttattccgcactaattgtgcccaaagagatgattaagaaggcaaaaaaactgattgagaccacagccaacatgaactccagttatgttaaatttttaaagcaggcaacagataattcagaaatcagttctgctacaaaattacgtcagcttaaggcttttaagtctgtgttggctgatattaagaaggctcatcttgcattggaagaagacttaaattccgagtttcgagcgatggatgctgtaaacaaagagaaaaataccaaagagcataaagtcatagatgctaagtttgaaacaaaagcacgaaaaggagaaaaaccttgtgctttggaaaagaaggatatttcaaagtcagaagctaaactttcaagaaaacaggtagatagtgagcacatgcatcagaatgttccaacagaggaacaaagaacaaataaaagtaccggtggtgaacataagaaatctgatagaaaagaagaacctcaatatgaacctgccaacacttctgaagatttagacatggatattgtgtctgttccttcctcagttccagaagacatttttgagaatcttgagactgctatggaagttcagagttcagttgatcatcaaggggatggcagcagtggaactgaacaagaagtggagagttcatctgtaaaattaaatatttcttcaaaagacaacagaggaggtgctgattgtcaggaagttccacaagataaagatggctataaaagttgtggtctgaaccccaagttagagaaatgtggacttggacaggaaaacagtgataatgagcatttggttgaaaatgaagtttcattacttttagaggaatctgatcttcgaagatccccacgtgtaaagactacacccttgaggcgaccgacagaaactaaccctgtaacatctaattcagatgaagaatgtaatgaaacagttaaggagaaacaaaaactatcagttccagtgagaaaaaaggataagcgtaattcttctgacagtgctatagataatcctaagcctaataaattgccaaaatctaagcaatcagagactgtggatcaaaattcagattctgatgaaatgctagcaatcctcaaagaggtgagcaggatgagtcacagttcttcttcagatactgatattaatgaaattcatacaaaccataagactttgtatgatttaaagactcaggcggggaaagatgataaaggaaaaaggaaacgaaaaagttctacatctggctcagattttgatactaaaaagggcaaatcagctaagagctctataatttctaaaaagaaacgacaaacccagtctgagtcttctaattatgactcagaattagaaaaagagataaagagcatgagtaaaattggtgctgccagaaccaccaaaaaaagaattccaaatacaaaagattttgactcttctgaagatgagaaacacagcaaaaaaggaatggataatcaagggcacaaaaatttgaagacctcacaagaaggatcatctgatgatgctgaaagaaaacaagagagagagactttctcttcagcagaaggcacagttgataaagacacgaccatcatggaattaagagatcgacttcctaagaagcagcaagcaagtgcttccactgatggtgtcgataagctttctgggaaagagcagagttttacttctttggaagttagaaaagttgctgaaactaaagaaaagagcaagcatctcaaaaccaaaacatgtaaaaaagtacaggatggcttatctgatattgcagagaaattcctaaagaaagaccagagcgatgaaacttctgaagatgataaaaagcagagcaaaaagggaactgaagaaaaaaagaaaccttcagactttaagaaaaaagtaattaaaatggaacaacagtatgaatcttcatctgatggcactgaaaagttacctgagcgagaagaaatttgtcattttcctaagggcataaaacaaattaagaatggaacaactgatggagaaaagaaaagtaaaaaaataagagataaaacttctaaaaagaaggatgaattatctgattatgctgagaagtcaacagggaaaggagatagttgtgactcttcagaggataaaaagagtaagaatggagcatatggtagagagaagaaaaggtgcaagttgcttggaaagagttcaaggaagagacaagattgttcatcatctgatactgagaaatattccatgaaagaagatggttgtaactcttctgataagagactgaaaagaatagaattgagggaaagaagaaatttaagttcaaagagaaatactaaggaaatacaaagtggctcatcatcatctgatgctgaggaaagttctgaagataataaaaagaagaagcaaagaacttcatctaaaaagaaggcagtcattgtcaaggagaaaaagagaaactccctaagaacaagcactaaaaggaagcaagctgacattacatcctcatcttcttctgatatagaagatgatgatcagaattctataggtgagggaagcagcgatgaacagaaaattaagcctgtgactgaaaatttagtgctgtcttcacatactggattttgccaatcttcaggagatgaagccttatctaaatcagtgcctgtcacagtggatgatgatgatgacgacaatgatcctgagaatagaattgccaagaagatgcttttagaagaaattaaagccaatctttcctctgatgaggatggatcttcagatgatgagccagaagaagggaaaaaaagaactggaaaacaaaatgaagaaaacccaggagatgaggaagcaaaaaatcaagtcaattctgaatcagattcagattctgaagaatctaagaagccaagatacagacataggcttttgcggcacaaattgactgtgagtgacggagaatctggagaagaaaaaaagacaaagcctaaagagcataaagaagtcaaaggcagaaacagaagaaaggtgagcagtgaagattcagaagattctgattttcaggaatcaggagttagtgaagaagttagtgaatccgaagatgaacagcggcccagaacaaggtctgcaaagaaagcagagttggaagaaaatcagcggagctat

SEQ ID NO: 277792 - DNA, 4038 bp, Artificial Sequence
  derived and/or modified sequence
atgagcgagagcaagctgaacaccctggtgcagaagctgcacgacttcctggcccacagcagcgaggagagcgaggagaccagcagcccccccagactggccatgaaccagaacaccgacaagatcagcggcagcggcagcaacagcgacatgatggagaacagcaaggaggagggcaccagcagcagcgagaagagcaagagcagcggcagcagcagaagcaagagaaagcccagcatcgtgaccaagtacgtggagagcgacgacgagaagcccctggacgacgagaccgtgaacgaggacgccagcaacgagaacagcgagaacgacatcaccatgcagagcctgcccaaggacggcctgcacggcatcgtgagctgcaccgcctgcggccagcaggtgaaccacttccagaaggacagcatctacagacaccccagcctgcaggtgctgatctgcaagaactgcttcaagtactacatgagcgacgacatcagcagagacagcgacggcatggacgagcagtgcagatggtgcgccgagggcggcaacctgatctgctgcgacttctgccacaacgccttctgcaagaagtgcatcctgagaaacctgggcagaaaggagctgagcaccatcatggacgagaacaaccagtggtactgctacatctgccaccccgagcccctgctggacctggtgaccgcctgcaacagcgtgttcgagaacctggagcagctgctgcagcagaacaagaagaagatcaaggtggacagcgagaagagcaacaaggtgtacgagcacaccagcagattcagccccaagaagaccagcagcaactgcaacggcgaggagaagaagctggacgacagctgcagcggcagcgtgacctacagctacagcgccctgatcgtgcccaaggagatgatcaagaaggccaagaagctgatcgagaccaccgccaacatgaacagcagctacgtgaagttcctgaagcaggccaccgacaacagcgagatcagcagcgccaccaagctgagacagctgaaggccttcaagagcgtgctggccgacatcaagaaggcccacctggccctggaggaggacctgaacagcgagttcagagccatggacgccgtgaacaaggagaagaacaccaaggagcacaaggtgatcgacgccaagttcgagaccaaggccagaaagggcgagaagccctgcgccctggagaagaaggacatcagcaagagcgaggccaagctgagcagaaagcaggtggacagcgagcacatgcaccagaacgtgcccaccgaggagcagagaaccaacaagagcaccggcggcgagcacaagaagagcgacagaaaggaggagccccagtacgagcccgccaacaccagcgaggacctggacatggacatcgtgagcgtgcccagcagcgtgcccgaggacatcttcgagaacctggagaccgccatggaggtgcagagcagcgtggaccaccagggcgacggcagcagcggcaccgagcaggaggtggagagcagcagcgtgaagctgaacatcagcagcaaggacaacagaggcggcgccgactgccaggaggtgccccaggacaaggacggctacaagagctgcggcctgaaccccaagctggagaagtgcggcctgggccaggagaacagcgacaacgagcacctggtggagaacgaggtgagcctgctgctggaggagagcgacctgagaagaagccccagagtgaagaccacccccctgagaagacccaccgagaccaaccccgtgaccagcaacagcgacgaggagtgcaacgagaccgtgaaggagaagcagaagctgagcgtgcccgtgagaaagaaggacaagagaaacagcagcgacagcgccatcgacaaccccaagcccaacaagctgcccaagagcaagcagagcgagaccgtggaccagaacagcgacagcgacgagatgctggccatcctgaaggaggtgagcagaatgagccacagcagcagcagcgacaccgacatcaacgagatccacaccaaccacaagaccctgtacgacctgaagacccaggccggcaaggacgacaagggcaagagaaagagaaagagcagcaccagcggcagcgacttcgacaccaagaagggcaagagcgccaagagcagcatcatcagcaagaagaagagacagacccagagcgagagcagcaactacgacagcgagctggagaaggagatcaagagcatgagcaagatcggcgccgccagaaccaccaagaagagaatccccaacaccaaggacttcgacagcagcgaggacgagaagcacagcaagaagggcatggacaaccagggccacaagaacctgaagaccagccaggagggcagcagcgacgacgccgagagaaagcaggagagagagaccttcagcagcgccgagggcaccgtggacaaggacaccaccatcatggagctgagagacagactgcccaagaagcagcaggccagcgccagcaccgacggcgtggacaagctgagcggcaaggagcagagcttcaccagcctggaggtgagaaaggtggccgagaccaaggagaagagcaagcacctgaagaccaagacctgcaagaaggtgcaggacggcctgagcgacatcgccgagaagttcctgaagaaggaccagagcgacgagaccagcgaggacgacaagaagcagagcaagaagggcaccgaggagaagaagaagcccagcgacttcaagaagaaggtgatcaagatggagcagcagtacgagagcagcagcgacggcaccgagaagctgcccgagagagaggagatctgccacttccccaagggcatcaagcagatcaagaacggcaccaccgacggcgagaagaagagcaagaagatcagagacaagaccagcaagaagaaggacgagctgagcgactacgccgagaagagcaccggcaagggcgacagctgcgacagcagcgaggacaagaagagcaagaacggcgcctacggcagagagaagaagagatgcaagctgctgggcaagagcagcagaaagagacaggactgcagcagcagcgacaccgagaagtacagcatgaaggaggacggctgcaacagcagcgacaagagactgaagagaatcgagctgagagagagaagaaacctgagcagcaagagaaacaccaaggagatccagagcggcagcagcagcagcgacgccgaggagagcagcgaggacaacaagaagaagaagcagagaaccagcagcaagaagaaggccgtgatcgtgaaggagaagaagagaaacagcctgagaaccagcaccaagagaaagcaggccgacatcaccagcagcagcagcagcgacatcgaggacgacgaccagaacagcatcggcgagggcagcagcgacgagcagaagatcaagcccgtgaccgagaacctggtgctgagcagccacaccggcttctgccagagcagcggcgacgaggccctgagcaagagcgtgcccgtgaccgtggacgacgacgacgacgacaacgaccccgagaacagaatcgccaagaagatgctgctggaggagatcaaggccaacctgagcagcgacgaggacggcagcagcgacgacgagcccgaggagggcaagaagagaaccggcaagcagaacgaggagaaccccggcgacgaggaggccaagaaccaggtgaacagcgagagcgacagcgacagcgaggagagcaagaagcccagatacagacacagactgctgagacacaagctgaccgtgagcgacggcgagagcggcgaggagaagaagaccaagcccaaggagcacaaggaggtgaagggcagaaacagaagaaaggtgagcagcgaggacagcgaggacagcgacttccaggagagcggcgtgagcgaggaggtgagcgagagcgaggacgagcagagacccagaaccagaagcgccaagaaggccgagctggaggagaaccagagaagctag

SEQ ID NO: 277793 - protein, 769 aa, Artificial Sequence
  derived and/or modified sequence
MQDFVAGMAGTAHIDGDHIVVSVPEAVLVSDVVTDDGITLDHGLAAEVVHGPDIITETDVVTEGVIVPEAVLEADVAIEEDLEEDDGDHILTSELITETVRVPEQVFVADLVTGPNGHLEHVVQDCVSGVDSPTMVSEEVLVTNSDTETVIQAAGGVPGSTVTIKTEDDDDDDVKSTSEDYLMISLDDVGEKLEHMGNTPLKIGSDGSQEDAKEDGFGSEVIKVYIFKAEAEDDVEIGGTEIVTESEYTSGHSVAGVLDQSRMQREKMVYMAVKDSSQEEDDISCAEIADEVYMEVIVGEEEGTSLPEIQLEDSDVNKTVVPVVWAAAYGNTLDSALESRSSTAAQYLQICDGINTNKVLKQKAKKRRRGETRQWQTAVIIGPDGQPLTVYPCHICTKKFKSRGFLKRHMKNHPDHLMRKKYQCTDCDFTTNKKVSFHNHLESHKLINKVDKTHEFTEYTRRYREASPLSSNKLILRDKEPKMHKCKYCDYETAEQGLLNRHLLAVHSKNFPHVCVECGKGFRHPSELKKHMRTHTGEKPYQCQYCIFRCADQSNLKTHIKSKHGNNLPYKCEHCPQAFGDERELQRHLDLFQGHKTHQCPHCDHKSTNSSDLKRHIISVHTKDFPHKCEVCDKGFHRPSELKKHSDIHKGRKIHQCRHCDFKTSDPFILSGHILSVHTKDQPLKCKRCKRGFRQQNELKKHMKTHTGRKIYQCEYCEYSTTDASGFKRHVISIHTKDYPHRCEFCKKGFRRPSEKNQHIMRHHKEALM

SEQ ID NO: 277794 - protein, 603 aa, Artificial Sequence
  derived and/or modified sequence
MISLDDVGEKLEHMGNTPLKIGSDGSQEDAKEDGFGSEVIKVYIFKAEAEDDVEIGGTEIVTESEYTSGHSVAGVLDQSRMQREKMVYMAVKDSSQEEDDISCAEIADEVYMEVIVGEEEGTSLPEIQLEDSDVNKTVVPVVWAAAYGDERRVSRRYEDCQASGNTLDSALESRSSTAAQYLQICDGINTNKVLKQKAKKRRRGETRQWQTAVIIGPDGQPLTVYPCHICTKKFKSRGFLKRHMKNHPDHLMRKKYQCTDCDFTTNKKVSFHNHLESHKLINKVDKTHEFTEYTRRYREASPLSSNKLILRDKEPKMHKCKYCDYETAEQGLLNRHLLAVHSKNFPHVCVECGKGFRHPSELKKHMRTHTGEKPYQCQYCIFRCADQSNLKTHIKSKHGNNLPYKCEHCPQAFGDERELQRHLDLFQGHKTHQCPHCDHKSTNSSDLKRHIISVHTKDFPHKCEVCDKGFHRPSELKKHSDIHKGRKIHQCRHCDFKTSDPFILSGHILSVHTKDQPLKCKRCKRGFRQQNELKKHMKTHTGRKIYQCEYCEYSTTDASGFKRHVISIHTKDYPHRCEFCKKGFRRPSEKNQHIMRHHKEALM

SEQ ID NO: 277795 - DNA, 2310 bp, Artificial Sequence
  derived and/or modified sequence
atgcaggacttcgtggccggcatggccggcaccgcccacatcgacggcgaccacatcgtggtgagcgtgcccgaggccgtgctggtgagcgacgtggtgaccgacgacggcatcaccctggaccacggcctggccgccgaggtggtgcacggccccgacatcatcaccgagaccgacgtggtgaccgagggcgtgatcgtgcccgaggccgtgctggaggccgacgtggccatcgaggaggacctggaggaggacgacggcgaccacatcctgaccagcgagctgatcaccgagaccgtgagagtgcccgagcaggtgttcgtggccgacctggtgaccggccccaacggccacctggagcacgtggtgcaggactgcgtgagcggcgtggacagccccaccatggtgagcgaggaggtgctggtgaccaacagcgacaccgagaccgtgatccaggccgccggcggcgtgcccggcagcaccgtgaccatcaagaccgaggacgacgacgacgacgacgtgaagagcaccagcgaggactacctgatgatcagcctggacgacgtgggcgagaagctggagcacatgggcaacacccccctgaagatcggcagcgacggcagccaggaggacgccaaggaggacggcttcggcagcgaggtgatcaaggtgtacatcttcaaggccgaggccgaggacgacgtggagatcggcggcaccgagatcgtgaccgagagcgagtacaccagcggccacagcgtggccggcgtgctggaccagagcagaatgcagagagagaagatggtgtacatggccgtgaaggacagcagccaggaggaggacgacatcagctgcgccgagatcgccgacgaggtgtacatggaggtgatcgtgggcgaggaggagggcaccagcctgcccgagatccagctggaggacagcgacgtgaacaagaccgtggtgcccgtggtgtgggccgccgcctacggcaacaccctggacagcgccctggagagcagaagcagcaccgccgcccagtacctgcagatctgcgacggcatcaacaccaacaaggtgctgaagcagaaggccaagaagagaagaagaggcgagaccagacagtggcagaccgccgtgatcatcggccccgacggccagcccctgaccgtgtacccctgccacatctgcaccaagaagttcaagagcagaggcttcctgaagagacacatgaagaaccaccccgaccacctgatgagaaagaagtaccagtgcaccgactgcgacttcaccaccaacaagaaggtgagcttccacaaccacctggagagccacaagctgatcaacaaggtggacaagacccacgagttcaccgagtacaccagaagatacagagaggccagccccctgagcagcaacaagctgatcctgagagacaaggagcccaagatgcacaagtgcaagtactgcgactacgagaccgccgagcagggcctgctgaacagacacctgctggccgtgcacagcaagaacttcccccacgtgtgcgtggagtgcggcaagggcttcagacaccccagcgagctgaagaagcacatgagaacccacaccggcgagaagccctaccagtgccagtactgcatcttcagatgcgccgaccagagcaacctgaagacccacatcaagagcaagcacggcaacaacctgccctacaagtgcgagcactgcccccaggccttcggcgacgagagagagctgcagagacacctggacctgttccagggccacaagacccaccagtgcccccactgcgaccacaagagcaccaacagcagcgacctgaagagacacatcatcagcgtgcacaccaaggacttcccccacaagtgcgaggtgtgcgacaagggcttccacagacccagcgagctgaagaagcacagcgacatccacaagggcagaaagatccaccagtgcagacactgcgacttcaagaccagcgaccccttcatcctgagcggccacatcctgagcgtgcacaccaaggaccagcccctgaagtgcaagagatgcaagagaggcttcagacagcagaacgagctgaagaagcacatgaagacccacaccggcagaaagatctaccagtgcgagtactgcgagtacagcaccaccgacgccagcggcttcaagagacacgtgatcagcatccacaccaaggactacccccacagatgcgagttctgcaagaagggcttcagaagacccagcgagaagaaccagcacatcatgagacaccacaaggaggccctgatgtag

SEQ ID NO: 277796 - DNA, 1812 bp, Artificial Sequence
  derived and/or modified sequence
atgatcagcctggacgacgtgggcgagaagctggagcacatgggcaacacccccctgaagatcggcagcgacggcagccaggaggacgccaaggaggacggcttcggcagcgaggtgatcaaggtgtacatcttcaaggccgaggccgaggacgacgtggagatcggcggcaccgagatcgtgaccgagagcgagtacaccagcggccacagcgtggccggcgtgctggaccagagcagaatgcagagagagaagatggtgtacatggccgtgaaggacagcagccaggaggaggacgacatcagctgcgccgagatcgccgacgaggtgtacatggaggtgatcgtgggcgaggaggagggcaccagcctgcccgagatccagctggaggacagcgacgtgaacaagaccgtggtgcccgtggtgtgggccgccgcctacggcgacgagagaagagtgagcagaagatacgaggactgccaggccagcggcaacaccctggacagcgccctggagagcagaagcagcaccgccgcccagtacctgcagatctgcgacggcatcaacaccaacaaggtgctgaagcagaaggccaagaagagaagaagaggcgagaccagacagtggcagaccgccgtgatcatcggccccgacggccagcccctgaccgtgtacccctgccacatctgcaccaagaagttcaagagcagaggcttcctgaagagacacatgaagaaccaccccgaccacctgatgagaaagaagtaccagtgcaccgactgcgacttcaccaccaacaagaaggtgagcttccacaaccacctggagagccacaagctgatcaacaaggtggacaagacccacgagttcaccgagtacaccagaagatacagagaggccagccccctgagcagcaacaagctgatcctgagagacaaggagcccaagatgcacaagtgcaagtactgcgactacgagaccgccgagcagggcctgctgaacagacacctgctggccgtgcacagcaagaacttcccccacgtgtgcgtggagtgcggcaagggcttcagacaccccagcgagctgaagaagcacatgagaacccacaccggcgagaagccctaccagtgccagtactgcatcttcagatgcgccgaccagagcaacctgaagacccacatcaagagcaagcacggcaacaacctgccctacaagtgcgagcactgcccccaggccttcggcgacgagagagagctgcagagacacctggacctgttccagggccacaagacccaccagtgcccccactgcgaccacaagagcaccaacagcagcgacctgaagagacacatcatcagcgtgcacaccaaggacttcccccacaagtgcgaggtgtgcgacaagggcttccacagacccagcgagctgaagaagcacagcgacatccacaagggcagaaagatccaccagtgcagacactgcgacttcaagaccagcgaccccttcatcctgagcggccacatcctgagcgtgcacaccaaggaccagcccctgaagtgcaagagatgcaagagaggcttcagacagcagaacgagctgaagaagcacatgaagacccacaccggcagaaagatctaccagtgcgagtactgcgagtacagcaccaccgacgccagcggcttcaagagacacgtgatcagcatccacaccaaggactacccccacagatgcgagttctgcaagaagggcttcagaagacccagcgagaagaaccagcacatcatgagacaccacaaggaggccctgatgtag

SEQ ID NO: 277797 - DNA, 2310 bp, Artificial Sequence
  derived and/or modified sequence
atgcaagactttgtggctggcatggctggaaccgctcacattgatggagaccatatcgtggtgtccgttcctgaagcagtgttggtgagcgacgtagtgacagacgatggaattactttggatcatggcctggcagccgaggtcgtgcatggccctgatatcatcacggaaactgatgttgtgacagagggagtcatcgtcccagaggctgttcttgaagcggacgtggcgattgaggaggacctggaagaggatgatggggaccacattttgactagcgaactgatcactgagactgttcgggtgcctgagcaagtgtttgtcgccgacttagtaaccggccctaacggacatctggaacatgtggtgcaggattgcgtaagcggcgtggactcccccaccatggtgagcgaagaggtgttggtcacaaatagcgacacagagacagtgattcaggcggcaggcggggtccccggatctaccgtgacgattaagaccgaagacgatgatgatgatgacgttaaatcgactagcgaggactaccttatgatatctttagacgacgtgggcgaaaaactggaacacatgggcaacacacccctgaagattgggtctgatgggtcacaggaggatgcgaaagaggacgggttcggtagtgaggtcattaaagtgtatatctttaaagctgaggcggaggatgacgtcgaaatcggcggcaccgagatcgtaactgaatctgaatatacatctggccattctgtcgcaggagtcttagaccagagtagaatgcagcgcgaaaagatggtctatatggctgtaaaagatagtagccaggaagaggacgacattagctgtgcagagattgccgacgaggtctatatggaagtaattgtaggtgaagaagaggggaccagtttacccgagattcagctggaggactctgatgttaacaaaacggtggtccccgtggtctgggcagccgcttatggaaacactctggactccgccttagagagcagaagtagtacggccgctcagtacttgcaaatctgcgacggaatcaataccaacaaggtgcttaaacaaaaagctaagaagcgccgccgcggtgaaacaagacagtggcagacagctgtgattattgggcccgacggacagcccctgactgtctacccatgtcacatctgcacgaagaaattcaagagtcgcgggttccttaaacgacatatgaaaaatcatcccgatcacctaatgcgaaagaaatatcagtgcactgactgtgattttaccactaataaaaaggtctcattccacaatcacctggagtctcataaattaataaataaggtggataaaacccacgagtttaccgagtatacgcgccgctaccgggaggcatcacctctgtcgagcaataaattaatacttagggataaggaacctaaaatgcataagtgcaagtattgcgattatgaaaccgccgagcaggggctcctcaacagacatcttcttgctgtccattctaaaaactttcctcacgtatgcgtggaatgcggaaagggtttccgccacccaagtgagctgaagaagcacatgcgcactcataccggtgaaaagccctatcagtgtcagtattgcatcttccgatgtgctgatcagtctaacctcaaaacccatattaaatctaagcacggaaataatttgccctacaagtgtgagcattgcccccaagccttcggcgacgagcgggagctccaaaggcatctggatctgtttcaggggcataaaacccatcagtgcccgcactgtgaccacaagagcactaattctagcgacttaaagagacatatcatatccgtacacactaaggatttcccacacaagtgcgaggtatgcgacaagggatttcaccggccctctgaactgaagaaacactctgacatccacaaggggagaaaaattcatcagtgtaggcactgtgacttcaagacatctgatcccttcattcttagcggacacattctaagcgtgcacaccaaggatcagccactgaaatgtaagcggtgtaaaagggggtttagacagcagaacgaactcaaaaaacacatgaagacgcatacaggacgcaagatttatcagtgcgaatattgtgagtacagcacaactgatgcatccggcttcaagcgtcacgtgatcagcattcacactaaagattatccacatcgctgcgaattttgcaaaaaaggatttagaaggccctcagagaaaaaccagcacatcatgagacatcataaggaggctttgatgtag

SEQ ID NO: 277798 - DNA, 1812 bp, Artificial Sequence
  derived and/or modified sequence
atgatcagtctggatgacgtgggcgagaaacttgaacacatgggaaatacacccctgaagatcggctcagatggaagccaagaggatgccaaagaggatggctttggctcagaagttattaaagtttatattttcaaggccgaggctgaggatgatgtcgagatcggaggaacagagattgtgacagaaagcgagtacacctccggtcactccgtcgccggagtgttagaccagtcgcggatgcagagggagaagatggtatacatggccgtgaaggattcttctcaggaagaggatgacatctcctgtgctgaaatagctgacgaagtctatatggaggtgatcgtgggggaggaggaaggaacatcgctgcccgagatccagcttgaagacagcgatgttaataaaacggtagtcccggtcgtgtgggccgcggcctacggagacgagaggagagtcagcagacggtacgaggactgtcaggcatccggcaacaccttggatagcgcattggagtcacggtcctccactgctgctcagtacctgcaaatctgcgatggcattaatactaataaggtccttaagcagaaagcgaagaagagaagacgcggagagactcggcagtggcagacggcagtcatcattggcccagatggccagccactcaccgtgtatccgtgtcacatttgcactaaaaagtttaaaagccggggcttcctcaaacggcatatgaagaaccaccccgaccatctaatgcgcaaaaagtaccaatgtaccgattgtgacttcacgaccaacaaaaaggtttcatttcacaatcatctagagtcccacaagctgattaataaggttgacaaaacgcacgaatttacggagtacactcgccggtacagagaggctagtcccctcagttccaacaagttgatcctgagggacaaggagccgaaaatgcataaatgtaaatactgcgactatgagactgccgagcagggcctactgaatcgacacctactggcggtccactctaagaatttccctcatgtctgcgtagaatgcgggaaggggtttaggcatcccagcgagctaaagaagcacatgcggacccacaccggcgagaaaccataccagtgtcagtattgtatcttcagatgcgccgaccagtccaatttgaaaactcatatcaagtcaaagcacggcaataaccttccatataagtgcgaacactgcccacaagcttttggcgacgagagggagttacagcgacacctggacctctttcaaggccacaagactcaccaatgcccacactgtgatcataagtccacaaattcttctgacctcaagcggcacattattagcgtgcacacaaaggatttcccccataaatgtgaggtttgcgacaagggattccatcgccctagcgagcttaagaaacacagcgatattcataagggcaggaagatccaccagtgtcgacattgcgactttaaaacaagcgaccctttcatcttgagtggccacatcctctcggtgcacactaaggatcaacctttaaaatgcaagcggtgcaagcgtggctttaggcaacagaatgagctgaaaaagcacatgaagacacacacaggcaggaaaatttaccagtgtgagtactgtgagtacagcacaactgatgcgtctgggttcaaacgccacgttataagtattcacaccaaggattatccacatcggtgtgaattttgtaaaaaaggcttccgacggccgtctgagaagaatcagcacattatgcgacaccacaaagaggctctgatgtag

SEQ ID NO: 277799 - DNA, 2310 bp, Artificial Sequence
  derived and/or modified sequence
atgcaggactttgtggccggcatggccggcacagcccacattgatggagaccacatcgtggtgtctgtgcctgaggccgtgctggtgtctgatgtggtgacagatgatggcatcaccctggaccacggcctggccgctgaggtggtgcacggccctgacatcatcacagaaacagatgtggtgacagagggcgtcatcgtgcctgaggccgtgctggaggctgatgtggccatcgaggaggacctggaggaggatgatggagaccacatcctgaccagcgagctgatcacagaaacagtgcgggtgcctgagcaggtgtttgtggccgacctggtgacaggccccaacggccacctggagcacgtggtgcaggactgtgtgtctggagtggacagccccaccatggtgtctgaggaggtgctggtgaccaacagcgacacagaaacagtcatccaggccgccggcggcgtgcccggcagcacagtgaccatcaagacagaagatgatgatgatgatgatgtgaagagcaccagcgaggactacctgatgatcagcctggatgatgtgggggagaagctggagcacatgggcaacacccccctgaagattggaagtgatggcagccaggaggatgccaaggaggatggctttggaagtgaggtgatcaaggtgtacatcttcaaggccgaggccgaggatgatgtggagattggaggaacagagatcgtgacagagagcgagtacaccagcggccacagcgtggccggcgtgctggaccagagcaggatgcagcgggagaagatggtgtacatggctgtgaaggacagcagccaggaggaggatgacatcagctgtgccgagattgctgatgaggtgtacatggaggtgattgtgggggaggaggagggcaccagcctgcctgagatccagctggaggacagtgatgtgaacaagacagtggtgcctgtggtgtgggccgccgcctacggcaacaccctggacagcgccctggagagccgcagcagcacagctgcccagtacctgcagatctgtgatggcatcaacaccaacaaggtgctgaagcagaaggccaagaagagaagaagaggagagacccggcagtggcagacagctgtgatcattggaccagatggccagcccctgactgtgtacccctgccacatctgcaccaagaagttcaagagccggggcttcctgaagaggcacatgaagaaccacccagaccacctgatgaggaagaagtaccagtgcacagactgtgacttcaccaccaacaagaaggtgtccttccacaaccacctggagagccacaagctgatcaacaaggtggacaagacccatgagttcacagagtacacccggcgctaccgggaggccagccccctgagcagcaacaagctgatcctgcgggacaaggagcccaagatgcacaagtgcaagtactgtgactatgaaacagctgagcagggcctgctgaacagacacctgctggccgtgcacagcaagaacttcccccacgtgtgtgtggagtgtgggaagggcttccgccaccccagcgagctgaagaagcacatgaggacccacactggagagaagccctaccagtgccagtactgcatcttccgctgtgccgaccagagcaacctgaagacccacatcaagagcaagcacggcaacaacctgccctacaagtgtgagcactgcccccaggcctttggagatgagcgggagctgcagaggcacctggacctcttccagggccacaagacccaccagtgcccccactgtgaccacaagagcaccaacagcagtgacctgaagaggcacatcatctctgtgcacaccaaggacttcccccacaagtgtgaggtgtgtgacaagggcttccaccggcccagcgagctgaagaagcacagcgacatccacaagggcaggaagatccaccagtgccgccactgtgacttcaagaccagtgaccccttcatcctgagcggccacatcctgtctgtgcacaccaaggaccagcccctgaagtgcaagcgctgcaagaggggcttccggcagcagaatgagctgaagaagcacatgaagacccacactggaaggaagatctaccagtgtgagtactgtgagtacagcaccacagatgccagcggcttcaagagacatgtgatcagcatccacaccaaggactacccccaccgctgtgagttctgcaagaagggcttcagaagacccagcgagaagaaccagcacatcatgaggcaccacaaggaggccctgatgtag

SEQ ID NO: 277800 - DNA, 1812 bp, Artificial Sequence
  derived and/or modified sequence
atgatcagcctggatgatgtgggggagaagctggagcacatgggcaacacccccctgaagattggaagtgatggcagccaggaggatgccaaggaggatggctttggaagtgaggtgatcaaggtgtacatcttcaaggccgaggccgaggatgatgtggagattggaggaacagagatcgtgacagagagcgagtacaccagcggccacagcgtggccggcgtgctggaccagagcaggatgcagcgggagaagatggtgtacatggctgtgaaggacagcagccaggaggaggatgacatcagctgtgccgagattgctgatgaggtgtacatggaggtgattgtgggggaggaggagggcaccagcctgcctgagatccagctggaggacagtgatgtgaacaagacagtggtgcctgtggtgtgggccgccgcctatggagatgaaagaagagtgtccagaagatatgaggactgccaggccagcggcaacaccctggacagcgccctggagagccgcagcagcacagctgcccagtacctgcagatctgtgatggcatcaacaccaacaaggtgctgaagcagaaggccaagaagagaagaagaggagagacccggcagtggcagacagctgtgatcattggaccagatggccagcccctgactgtgtacccctgccacatctgcaccaagaagttcaagagccggggcttcctgaagaggcacatgaagaaccacccagaccacctgatgaggaagaagtaccagtgcacagactgtgacttcaccaccaacaagaaggtgtccttccacaaccacctggagagccacaagctgatcaacaaggtggacaagacccatgagttcacagagtacacccggcgctaccgggaggccagccccctgagcagcaacaagctgatcctgcgggacaaggagcccaagatgcacaagtgcaagtactgtgactatgaaacagctgagcagggcctgctgaacagacacctgctggccgtgcacagcaagaacttcccccacgtgtgtgtggagtgtgggaagggcttccgccaccccagcgagctgaagaagcacatgaggacccacactggagagaagccctaccagtgccagtactgcatcttccgctgtgccgaccagagcaacctgaagacccacatcaagagcaagcacggcaacaacctgccctacaagtgtgagcactgcccccaggcctttggagatgagcgggagctgcagaggcacctggacctcttccagggccacaagacccaccagtgcccccactgtgaccacaagagcaccaacagcagtgacctgaagaggcacatcatctctgtgcacaccaaggacttcccccacaagtgtgaggtgtgtgacaagggcttccaccggcccagcgagctgaagaagcacagcgacatccacaagggcaggaagatccaccagtgccgccactgtgacttcaagaccagtgaccccttcatcctgagcggccacatcctgtctgtgcacaccaaggaccagcccctgaagtgcaagcgctgcaagaggggcttccggcagcagaatgagctgaagaagcacatgaagacccacactggaaggaagatctaccagtgtgagtactgtgagtacagcaccacagatgccagcggcttcaagagacatgtgatcagcatccacaccaaggactacccccaccgctgtgagttctgcaagaagggcttcagaagacccagcgagaagaaccagcacatcatgaggcaccacaaggaggccctgatgtag

SEQ ID NO: 277801 - DNA, 2310 bp, Artificial Sequence
  derived and/or modified sequence
atgcaggacttcgtggccggcatggccggcaccgcccacatcgacggagaccatatcgtggtgagcgtaccagaggccgttctagtgagcgatgtggtgactgacgatggcattacgctggatcacgggctcgccgcggaagtcgtacacgggccagacatcatcactgaaaccgacgtcgtcacagaaggagtgatcgtgccagaggctgtgctagaagccgacgtagccattgaagaggatcttgaagaagatgacggggaccacattctcacttccgagctgattaccgagactgtgagagttccagagcaggtgtttgtggccgacctggtaacaggacccaacggccacttggagcatgtggtccaagactgtgttagtggggttgactctcccaccatggtgtcggaggaggtgcttgtgaccaactccgacacagagactgtcattcaggccgccggtggggtgcctggttcaaccgtgaccatcaagacagaagatgatgacgatgatgacgtgaaatctacgagtgaagattacctgatgatctcgctggatgatgtcggcgagaagctggaacacatggggaatacccccctgaagatcgggagcgacggaagtcaagaagacgctaaagaagatggtttcggcagtgaagtgattaaagtctacatctttaaagccgaggcagaggatgacgttgaaatcgggggtactgaaatcgttactgagagcgaatatactagcggccactcggtggctggcgtcttggaccagagtaggatgcaacgggaaaaaatggtgtatatggctgtgaaagactccagccaggaggaagatgacatttcttgtgctgagatagctgatgaggtgtatatggaggtgattgtgggtgaggaggaggggacttccctgcccgaaatccaattggaggatagcgacgtgaacaaaaccgtggtgccggtcgtttgggcagcagcatacgggaacacactagacagcgcgctggaatcccgaagctcaacggccgcccaatacctccagatttgtgatggcatcaatactaataaggtgttaaagcagaaagctaagaaacgcagacgcggtgagacccggcaatggcagacagcggtcatcattggtcctgacgggcaacctctgactgtgtatccatgtcacatatgcacaaaaaaatttaaatcccgaggttttctgaagcgtcacatgaaaaaccacccagaccaccttatgcgaaagaaatatcaatgcactgattgcgactttacgactaataagaaagtgagcttccacaaccacttggaatcccacaagttaatcaacaaggtggataagacgcacgagttcacagagtataccagaagatacagggaagcctctcccctctcttccaacaagctcatcctcagagataaggagccaaaaatgcataagtgcaaatattgcgattacgaaacggccgagcagggcctgctgaaccgccacctgttggcagtccactcaaaaaattttccacatgtttgtgtggagtgtggtaaggggttccgacatccttccgagctgaaaaaacatatgaggacccatacaggagagaaaccttatcagtgtcaatactgcattttcaggtgtgctgaccaatctaacttgaagacccatatcaaaagcaagcacggaaataacctgccatacaagtgcgaacactgccctcaagcattcggcgacgagcgggagttgcagcggcatctggacctgttccaggggcacaagacacatcagtgtccccattgcgaccacaagtcgacaaactcgtccgacctgaaaaggcatattattagtgttcatactaaggattttcctcacaaatgtgaagtgtgtgacaagggcttccaccgaccatcagagctaaagaagcattcagacatccataagggacgaaaaattcaccagtgccggcactgcgactttaagacctcggacccttttatcctgagcggccacatactcagcgtgcatactaaggaccaacccctgaaatgcaagcgatgcaagcgcggttttcgacagcaaaatgaattgaagaagcacatgaaaacccacaccggtcgcaagatctatcagtgtgagtactgcgaatactccacaaccgatgcctcgggatttaaacgccacgtgatctcaattcacacgaaagactatccccacaggtgcgagttctgtaagaaagggttccgccggcccagcgaaaaaaatcagcatattatgagacaccacaaagaagcgctgatgtag

SEQ ID NO: 277802 - DNA, 1812 bp, Artificial Sequence
  derived and/or modified sequence
atgatcagcctggacgacgtgggcgagaagctggagcacatgggcaacacacccttgaaaataggttcagacgggagccaagaggatgcaaaggaggacggattcggaagtgaggtaatcaaggtgtatatattcaaggctgaagccgaggatgacgtggagatcggaggcacagagattgtgacagagagcgaatatacttcaggtcattccgtggccggggtcctcgatcaatccaggatgcagcgcgagaaaatggtatatatggccgtcaaggatagttctcaggaagaagatgacatctcgtgtgccgagatcgccgacgaggtgtacatggaagtcatcgttggggaggaagagggcacttcactgccagaaattcagcttgaagatagcgatgtgaataagaccgtggtgccagtggtgtgggcagccgcctacggtgacgagcggcgcgttagccgacgctatgaagattgccaggccagcggaaacaccttggacagtgctctggaatcccggtcctcaacagcggcgcagtacctccagatttgtgacggtattaataccaataaagtcctgaaacagaaagccaaaaagcgacgacgcggcgagactcggcagtggcaaactgctgtgatcatcggaccagacggtcaaccactcacagtatacccatgtcatatctgtacgaaaaagttcaaatcacgcggctttctgaaacgccacatgaaaaaccatcccgaccacctgatgcgcaagaagtaccaatgcaccgactgtgactttacgacaaataagaaggtatcgtttcataatcacctggagtctcacaagctaataaacaaagtcgacaagactcatgaattcacagaatacacaagacgctacagggaggcctcacccctgtcatcaaataagttgatcctccgggacaaggagcccaagatgcacaaatgcaagtactgtgactatgagactgccgagcaaggcctgctgaataggcacttgctcgcagtgcactcgaagaattttccacatgtttgtgttgaatgcggaaagggctttagacaccctagtgaattaaagaagcatatgagaactcacactggcgagaagccataccaatgccagtactgtatctttagatgcgcagaccagagcaatctcaagacccacataaaatcaaaacacggcaacaacttaccctacaaatgcgaacattgtccccaggcatttggcgatgagcgcgaactgcagaggcatctggacctctttcaggggcacaaaactcaccaatgcccccactgcgaccataaaagtaccaacagcagtgatctgaagcggcacataattagcgttcacactaaggacttccctcacaaatgtgaagtttgtgacaaaggattccaccggccctctgaattgaagaagcacagcgatattcacaagggccgcaaaattcatcagtgccggcattgtgattttaaaacatcagatcctttcattttaagtggccatatcctgagcgtgcatacaaaggaccaacccctgaagtgcaaacgttgcaagcgcggcttccggcaacagaacgaacttaagaagcatatgaagacacacaccgggcgaaaaatctaccagtgtgagtactgtgagtattccacgacagacgcctcggggtttaagagacatgtgatctcgatccatactaaagattatcctcaccgctgtgagttctgcaagaagggcttccggaggcccagtgagaagaatcagcatataatgcggcatcacaaagaagccctcatgtag

SEQ ID NO: 277803 - DNA, 2310 bp, Artificial Sequence
  derived and/or modified sequence
atgcaagattttgtagctggcatggcaggcacagcacacatcgatggcgatcatatagtggtgagtgtacctgaagccgtgctggtttccgacgtggtaactgatgatggaatcaccctagaccacggtctagccgctgaagttgtgcacggtcccgacatcataaccgaaaccgacgtcgtgaccgagggtgtgatagtgccagaggctgtgctcgaggctgacgtcgcgattgaggaagatttagaagaggatgatggcgaccatatactgacaagcgaattaatcaccgagacggtcagagtccccgagcaggtcttcgtggccgacctggtaaccggtcccaatggccacttagagcacgtcgttcaggactgtgtgagcggggtggattcgccaactatggtatcagaggaggtgctcgtcactaactccgatacagagacggtaatccaggcagctggtggagttcccggttccaccgttactattaaaactgaggatgacgacgatgatgacgttaagagcactagtgaagattacctgatgatcagcctcgacgatgtgggcgagaagctggagcatatgggaaatactcctttaaaaatcgggtcggacggcagccaggaagatgctaaggaagatgggttcggctccgaggtgatcaaagtatatatatttaaggcggaggccgaggacgatgtcgaaatcgggggaaccgaaatagtgactgagtccgagtataccagcgggcactctgtggctggcgtgctcgaccaaagccgaatgcaacgggaaaagatggtgtacatggctgtgaaagactctagtcaagaggaggatgacatttcctgcgcagagattgcagacgaggtgtacatggaggtaattgtgggagaagaggaggggacttccttgcccgagattcagcttgaggattccgacgtcaataaaacagtggtccccgtcgtgtgggctgccgcttatgggaacaccctggactccgcactggagtctaggtctagcacagcagcccagtatctccagatctgtgacggaattaacacgaataaggtgctgaagcagaaggcaaagaaaaggaggcgcggagagacccggcaatggcagactgctgttattattgggcctgacggccagcccttgaccgtgtatccttgccacatctgcacaaaaaagtttaagtcccggggatttttaaaacggcacatgaagaaccaccctgatcacctgatgagaaaaaagtatcagtgcacagattgtgacttcaccacaaataagaaggtgtcatttcacaaccacttggaatcccataaactgataaacaaagtggacaagactcatgagtttacagaatacactcgccgttaccgggaagcctcccctctttcttccaacaaactgatactccgggataaggagcccaaaatgcacaaatgtaagtactgcgactacgagactgccgagcaagggctgctgaatcggcacctgttagccgtgcactcaaaaaactttcctcacgtgtgtgtggaatgcggtaagggatttcgacacccaagtgagttgaaaaagcatatgcggacccataccggcgagaagccgtaccagtgccagtactgcatattcagatgcgcagatcagtctaatcttaaaactcacatcaagagcaagcatggcaacaatttgccttacaagtgtgagcattgtccacaggcgtttggagacgagcgagagctgcagcgtcacctagatttatttcagggccacaaaacccaccagtgtccccattgcgaccacaagtccacaaactcttccgatctcaagcgacacatcatatctgttcataccaaggattttccgcataaatgcgaagtctgtgataagggatttcaccgcccttctgaacttaaaaagcattcagacatacacaaaggcaggaagattcaccagtgtcgtcattgtgactttaagacttctgacccgtttatcctgagtggacatattctgagcgtccatacgaaagatcaacctctgaagtgcaaacgatgcaagagaggctttcggcaacagaacgagctaaaaaagcatatgaagactcatacaggtcgaaaaatttaccagtgtgagtattgcgagtattccaccactgacgctagtgggtttaagagacatgtcatttcgattcacactaaagattaccctcaccgatgtgagttttgtaagaaaggattccggaggccttccgaaaagaaccagcacataatgcgtcatcacaaagaggctttgatgtag

SEQ ID NO: 277804 - DNA, 1812 bp, Artificial Sequence
  derived and/or modified sequence
atgatatccctcgatgatgtcggagagaaactggagcacatgggaaatacaccactgaagatcgggtcagacggaagccaggaggatgctaaagaagatggttttggatctgaagttatcaaagtttacatctttaaggcggaagcagaggatgatgttgaaatagggggtacagagatcgtcaccgaatctgagtatacatcaggccattcagtggccggagtgctcgaccagtcaagaatgcagagagaaaagatggtctacatggctgtgaaggattcatcccaggaagaggatgatatctcttgcgccgagattgcagatgaagtatacatggaggtaatcgtgggcgaggaggaggggacatcattgccggagatccaactcgaggatagcgatgtgaataagactgtggtccccgtggtttgggccgctgcatacggcgatgagcggagggtctcacggcgatacgaggactgtcaggcctccgggaacacactggactcagcgctggaaagtcggtcttcaactgcagcccaatatctgcagatctgcgatggcatcaacaccaataaagtcttgaagcagaaagcaaaaaaaagaagaaggggagaaaccagacagtggcaaacagctgtcataatcggtcctgacgggcagcccctgacagtttatccctgtcacatttgtactaaaaagtttaagagccgcggatttttgaagcgacatatgaagaatcatccggaccacctgatgcgcaaaaagtaccagtgcactgactgcgacttcactaccaataaaaaggtgtcctttcataaccaccttgaatctcacaagctgattaacaaagttgacaaaacacacgaatttaccgagtataccagaaggtatagagaggcgtccccactgagcagcaataaactaattcttcgggataaagagccgaagatgcataaatgtaaatactgcgactacgagacagctgagcaaggactgcttaacaggcatctgttagcggtacactccaagaattttccccatgtgtgtgtggagtgcggtaaaggattcaggcatccttcagaactcaagaagcacatgaggacccacaccggagagaaaccttatcagtgccagtactgtatttttagatgtgccgaccaaagcaacctgaaaactcatattaaatccaagcacggcaataatcttccatataaatgtgagcattgccctcaggcctttggggatgagagggagctgcagagacacctggatctgtttcagggacacaaaactcaccagtgcccgcattgcgaccataagagcactaacagcagtgacctgaaacgccacatcatctctgtccacacgaaagatttcccacataagtgtgaagtctgtgataagggattccaccggccatcagaactcaaaaaacactctgatatacataaaggacggaagatccatcagtgccgccattgtgacttcaagacctcggacccttttattttatcaggccatatcctgtctgtacacacaaaggatcagcccctgaagtgcaaacggtgtaaaagggggtttagacaacagaacgaattaaaaaagcacatgaagacgcatacgggtagaaaaatctaccagtgcgaatattgtgagtacagcactaccgatgcttcaggtttcaaacggcacgtgatctcgatccacaccaaggactacccccaccggtgcgagttttgtaaaaagggattccgccgaccctccgagaagaatcagcatataatgaggcatcacaaagaagctttgatgtag

SEQ ID NO: 277805 - DNA, 4255 bp, Artificial Sequence
  derived and/or modified sequence
agacgcagagtagattgtgattggctcgggctgcggaacctcggaaacccgaatgtgaggaccttaagggatccacagctgccgccccccgcagccatccagagcgcggtcacagtccgactggcggcacggaggcggcggcggcggcggcggcggcagcggcggcggcagcggcggcggcagctgtagctgcagcagcaggtaaagagagcgttttcccaaagaaaataacatagcacagaaggaaaaataaaaagaaattgctgcagattttactttatgtgagaaaatctacaatttcttcgagacactcatataaagatattggtgaatgaactttgctaagtatggattcaggcggtggaagtcttggattgcacacgccagactctagaatggcccataccatgattatgcaagattttgtggctggaatggctggtactgcacatatcgatggagaccatattgttgtttcagttcctgaagctgttttagtttctgatgttgtcacagatgatgggataactcttgatcatggccttgcagctgaagttgtccatggacctgatatcatcacagagactgatgtagtaacagaaggtgtgattgttcctgaagcggtacttgaagctgatgttgccattgaagaggatttagaggaagatgatggtgatcacatcttgacttctgaactaattacagaaaccgttagggtaccagagcaggttttcgtggctgaccttgttactggtcctaatggacacttagaacatgtggtccaagattgtgtttcaggagtcgactctcccacaatggtatcagaggaggttcttgtaactaattcagatacagaaactgtgattcaagcagctggaggtgttcctggttctacagttactataaaaaccgaagatgatgatgatgatgatgtcaagagcacttctgaagactacttaatgatatctttggatgatgttggagaaaaattagagcatatggggaatacaccattaaaaattggcagtgatggttcacaagaagatgctaaagaagatgggtttggttctgaagttataaaagtgtatatatttaaagcggaggctgaagatgatgttgaaataggtggaacagaaattgtcacagagagtgagtacaccagtggacattcagtagctggagtgcttgaccagagccgaatgcagcgggagaagatggtttacatggcagttaaagattcttctcaagaagaagatgatatcagttgcgctgaaatagcagatgaagtttacatggaagtcattgtaggggaagaggaaggaacttctctccctgagattcagcttgaggactctgatgttaataaaacagttgtccctgttgtctgggctgcggcatatggaaatactttggactcagcattagaaagcagaagtagtacagcagcacagtaccttcaaatttgtgacggcattaatacaaataaagtacttaaacaaaaagccaaaaagaggagaaggggagaaaccaggcagtggcaaacagctgttataataggtcctgatggacagcccctcacagtgtacccttgccatatttgcacaaaaaagtttaaatccaggggattcttaaaaagacacatgaagaatcatcctgatcatttaatgagaaaaaaatatcagtgtacagattgtgactttacaactaacaagaaagtgagtttccataaccacttagaaagccataagctcataaacaaagtcgacaaaacccatgaatttacagaatacacacgaagatacagagaggctagtccactgagttccaataaacttattttaagagacaaggagccgaagatgcacaagtgcaaatactgtgactatgaaactgcagaacaaggactgttaaacaggcatttgttggccgttcacagcaagaattttcctcatgtttgtgttgagtgtgggaagggttttcgacatccttctgaactcaagaaacatatgagaacccatactggtgagaagccatatcagtgtcagtattgtattttcaggtgtgcagatcaatcaaatctgaaaactcacattaagtctaaacatggtaacaatttgccatataaatgtgagcattgtccccaagcatttggtgatgagagggagcttcaacgccatctggatttgtttcaaggacataagacacaccagtgtcctcattgtgaccataagagcaccaattcaagtgaccttaagcggcacatcatatctgtccatactaaggattttcctcacaaatgtgaggtctgtgataaaggttttcatcgtccttctgagctcaaaaagcatagtgatatccataagggtaggaagattcatcagtgcaggcactgtgactttaaaacatccgatccatttattcttagtggccatatcctttcagttcatactaaagatcagccattgaaatgtaaaaggtgcaagagaggattcagacaacaaaatgagctaaaaaaacatatgaagacccatactggaaggaagatttaccaatgtgagtattgtgaatacagcactacagatgcatctggctttaaacgacatgtgatatcaatacatacaaaagactatccacacaggtgtgaattctgcaagaagggattccgaagaccatcagaaaaaaatcagcatattatgaggcaccacaaagaggctcttatgtaataagatcaatataaagaaagaagctatttaggagatatgatatgctacttgggagaaaactctcactaactgtctcaccgggtttcaaagcttgatactaaaccatgactttacattctttgtattaaagatcttaaaatatttgaattcacaggggatcccatagccctttgaaaattacttaaagaatttaagaagcactatagaatggttacagaaaaacttcttaagtatctgtgtaatagtattatatgcatacttaaactacagaggggaaaagcaaagacaaatactttatttggctgattatgttagatacaaatgtttctgagaagagaatacataattgagtttagtgatgctttgctatagcaagcaaacccacttttatgcaattttagaaatggggcagggaaacaaaatgtggtcattcatcagtcacttagtcattgagccttttatattgtacctggaaattaaattccagcaatgacaaaagttttgtgtattcattaaaagaaaactaactggaaaacaggttagattaattcagtactattaaaaaagaattcagagctgttaatattttatcacaggataggatacttaaaatatagcattctgtgctgagatctaaggtgaagtctataaagattaaagttcccttttttctgatgttcaagttgattgttgttcagtatggcatatatgacaaaagtatatttgagtcaaatgtggctttctaaaatggatgcaacattagcgttgcaaacaaaatcagcactatatttcttaatgatctaaagattaatttgagagaacacagttttcttaaatattataatgtctagagtttttttaggacagtcttagcaagtatgattgttctagtcttacttgctctaatgtttaaaggtgcaattttatgccattattgaaattgatttttaaaatctatataccatatgattaacatgcattttcaatatgaggcagtgtttatgcagtatttaacagagcaatctgctgccaatagagtttggaggtggatatttagtttacagtgtataaacttaaaatatgcatccctttaacaacgctttgtgttagcatgctgcaaatcaaaatggcacttaatattaaaagctggtttagggaaattttatgaaaatcctgttcataaatgtaatgcatatgatatgtacttttaagttttagttgcttcatgtttacattcagctgttcaacataattaaaatgtaattttacttcatgctatattgtggctttgtgtttcaaataatgttcacctttctgtttttgcaccagataagaatcagttccttgagaataaattttttatctttcttaacttcagaatattaaatttggaatatctactaaaattgtgtgttatgtggctgtaaatgatgtacacgctgtaaaataagatcgctactgttatgtgggattattatttctaaatgttactcattgaaatgagcatacaataaaaagcatttattgcactt

SEQ ID NO: 277806 - DNA, 2278 bp, Artificial Sequence
  derived and/or modified sequence
tactataaaaaccgaagatgatgatgatgatgatgtcaagagcacttctgaagactacttaatgatatctttggatgatgttggagaaaaattagagcatatggggaatacaccattaaaaattggcagtgatggttcacaagaagatgctaaagaagatgggtttggttctgaagttataaaagtgtatatatttaaagcggaggctgaagatgatgttgaaataggtggaacagaaattgtcacagagagtgagtacaccagtggacattcagtagctggagtgcttgaccagagccgaatgcagcgggagaagatggtttacatggcagttaaagattcttctcaagaagaagatgatatcagttgcgctgaaatagcagatgaagtttacatggaagtcattgtaggggaagaggaaggaacttctctccctgagattcagcttgaggactctgatgttaataaaacagttgtccctgttgtctgggctgcggcatatggagatgaaagaagagtttcccgaaggtatgaagattgtcaagcatcaggaaatactttggactcagcattagaaagcagaagtagtacagcagcacagtaccttcaaatttgtgacggcattaatacaaataaagtacttaaacaaaaagccaaaaagaggagaaggggagaaaccaggcagtggcaaacagctgttataataggtcctgatggacagcccctcacagtgtacccttgccatatttgcacaaaaaagtttaaatccaggggattcttaaaaagacacatgaagaatcatcctgatcatttaatgagaaaaaaatatcagtgtacagattgtgactttacaactaacaagaaagtgagtttccataaccacttagaaagccataagctcataaacaaagtcgacaaaacccatgaatttacagaatacacacgaagatacagagaggctagtccactgagttccaataaacttattttaagagacaaggagccgaagatgcacaagtgcaaatactgtgactatgaaactgcagaacaaggactgttaaacaggcatttgttggccgttcacagcaagaattttcctcatgtttgtgttgagtgtgggaagggttttcgacatccttctgaactcaagaaacatatgagaacccatactggtgagaagccatatcagtgtcagtattgtattttcaggtgtgcagatcaatcaaatctgaaaactcacattaagtctaaacatggtaacaatttgccatataaatgtgagcattgtccccaagcatttggtgatgagagggagcttcaacgccatctggatttgtttcaaggacataagacacaccagtgtcctcattgtgaccataagagcaccaattcaagtgaccttaagcggcacatcatatctgtccatactaaggattttcctcacaaatgtgaggtctgtgataaaggttttcatcgtccttctgagctcaaaaagcatagtgatatccataagggtaggaagattcatcagtgcaggcactgtgactttaaaacatccgatccatttattcttagtggccatatcctttcagttcatactaaagatcagccattgaaatgtaaaaggtgcaagagaggattcagacaacaaaatgagctaaaaaaacatatgaagacccatactggaaggaagatttaccaatgtgagtattgtgaatacagcactacagatgcatctggctttaaacgacatgtgatatcaatacatacaaaagactatccacacaggtgtgaattctgcaagaagggattccgaagaccatcagaaaaaaatcagcatattatgaggcaccacaaagaggctcttatgtaataagatcaatataaagaaagaagctatttaggagatatgatatgctacttgggagaaaactctcactaactgtctcaccgggtttcaaagcttgatactaaaccatgactttacattctttgtattaaagatcttaaaatatttgaattcacaggggatcccatagccctttgaaaattacttaaagaatttaagaagcactatagaatggttacagaaaaacttcttaagtatctgtgtaatagtattatatgcatacttaaactacagaggggaaaagcaaagacaaatactttatttggctgattatgttagatacaaatgtttctgagaagagaatacataattgagtttagtgatgctttgctatagcaagcaaacccacttttatgcaattttagaaat

SEQ ID NO: 277807 - protein, 458 aa, Artificial Sequence
  derived and/or modified sequence
MRKKWKMGGMKYIFSLLFFLLLEGGKTEQVKHSETYCMFQDKKYRVGERWHPYLEPYGLVYCVNCICSENGNVLCSRVRCPNVHCLSPVHIPHLCCPRCPEDSLPPVNNKVTSKSCEYNGTTYQHGELFVAEGLFQNRQPNQCTQCSCSEGNVYCGLKTCPKLTCAFPVSVPDSCCRVCRGDGELSWEHSDGDIFRQPANREARHSYHRSHYDPPPSRQAGGLSRFPGARSHRGALMDSQQASGTIVQIVINNKHKHGQVCVSNGKTYSHGESWHPNLRAFGIVECVLCTCNVTKQECKKIHCPNRYPCKYPQKIDGKCCKVCPGKKAKEELPGQSFDNKGYFCGEETMPVYESVFMEDGETTRKIALETERPPQVEVHVWTIRKGILQHFHIEKISKRMFEELPHFKLVTRTTLSQWKIFTEGEAQISQMCSSRVCRTELEDLVKVLYLERSEKGHC

SEQ ID NO: 277808 - DNA, 1377 bp, Artificial Sequence
  derived and/or modified sequence
atgagaaagaagtggaagatgggggggatgaaatacatcttctctttacttttcttcctgttgctagaggggggaaagacagaacaggtcaagcactcagagacgtactgtatgtttcaagacaaaaagtaccgtgtgggtgagaggtggcacccttacctagagccatatggtctggtctactgcgtgaactgcatctgttccgagaatgggaacgttctatgcagtcgtgtcaggtgccccaacgttcattgtctgagtccagtgcacatccctcacctgtgttgtcctaggtgtccagaggattccctgccaccggttaacaacaaagtgacttctaaaagttgtgagtacaacgggaccacgtatcagcacggcgaactctttgttgccgaagggctgttccagaaccggcagcctaaccagtgtactcagtgcagctgctctgaggggaacgtgtattgcggactcaaaacatgtccgaaattgacctgtgctttccctgtttcagtcccggactcgtgttgtcgcgtctgccggggcgacggagagttgtcatgggaacatagcgacggagacatattcagacagccagcgaatcgcgaagcccggcactcttaccatcggagtcactatgatccccccccaagccggcaggcaggggggctctccagattcccaggggctaggtcccacaggggcgccctcatggattctcagcaggcaagcggaactattgtgcagatcgtgatcaataacaagcacaaacatggacaagtttgcgtgagtaatggaaagacctactcccatggcgaatcctggcaccccaatctgcgagcattcggcattgtggaatgtgtactgtgtacctgcaacgtaacaaaacaggaatgtaagaaaatacattgccctaaccggtatccttgcaaatatccacagaaaatagacgggaaatgctgtaaggtttgcccaggaaagaaagcaaaagaagagttgcctggccagtctttcgataataaggggtatttttgcggagaagaaaccatgcccgtgtacgagtccgtgtttatggaggacggggagacgaccagaaaaatcgctttggagactgaacggccgcctcaggtcgaagtacacgtctggaccatccggaaaggaatccttcaacactttcacatcgagaaaatatctaagagaatgtttgaagaattaccccacttcaaattagtaactcggacaaccctgtctcagtggaaaattttcactgaaggcgaggcccagatcagtcagatgtgtagcagccgcgtctgtagaactgaactagaggatttggtcaaggttctgtacctggagcggtcggagaagggccactgctag

SEQ ID NO: 277809 - DNA, 1377 bp, Artificial Sequence
  derived and/or modified sequence
atgaggaagaagtggaagatgggcggcatgaagtacatcttcagcctgctcttcttcctgctgctggagggcggcaagacagagcaggtgaagcacagcgagacctactgcatgttccaggacaagaagtacagagtgggggagcgctggcacccctacctggagccctacggcctggtgtactgtgtgaactgcatctgcagtgaaaatggaaatgtgctgtgcagccgggtgcgctgccccaacgtgcactgcctgagccctgtgcacatcccccacctgtgctgcccccgctgcccagaggacagcctgccccctgtgaacaacaaggtgaccagcaagagctgtgagtacaacggcaccacctaccagcacggggagctgtttgtggccgagggcctcttccagaaccggcagcccaaccagtgcacccagtgcagctgcagcgagggcaatgtgtactgcggcctgaagacctgccccaagctgacctgtgccttccctgtgtctgtgcctgacagctgctgccgggtgtgcagaggagatggagagctgtcctgggagcacagtgatggagacatcttccggcagcctgccaaccgggaggcccggcacagctaccacaggagccactatgaccccccacccagccggcaggccggcggcctgagccgcttccctggggcccggagccacagaggagccctgatggacagccagcaggccagcggcaccatcgtgcagatcgtcatcaacaacaagcacaagcacggccaggtgtgtgtgtccaatggcaagacctacagccacggggagagctggcaccccaacctgcgggcctttggaattgtggagtgtgtgctgtgcacctgcaatgtgaccaagcaggagtgcaagaagatccactgccccaaccgctacccctgcaagtacccccagaagattgatggcaagtgctgcaaggtgtgccctgggaagaaggccaaggaggagctgcccggccagagctttgacaacaagggctacttctgtggggaggagaccatgcctgtgtatgagagcgtcttcatggaggatggagagaccaccaggaagatcgccctggagacagagaggcctccccaggtggaggtgcacgtgtggaccatcaggaagggcatcctgcagcacttccacatcgagaagatcagcaagaggatgtttgaggagctgccccacttcaagctggtgaccaggaccaccctgagccagtggaagatcttcacagaaggagaggcccagatcagccagatgtgcagcagccgggtgtgcaggacagagctggaggacctggtgaaggtgctgtacctggagaggtctgagaagggccactgctag

SEQ ID NO: 277810 - DNA, 1377 bp, Artificial Sequence
  derived and/or modified sequence
atgcggaagaagtggaagatgggcggcatgaagtacatcttcagcctgctgtttttcttattacttgaggggggtaaaactgaacaggtgaagcactctgaaacatattgcatgtttcaggataagaaatatagggtcggggagcgatggcatccttaccttgagccatacgggctggtgtattgtgtgaattgtatttgtagtgaaaacgggaatgttctttgttccagggtgcgatgccccaacgtccattgcctctcccctgttcacatcccccacctgtgctgtccaagatgtccagaggatagtctgccacctgtgaataataaggtgacctccaaatcctgtgaatataatggaaccacctaccagcatggcgagcttttcgtggctgaaggcttatttcagaaccgacagcctaatcagtgcacccagtgttcttgttccgaggggaacgtttactgcgggctgaagacctgcccaaagcttacttgtgcatttcccgtctcagttcccgactcatgttgtcgcgtgtgccgaggagatggcgagttatcatgggaacactccgacggggatatctttcgtcaaccagcaaatcgggaagccagacatagctaccatagatcacattacgacccacccccaagtaggcaggctggtggtctgtctcgattcccaggggcgaggagccatagaggagccctcatggacagccagcaggcctccggtaccatcgtccagatcgtgataaacaacaaacataagcatggccaagtgtgtgtgtctaatggaaagacttacagtcatggggagagctggcatccaaatctcagagcctttggaatcgtggagtgcgtactttgtacctgcaacgtgacgaagcaggaatgtaaaaaaatccattgtcccaataggtacccttgcaagtaccctcagaaaatcgacggtaagtgttgtaaggtctgtccgggaaagaaggctaaggaagaattaccaggacagagctttgataataaaggctacttttgtggagaagagactatgcccgtgtacgagtctgtgttcatggaggacggcgagacaacccgaaagatagctctggaaaccgaaagaccaccccaagttgaggtgcacgtctggaccattcgcaagggcattctgcaacacttccacatcgaaaaaatcagcaaaagaatgttcgaagagttgccacattttaagctggtgactagaacaactctcagccagtggaagatctttacagagggtgaggcgcagattagccagatgtgtagctcacgcgtgtgccgtacagagctagaggatctggtcaaggttctgtatctggagagatctgagaaaggccactgttag

SEQ ID NO: 277811 - DNA, 1377 bp, Artificial Sequence
  derived and/or modified sequence
atgaggaagaagtggaaaatgggtggaatgaaatatattttttccctgctgttctttctgttactcgaagggggaaagactgaacaggtgaagcattccgaaacctactgcatgtttcaggataaaaaatatagagttggggaacgctggcacccataccttgagccctacggacttgtttattgcgtcaactgtatttgttctgagaacggcaatgtgctgtgcagcagggtgcggtgtcccaacgtacactgtctctcgcctgttcatattccacacctctgctgtcccaggtgtccagaggatagtctaccccctgtcaataacaaagtgacctcaaaaagttgtgaatacaacgggactacatatcagcatggagaacttttcgtggcagaggggctgtttcagaatcggcagccgaaccaatgcactcagtgctcctgctctgaaggcaacgtgtattgcgggctcaaaacttgtcccaagttgacatgtgccttccctgtttcagtgccagactcctgttgccgagtatgcaggggggacggtgaattgagctgggaacactccgatggcgatatatttcggcagccagcaaatcgtgaggctcggcatagctatcaccgcagtcactatgaccctcccccaagccgccaagcaggtgggctgtcacgctttccaggtgccaggtcacatcgtggcgctcttatggattctcaacaagctagcggaactattgtgcagatcgtgattaacaacaagcataagcatggacaggtctgcgtgagtaatggaaagacatatagtcacggggagtcctggcacccaaatttgagggcattcggaatcgttgagtgtgtcctgtgtacttgtaacgtaaccaaacaggaatgtaagaaaattcactgtcccaacagatacccatgtaagtaccctcaaaaaatagacggaaagtgctgcaaagtgtgcccaggtaagaaggcaaaggaagagcttcccggacagtcctttgacaacaagggctatttttgcggcgaggaaaccatgcccgtgtacgagtcagtcttcatggaggacggtgagactactcgaaaaatcgctcttgaaacagagcggcctccccaagtggaagtgcacgtttggacaatccggaaaggaattctacagcacttccacatcgaaaagatctctaaacggatgtttgaagaactgccacattttaagctcgttacaaggacaaccttgagtcaatggaagatattcacagaaggtgaggcacagatctcgcagatgtgcagctcaagagtctgtagaaccgaacttgaagacttggtgaaggtgctgtaccttgagcgctctgaaaagggtcattgctag

SEQ ID NO: 277812 - DNA, 1934 bp, Artificial Sequence
  derived and/or modified sequence
cggacgagagcgccccggggagctcggagcgcgtgcacgcgtggcagacggagaaggccagtgcccagcttgaaggttctgtcaccttttgcagtggtccaaatgagaaaaaagtggaaaatgggaggcatgaaatacatcttttcgttgttgttctttcttttgctagaaggaggcaaaacagagcaagtaaaacattcagagacatattgcatgtttcaagacaagaagtacagagtgggtgagagatggcatccttacctggaaccttatgggttggtttactgcgtgaactgcatctgctcagagaatgggaatgtgctttgcagccgagtcagatgtccaaatgttcattgcctttctcctgtgcatattcctcatctgtgctgccctcgctgcccagaagactccttacccccagtgaacaataaggtgaccagcaagtcttgcgagtacaatgggacaacttaccaacatggagagctgttcgtagctgaagggctctttcagaatcggcaacccaatcaatgcacccagtgcagctgttcggagggaaacgtgtattgtggtctcaagacttgccccaaattaacctgtgccttcccagtctctgttccagattcctgctgccgggtatgcagaggagatggagaactgtcatgggaacattctgatggtgatatcttccggcaacctgccaacagagaagcaagacattcttaccaccgctctcactatgatcctccaccaagccgacaggctggaggtctgtcccgctttcctggggccagaagtcaccggggagctcttatggattcccagcaagcatcaggaaccattgtgcaaattgtcatcaataacaaacacaagcatggacaagtgtgtgtttccaatggaaagacctattctcatggcgagtcctggcacccaaacctccgggcatttggcattgtggagtgtgtgctatgtacttgtaatgtcaccaagcaagagtgtaagaaaatccactgccccaatcgatacccctgcaagtatcctcaaaaaatagacggaaaatgctgcaaggtgtgtccaggtaaaaaagcaaaagaagaacttccaggccaaagctttgacaataaaggctacttctgcggggaagaaacgatgcctgtgtatgagtctgtattcatggaggatggggagacaaccagaaaaatagcactggagactgagagaccacctcaggtagaggtccacgtttggactattcgaaagggcattctccagcacttccatattgagaagatctccaagaggatgtttgaggagcttcctcacttcaagctggtgaccagaacaaccctgagccagtggaagatcttcaccgaaggagaagctcagatcagccagatgtgttcaagtcgtgtatgcagaacagagcttgaagatttagtcaaggttttgtacctggagagatctgaaaagggccactgttaggcaagacagacagtattggatagggtaaagcaagaaaactcaagctgcagctggactgcaggcttattttgcttaagtcaacagtgccctaaaactccaaactcaaatgcagtcaattattcacgccatgcacagcataatttgctcctttgtgtggagtggtgtgtcagcccttgaacatctcctccaaagagactagaagagtcttaaattatatgtgggaggaggagggatagaacatcacaacactgctctagtttcttggagaatcacatttctttacaggttaaagacaaacaagaccccagggtttttatctagaaagttattcaagtgaaagaaagagaagggaattgcttagtaggagttctgcagtatagaacaattacttgtatgaaattatacctttgaattttagaatgtcatgtgttcttttaaaaaaattagctccccat

SEQ ID NO: 277813 - DNA, 1377 bp, Artificial Sequence
  derived and/or modified sequence
atgagaaagaagtggaagatgggcggcatgaagtacatcttcagcctgctgttcttcctgctgctggagggcggcaagaccgagcaggtgaagcacagcgagacctactgcatgttccaggacaagaagtacagagtgggcgagagatggcacccctacctggagccctacggcctggtgtactgcgtgaactgcatctgcagcgagaacggcaacgtgctgtgcagcagagtgagatgccccaacgtgcactgcctgagccccgtgcacatcccccacctgtgctgccccagatgccccgaggacagcctgccccccgtgaacaacaaggtgaccagcaagagctgcgagtacaacggcaccacctaccagcacggcgagctgttcgtggccgagggcctgttccagaacagacagcccaaccagtgcacccagtgcagctgcagcgagggcaacgtgtactgcggcctgaagacctgccccaagctgacctgcgccttccccgtgagcgtgcccgacagctgctgcagagtgtgcagaggcgacggcgagctgagctgggagcacagcgacggcgacatcttcagacagcccgccaacagagaggccagacacagctaccacagaagccactacgaccccccccccagcagacaggccggcggcctgagcagattccccggcgccagaagccacagaggcgccctgatggacagccagcaggccagcggcaccatcgtgcagatcgtgatcaacaacaagcacaagcacggccaggtgtgcgtgagcaacggcaagacctacagccacggcgagagctggcaccccaacctgagagccttcggcatcgtggagtgcgtgctgtgcacctgcaacgtgaccaagcaggagtgcaagaagatccactgccccaacagatacccctgcaagtacccccagaagatcgacggcaagtgctgcaaggtgtgccccggcaagaaggccaaggaggagctgcccggccagagcttcgacaacaagggctacttctgcggcgaggagaccatgcccgtgtacgagagcgtgttcatggaggacggcgagaccaccagaaagatcgccctggagaccgagagacccccccaggtggaggtgcacgtgtggaccatcagaaagggcatcctgcagcacttccacatcgagaagatcagcaagagaatgttcgaggagctgccccacttcaagctggtgaccagaaccaccctgagccagtggaagatcttcaccgagggcgaggcccagatcagccagatgtgcagcagcagagtgtgcagaaccgagctggaggacctggtgaaggtgctgtacctggagagaagcgagaagggccactgctag

SEQ ID NO: 277814 - protein, 457 aa, Artificial Sequence
  derived and/or modified sequence
MRKKWKMGGMKYIFSLLFFLLLEGGKTEQVKHSETYCMFQDKKYRVGERWHPYLEPYGLVYCVNCICSENGNVLCSRVRCPNVHCLSPVHIPHLCCPRCPDSLPPVNNKVTSKSCEYNGTTYQHGELFVAEGLFQNRQPNQCTQCSCSEGNVYCGLKTCPKLTCAFPVSVPDSCCRVCRGDGELSWEHSDGDIFRQPANREARHSYHRSHYDPPPSRQAGGLSRFPGARSHRGALMDSQQASGTIVQIVINNKHKHGQVCVSNGKTYSHGESWHPNLRAFGIVECVLCTCNVTKQECKKIHCPNRYPCKYPQKIDGKCCKVCPGKKAKEELPGQSFDNKGYFCGEETMPVYESVFMEDGETTRKIALETERPPQVEVHVWTIRKGILQHFHIEKISKRMFEELPHFKLVTRTTLSQWKIFTEGEAQISQMCSSRVCRTELEDLVKVLYLERSEKGHC

SEQ ID NO: 277815 - DNA, 1374 bp, Artificial Sequence
  derived and/or modified sequence
atgcgcaagaagtggaaaatgggaggaatgaagtatatcttcagcctgctgtttttccttcttctggaaggagggaagacagaacaggtaaaacattccgaaacctactgcatgtttcaagataaaaaatatcgggtcggggagcgctggcacccttacctggagccttacgggctggtgtattgtgtcaactgtatatgttctgagaatgggaacgtgctgtgcagcagggtgcgatgtccaaatgtgcactgtctcagcccggtgcatatccctcatctatgctgtcccagatgcccagactccttaccgccggtcaacaataaggtgacatccaagtcatgcgagtataatgggacgacttatcaacatggtgagctgttcgttgctgagggattgtttcaaaatcgacagccgaaccaatgtacacaatgctcttgttcggaaggtaatgtatactgtgggctcaaaacctgtcccaaacttacatgcgcgtttcctgtgtcagtccctgactcgtgttgccgggtgtgccgtggagacggagaactgtcatgggagcacagcgacggcgacatattccggcagcccgccaatagggaagcacgtcactcataccacagaagtcattacgacccaccaccttcacgtcaggcagggggtctgtcaaggttcccaggcgcacggtcccatagaggcgcccttatggacagtcagcaggcctccggaactattgtccagatcgtgatcaataataagcacaaacacggacaagtttgtgtgtccaatggaaagacgtattcccacggagagagctggcaccccaatcttagggcctttgggattgtcgagtgtgtactttgcacctgcaacgtgacaaagcaagagtgtaagaaaatccattgtccaaacaggtatccatgtaagtatcctcagaaaattgatggcaagtgttgtaaggtgtgtccaggcaagaaagcaaaggaagagttgccaggtcaatctttcgataacaagggatacttttgtggtgaggaaaccatgccagtatacgagtccgtatttatggaagatggagaaactacacgcaaaatcgcccttgaaactgaacgcccccctcaggtcgaagttcacgtgtggaccatcagaaagggcatcctgcagcatttccacattgagaagatcagcaagcgtatgtttgaagagttgcctcactttaagttggttacacgcaccaccctaagtcagtggaaaatctttacagaaggagaagctcaaatctcccagatgtgtagcagcagagtgtgtcggacggagctagaagatttagttaaggtgctttacctcgagcggagtgagaaaggacactgttag

SEQ ID NO: 277816 - DNA, 1374 bp, Artificial Sequence
  derived and/or modified sequence
atgaggaagaagtggaagatgggcggcatgaagtacatcttcagcctgctcttcttcctgctgctggagggcggcaagacagagcaggtgaagcacagcgagacctactgcatgttccaggacaagaagtacagagtgggggagcgctggcacccctacctggagccctacggcctggtgtactgtgtgaactgcatctgcagtgaaaatggaaatgtgctgtgcagccgggtgcgctgccccaacgtgcactgcctgagccctgtgcacatcccccacctgtgctgcccccgctgcccagacagcctgccccctgtgaacaacaaggtgaccagcaagagctgtgagtacaacggcaccacctaccagcacggggagctgtttgtggccgagggcctcttccagaaccggcagcccaaccagtgcacccagtgcagctgcagcgagggcaatgtgtactgcggcctgaagacctgccccaagctgacctgtgccttccctgtgtctgtgcctgacagctgctgccgggtgtgcagaggagatggagagctgtcctgggagcacagtgatggagacatcttccggcagcctgccaaccgggaggcccggcacagctaccacaggagccactatgaccccccacccagccggcaggccggcggcctgagccgcttccctggggcccggagccacagaggagccctgatggacagccagcaggccagcggcaccatcgtgcagatcgtcatcaacaacaagcacaagcacggccaggtgtgtgtgtccaatggcaagacctacagccatggagagagctggcaccccaacctgcgggccttcggcatcgtggagtgtgtgctgtgcacctgcaatgtgaccaagcaggagtgcaagaagatccactgccccaaccgctacccctgcaagtacccccagaagattgatggcaagtgctgcaaggtgtgccctgggaagaaggccaaggaggagctgcccggccagagctttgacaacaagggctacttctgtggggaggagaccatgcctgtgtatgaatctgtgttcatggaggatggagagaccaccaggaagatcgccctggagacagagcggcccccccaggtggaggtgcacgtgtggaccatcaggaagggcatcctgcagcacttccacatcgagaagatcagcaagaggatgtttgaggagctgccccacttcaagctggtgaccaggaccaccctgagccagtggaagatcttcacagaaggagaggcccagatcagccagatgtgcagcagccgggtgtgcaggacagagctggaggacctggtgaaggtgctgtacctggagaggtctgagaagggccactgctag

SEQ ID NO: 277817 - DNA, 1374 bp, Artificial Sequence
  derived and/or modified sequence
atgcggaagaagtggaagatgggcggcatgaagtacatcttcagcctcctgttttttctgctgctcgagggagggaaaactgagcaggtgaagcacagcgagacatactgcatgttccaggataagaaataccgggtgggcgagcgctggcacccctatctggagccctatggcctagtgtattgcgtgaattgtatttgctcagaaaatgggaacgtactgtgttcacgcgtccggtgtcctaacgtgcattgtctgtccccagtgcatatccctcacctctgttgcccccgctgccccgattctctacctccagttaacaacaaagtgacctctaaaagctgcgagtacaatggtaccacataccagcacggagaactgtttgtggctgagggcttgtttcagaaccgccagccaaaccagtgcacacagtgctcctgcagcgaaggcaatgtttactgcggtttaaaaacctgccctaagttgacctgcgccttccctgtctccgtgccagacagttgttgtcgggtctgcaggggggacggggaactgtcttgggaacactctgacggagatatttttaggcagccggcaaatcgagaagcgcggcattcgtaccaccgaagccattacgacccgcctcccagtcgtcaagcaggcggcctctcccgcttccccggggccagatctcatcggggcgccctgatggactcccaacaggcctcagggactatcgtgcaaattgttattaacaataagcacaagcatggccaggtgtgtgtttcaaacggtaagacatactctcacggagagtcgtggcatcctaatcttcgagccttcggcattgtggagtgcgttctctgtacctgtaatgtgactaagcaggagtgcaagaagatccactgcccgaatagatacccctgcaagtaccctcagaaaatcgatggaaagtgctgcaaggtctgtcccgggaaaaaggccaaagaggagctcccggggcagagttttgataacaaaggatatttttgcggcgaggaaacaatgccagtctacgagtccgtatttatggaggacggcgaaacaacgaggaagattgctttagaaacagagagaccgccacaggttgaagtgcacgtgtggacaatcaggaaggggatcctgcagcactttcacatcgaaaagatatcaaagcgaatgttcgaagaattgcctcattttaaactcgtgacacggacaacgttgtcgcagtggaaaatcttcaccgaaggtgaggcgcagattagccagatgtgctcatcacgagtgtgcaggacagaattggaggacctggttaaagtcctgtacctggagcgcagcgaaaagggccactgctag

SEQ ID NO: 277818 - DNA, 1374 bp, Artificial Sequence
  derived and/or modified sequence
atgcgtaagaaatggaagatgggcggtatgaagtatatttttagtcttctgtttttcttgctcctcgaagggggaaagaccgagcaggtgaaacattccgaaacatactgtatgtttcaggacaagaagtacagggtgggggagagatggcacccttatttagagccttatggtctggtatactgtgtaaattgcatttgctcagaaaacgggaacgtactgtgctctcgcgtgaggtgcccgaatgtccactgcttgtctcccgtacacattccacatctttgttgtcccagatgtcctgatagcctccccccagttaacaataaggtgacctcaaagtcgtgtgagtacaacggtaccacataccaacatggagaattattcgtcgccgaagggctgttccagaaccgtcaacctaatcagtgcacacagtgtagctgctccgaaggtaacgtttactgcgggcttaagacctgccctaagctgacctgcgctttccccgtgtctgtgccggatagctgctgtagggtgtgcagaggagatggggagctctcctgggagcacagcgatggtgatatcttcagacagcccgcaaacagggaggccagacactcgtaccacagaagccactacgaccccccaccctctcggcaagccggtggcctgagtcggttccccggtgcaagaagccaccggggagccctcatggactcccaacaggcctcggggacaattgtgcagatagtgattaataataagcacaaacacggccaagtctgcgtgtcaaacggcaagacatattcacacggtgagtcctggcatcctaatctgcgagcattcggcattgtggagtgcgttctgtgcacttgtaatgtcaccaagcaggaatgcaaaaagattcactgccccaataggtacccctgtaaatatccacaaaaaatcgatggaaaatgctgtaaagtttgtcccggaaagaaggcgaaggaagagctgcctggccagtccttcgacaataaaggctacttttgtggtgaggagaccatgccggtctatgagtcggtttttatggaggatggcgaaaccacacggaagatcgctttagaaactgaacgcccacctcaagttgaggtgcacgtgtggaccatccgcaagggaatcctgcagcactttcatatcgaaaaaatcagcaagcgcatgtttgaggagctgcctcatttcaagttggtgactaggacgacactgtcccagtggaaaatcttcactgagggagaggcgcaaatcagtcaaatgtgcagcagtagggtctgtcgaactgaactagaggatttggtcaaagtgttgtatcttgagcgttccgagaagggccactgctag

SEQ ID NO: 277819 - DNA, 1658 bp, Artificial Sequence
  derived and/or modified sequence
ccagacctcggacgagagcgccccggggagctcggagcgcgtgcacgcgtggcagacggagaaggccagtgcccagcttgaaggttctgtcaccttttgcagtggtccaaatgagaaaaaagtggaaaatgggaggcatgaaatacatcttttcgttgttgttctttcttttgctagaaggaggcaaaacagagcaagtaaaacattcagagacatattgcatgtttcaagacaagaagtacagagtgggtgagagatggcatccttacctggaaccttatgggttggtttactgcgtgaactgcatctgctcagagaatgggaatgtgctttgcagccgagtcagatgtccaaatgttcattgcctttctcctgtgcatattcctcatctgtgctgccctcgctgcccagactccttacccccagtgaacaataaggtgaccagcaagtcttgcgagtacaatgggacaacttaccaacatggagagctgttcgtagctgaagggctctttcagaatcggcaacccaatcaatgcacccagtgcagctgttcggagggaaacgtgtattgtggtctcaagacttgccccaaattaacctgtgccttcccagtctctgttccagattcctgctgccgggtatgcagaggagatggagaactgtcatgggaacattctgatggtgatatcttccggcaacctgccaacagagaagcaagacattcttaccaccgctctcactatgatcctccaccaagccgacaggctggaggtctgtcccgctttcctggggccagaagtcaccggggagctcttatggattcccagcaagcatcaggaaccattgtgcaaattgtcatcaataacaaacacaagcatggacaagtgtgtgtttccaatggaaagacctattctcatggcgagtcctggcacccaaacctccgggcatttggcattgtggagtgtgtgctatgtacttgtaatgtcaccaagcaagagtgtaagaaaatccactgccccaatcgatacccctgcaagtatcctcaaaaaatagacggaaaatgctgcaaggtgtgtccaggtaaaaaagcaaaagaagaacttccaggccaaagctttgacaataaaggctacttctgcggggaagaaacgatgcctgtgtatgagtctgtattcatggaggatggggagacaaccagaaaaatagcactggagactgagagaccacctcaggtagaggtccacgtttggactattcgaaagggcattctccagcacttccatattgagaagatctccaagaggatgtttgaggagcttcctcacttcaagctggtgaccagaacaaccctgagccagtggaagatcttcaccgaaggagaagctcagatcagccagatgtgttcaagtcgtgtatgcagaacagagcttgaagatttagtcaaggttttgtacctggagagatctgaaaagggccactgttaggcaagacagacagtattggatagggtaaagcaagaaaactcaagctgcagctggactgcaggcttattttgcttaagtcaacagtgccctaaaactccaaactcaaatgcagtcaattattcacgccatgcacagcataatttgctcctttgtgtggagtggtgtgtcagccct

SEQ ID NO: 277820 - DNA, 1374 bp, Artificial Sequence
  derived and/or modified sequence
atgagaaagaagtggaagatgggcggcatgaagtacatcttcagcctgctgttcttcctgctgctggagggcggcaagaccgagcaggtgaagcacagcgagacctactgcatgttccaggacaagaagtacagagtgggcgagagatggcacccctacctggagccctacggcctggtgtactgcgtgaactgcatctgcagcgagaacggcaacgtgctgtgcagcagagtgagatgccccaacgtgcactgcctgagccccgtgcacatcccccacctgtgctgccccagatgccccgacagcctgccccccgtgaacaacaaggtgaccagcaagagctgcgagtacaacggcaccacctaccagcacggcgagctgttcgtggccgagggcctgttccagaacagacagcccaaccagtgcacccagtgcagctgcagcgagggcaacgtgtactgcggcctgaagacctgccccaagctgacctgcgccttccccgtgagcgtgcccgacagctgctgcagagtgtgcagaggcgacggcgagctgagctgggagcacagcgacggcgacatcttcagacagcccgccaacagagaggccagacacagctaccacagaagccactacgaccccccccccagcagacaggccggcggcctgagcagattccccggcgccagaagccacagaggcgccctgatggacagccagcaggccagcggcaccatcgtgcagatcgtgatcaacaacaagcacaagcacggccaggtgtgcgtgagcaacggcaagacctacagccacggcgagagctggcaccccaacctgagagccttcggcatcgtggagtgcgtgctgtgcacctgcaacgtgaccaagcaggagtgcaagaagatccactgccccaacagatacccctgcaagtacccccagaagatcgacggcaagtgctgcaaggtgtgccccggcaagaaggccaaggaggagctgcccggccagagcttcgacaacaagggctacttctgcggcgaggagaccatgcccgtgtacgagagcgtgttcatggaggacggcgagaccaccagaaagatcgccctggagaccgagagacccccccaggtggaggtgcacgtgtggaccatcagaaagggcatcctgcagcacttccacatcgagaagatcagcaagagaatgttcgaggagctgccccacttcaagctggtgaccagaaccaccctgagccagtggaagatcttcaccgagggcgaggcccagatcagccagatgtgcagcagcagagtgtgcagaaccgagctggaggacctggtgaaggtgctgtacctggagagaagcgagaagggccactgctag

SEQ ID NO: 277821 - DNA, 1437 bp, Artificial Sequence
  derived and/or modified sequence
atgctcattaccggagattctatagtgtcagccgaggctgtctgggaccatgtcactatggcaaatagagaactggcatttaaagctggcgatgtgatcaaggtgttggacgcatccaacaaagattggtggtggggacagatagacgatgaagagggttggttccctgcatcatttgtgaggctttgggtgaaccaggaagacgaagttgaagaagggccgtcagatgtgcagaacgggcatctcgacccaaatagtgattgcctgtgtctgggaagacccctgcaaaatcgcgaccagatgcgtgccaacgtgataaacgagatcatgtcgaccgagaggcactatatcaagcatttgaaagatatttgcgaagggtacctgaaacagtgtcggaagcgccgggatatgttttccgacgagcagctgaaagtgatctttggcaacattgaggacatctatagatttcaaatgggatttgttcgagacctggaaaagcagtacaacaacgatgacccgcacctcagcgagattggaccttgctttctggaacaccaggacggcttttggatatactcggagtattgcaataaccatctcgacgcttgtatggagctatcaaaactgatgaaggacagccgataccagcattttttcgaagcctgtcggctgctccagcagatgattgatattgccatcgatgggttcctccttacacctgtacaaaagatctgtaagtaccctttgcaacttgccgagctactgaagtataccgcacaggaccatagtgactaccgctacgtggccgcggcgctcgccgttatgcggaacgttacacaacaaattaacgaacgcaagagacggttggagaatattgacaaaattgcccaatggcaggcctcggttctggactgggagggcgaggacattctggatcgaagctccgaactcatctatactggcgaaatggcctggatctaccagccttatggcagaaatcagcagcgcgtctttttccttttcgatcatcaaatggtgttatgcaaaaaagatctcattaggagagatattctttattataaaggcagaatcgatatggataagtatgaagtcgtcgacatagaggatggcagagacgacgacttcaacgtgtcgatgaaaaatgcatttaaactccataataaggagactgaggagattcacttgttcttcgctaaaaaactggaggagaaaatcagatggcttagggctttccgcgaggagcggaaaatggtccaggaggacgagaagatcggcttcgaaatcagcgagaatcagaaacggcaggccgccatgaccgtacgtaaactgcccttcccacagctgtcggaagccaggatctgcagccctaaagggtttgcctctgtgtttaacgggacatgttgcggcgaatcttag

SEQ ID NO: 277822 - DNA, 1437 bp, Artificial Sequence
  derived and/or modified sequence
atgctgatcaccggggacagcatcgtgtctgctgaggccgtgtgggaccacgtgaccatggccaaccgggagctggccttcaaggctggagatgtgatcaaggtgctggatgccagcaacaaggactggtggtggggccagattgatgatgaggagggctggttccctgccagctttgtgcggctgtgggtgaaccaggaggatgaggtggaggagggccccagtgatgtgcagaatggccacctggaccccaacagcgactgcctgtgcctgggccggcccctgcagaacagagaccagatgagggccaacgtcatcaatgagatcatgagcacagagcggcactacatcaagcacctgaaggacatctgtgagggctacctgaagcagtgcaggaagaggcgggacatgttcagtgatgagcagctgaaggtgatctttggaaatattgaggacatctaccgcttccagatgggctttgtgcgggacctggagaagcagtacaacaatgatgacccccacctgtctgagatcggcccctgcttcctggagcaccaggacggcttctggatctacagcgagtactgcaacaaccacctggatgcctgcatggagctgagcaagctgatgaaggacagccgctaccagcacttctttgaggcctgccgcctgctgcagcagatgattgatattgccattgatggcttcctgctgacccctgtgcagaagatctgcaagtaccccctgcagctggccgagctgctgaagtacacagcccaggaccacagcgactaccgctacgtggccgccgccctggccgtgatgagaaatgtgacccagcagatcaatgaaaggaagaggcggctggagaacatcgacaagatcgcccagtggcaggcctctgtgctggactgggagggggaggacatcctggacaggagcagcgagctgatctacaccggggagatggcctggatctaccagccctacggcaggaaccagcagagggtcttcttcctgtttgaccaccagatggtgctgtgcaagaaggacctgatccggcgggacatcctgtactacaagggcagaattgacatggacaagtatgaggtggtggacattgaagatggaagagatgatgacttcaacgtgtccatgaagaatgccttcaagctgcacaacaaggagacagaggagatccacctgttctttgccaagaagctggaggagaagatccgctggctgcgggccttccgggaggagaggaagatggtgcaggaggatgagaagattggatttgagatcagcgagaaccagaagaggcaggccgccatgacagtgaggaagctgcccttcccccagctgtctgaggcccgcatctgcagccccaagggctttgccagcgtcttcaacggcacctgctgcggggagagctag

SEQ ID NO: 277823 - DNA, 1437 bp, Artificial Sequence
  derived and/or modified sequence
atgctgatcaccggcgacagcatcgtgagcgccgaggccgtgtgggatcacgtcacaatggctaatcgcgagctggctttcaaggccggggacgtgataaaagtgctcgacgcctccaacaaagactggtggtggggccaaattgacgacgaggagggctggtttccagcatccttcgttcgactctgggtgaaccaagaggatgaggtggaagaggggcccagcgatgttcagaacggtcacctcgacccgaatagtgactgcctgtgtctgggaaggccgttacagaatcgtgatcagatgcgcgctaacgtgataaatgagattatgtctacagaacggcattacataaagcacctaaaggacatttgtgaggggtatctgaaacagtgccgaaagcgtcgcgatatgttttctgatgaacaacttaaagttatcttcggtaacatcgaagacatctatcgattccagatgggatttgttcgggatttggaaaaacagtacaataacgatgacccacacttgtcagagattggcccatgttttctcgagcaccaggatggattctggatctactccgagtactgcaacaaccatctggatgcatgcatggagctgagtaaactgatgaaagattcgaggtatcaacacttttttgaggcgtgtcgattgctccaacagatgattgatatcgcaatcgacggcttcttgctcacaccggtgcagaagatctgcaaatatccattacaactcgctgagttactcaagtatacagcgcaggaccactccgactacagatatgtggccgcggccctagctgtcatgaggaatgtgactcagcaaattaatgaaaggaaacggcgattggagaatattgacaaaattgctcaatggcaggcttctgttttggattgggaaggtgaggatatactggaccggtcgtcggagctgatttataccggggagatggcctggatttaccagccctatggtcgaaatcagcagcgggtcttctttctgttcgaccatcaaatggtcctctgcaaaaaggaccttataagacgcgatatcctgtattacaaaggacgcattgatatggacaagtatgaagttgtcgacattgaggacggaagggatgatgactttaatgtttctatgaaaaatgcctttaaattgcacaataaggagactgaggagattcatcttttttttgccaagaaattggaagagaagatccggtggttgcgcgcgtttagggaggaacggaaaatggttcaggaagacgaaaagatcggattcgagatctccgaaaatcagaagaggcaggccgcgatgaccgtgagaaagctccccttcccgcaactttccgaagctcggatctgctcaccaaaaggatttgctagcgtgtttaacggtacatgttgtggcgaatcttag

SEQ ID NO: 277824 - DNA, 1437 bp, Artificial Sequence
  derived and/or modified sequence
atgttaatcactggcgatagtatagtctcagccgaagctgtctgggatcacgtcacgatggcaaatagagagcttgctttcaaagccggtgatgttatcaaggtgctagatgcaagtaataaagattggtggtgggggcagattgatgacgaggaggggtggtttccggcttccttcgtgcgattatgggttaaccaagaggacgaggttgaggagggtccatcggatgttcagaatgggcacctcgatccaaatagtgactgtctttgtttgggcagacctttgcagaaccgggaccaaatgagagcaaacgttataaacgagatcatgagcactgagagacactatatcaagcaccttaaggatatctgcgaggggtatcttaagcagtgtaggaaacgcagagacatgttctctgacgaacaattgaaagtaatttttgggaatatcgaggatatctatcgctttcagatggggtttgtgcgcgatctcgaaaaacaatataacaacgacgatccgcacctctccgagataggaccctgtttcctggaacaccaggatggattttggatttactcagagtactgtaacaatcacctggacgcatgcatggagcttagtaagctaatgaaggatagtagatatcagcacttcttcgaagcttgccgattgctgcagcaaatgattgacatcgccattgatggctttttgctcactccggtccagaaaatttgcaagtatcctctccagctggcagaattacttaagtataccgctcaagaccacagtgattatagatacgtggccgctgccctagccgtaatgcgaaacgtgacccagcagatcaatgaaaggaagaggcggttggagaacattgacaaaatcgcacaatggcaggcttctgttctggattgggaaggtgaggacattctcgaccgaagttcagaactgatctacaccggcgagatggcatggatttaccagccttatggtcgaaaccagcagcgggtgtttttcctgttcgaccatcagatggtgctgtgtaagaaggatcttattcggagggacatcctctattataagggccgtattgacatggacaagtatgaggtcgtggacatagaggacggacgggacgacgattttaacgtgagcatgaaaaacgcattcaaactgcataataaggaaacggaggagatacatttgttttttgccaagaagctagaagaaaaaattcgttggctcagggctttccgtgaggagaggaagatggtgcaggaagatgagaagatcgggttcgagatcagcgagaaccaaaagaggcaggccgcaatgaccgtccgcaaactgcctttcccccagctctctgaagctcggatctgcagtccaaagggctttgctagtgtgtttaacgggacgtgctgcggggagtcatag

SEQ ID NO: 277825 - DNA, 2204 bp, Artificial Sequence
  derived and/or modified sequence
gcagcgggaggcaggcagaggtagcagctgccttctcctgggcgggcggaggctattcgcccccatcctctccctgcaccccacccccacagttctcaagccttggtgggggacaaaagcagcccattaggacccccccacactcgcacctctccctgccaagacctctaggagcagcagggcggagagacagagcctgccggttggcatggaacaaactgactgaaggcgaggtccggggcggaggggattgggttgtagggctgtggaggaggggcggcggagggggcgctggggctctcgcttgcttcagcccagcccttctagtcagcccgcgacaactcgcgccagctacggggcctcagagaagccggacttcgcaagcaccatgcagtggataaggggcggatcgggaatgctgatcactggagattccatcgttagtgctgaggcagtatgggatcacgtcaccatggccaaccgggagttggcatttaaagctggcgacgtcatcaaagtcttggatgcttccaacaaggattggtggtggggccagatcgacgatgaggagggatggtttcctgccagctttgtgaggctctgggtgaaccaggaggatgaggtggaggaggggcccagcgatgtgcagaacggacacctggaccccaattcagactgcctctgtctggggcggccactacagaaccgggaccagatgcgggccaatgtcatcaatgagataatgagcactgagcgtcactacatcaagcacctcaaggatatttgtgagggctatctgaagcagtgccggaagagaagggacatgttcagtgacgagcaactgaaggtaatctttgggaacattgaagatatctacagatttcagatgggctttgtgagagacctggagaaacagtataacaatgatgacccccacctcagcgagataggaccctgcttcctagagcaccaagatggattctggatatactctgagtattgtaacaaccacctggatgcttgcatggagctctccaaactgatgaaggacagccgctaccagcacttctttgaggcctgtcgcctcttgcagcagatgattgacattgctatcgatggtttccttttgactccagtgcagaagatctgcaagtatcccttacagttggctgagctcctaaagtatactgcccaagaccacagtgactacaggtatgtggcagctgctttggctgtcatgagaaatgtgactcagcagatcaacgaacgcaagcgacgtttagagaatattgacaagattgctcagtggcaggcttctgtcctagactgggagggcgaggacatcctagacaggagctcggagctgatctacactggggagatggcctggatctaccagccctacggccgcaaccagcagcgggtcttcttcctgtttgaccaccagatggtcctctgcaagaaggacctaatccggagagacatcctgtactacaaaggccgcattgacatggataaatatgaggtagttgacattgaggatggcagagatgatgacttcaatgtcagcatgaagaatgcctttaagcttcacaacaaggagactgaggagatacatctgttctttgccaagaagctggaggaaaaaatacgctggctcagggctttcagagaagagaggaaaatggtacaggaagatgaaaaaattggctttgaaatttctgaaaaccagaagaggcaggctgcaatgactgtgagaaaactcccttttcctcaactcagtgaggccaggatttgctctccaaaaggctttgctagtgtgttcaatgggacctgctgtggggagtcctaagacagacatctaattattctctctttttccccccctctctatgtgtatatttctaatggatctataagaacagcaacaagagagttctaacaattctagtgtgaagccaaatagtgatcttttagtgctttggggatggggtgggctggggtggatggatgggcaacagtgactttgattacccttgctgctctgcatttgccagtttattcttttgtttcttttatctgactgactctgtcaaacaagtgtcaaagttgtgtgttaaaaaatgtttaacaaaaaaaatgttgtaatgacacaaagccttatgaaaatatttatggagttcaataaaagaagtaaaaagaca

SEQ ID NO: 277826 - DNA, 1437 bp, Artificial Sequence
  derived and/or modified sequence
atgctgatcaccggcgacagcatcgtgagcgccgaggccgtgtgggaccacgtgaccatggccaacagagagctggccttcaaggccggcgacgtgatcaaggtgctggacgccagcaacaaggactggtggtggggccagatcgacgacgaggagggctggttccccgccagcttcgtgagactgtgggtgaaccaggaggacgaggtggaggagggccccagcgacgtgcagaacggccacctggaccccaacagcgactgcctgtgcctgggcagacccctgcagaacagagaccagatgagagccaacgtgatcaacgagatcatgagcaccgagagacactacatcaagcacctgaaggacatctgcgagggctacctgaagcagtgcagaaagagaagagacatgttcagcgacgagcagctgaaggtgatcttcggcaacatcgaggacatctacagattccagatgggcttcgtgagagacctggagaagcagtacaacaacgacgacccccacctgagcgagatcggcccctgcttcctggagcaccaggacggcttctggatctacagcgagtactgcaacaaccacctggacgcctgcatggagctgagcaagctgatgaaggacagcagataccagcacttcttcgaggcctgcagactgctgcagcagatgatcgacatcgccatcgacggcttcctgctgacccccgtgcagaagatctgcaagtaccccctgcagctggccgagctgctgaagtacaccgcccaggaccacagcgactacagatacgtggccgccgccctggccgtgatgagaaacgtgacccagcagatcaacgagagaaagagaagactggagaacatcgacaagatcgcccagtggcaggccagcgtgctggactgggagggcgaggacatcctggacagaagcagcgagctgatctacaccggcgagatggcctggatctaccagccctacggcagaaaccagcagagagtgttcttcctgttcgaccaccagatggtgctgtgcaagaaggacctgatcagaagagacatcctgtactacaagggcagaatcgacatggacaagtacgaggtggtggacatcgaggacggcagagacgacgacttcaacgtgagcatgaagaacgccttcaagctgcacaacaaggagaccgaggagatccacctgttcttcgccaagaagctggaggagaagatcagatggctgagagccttcagagaggagagaaagatggtgcaggaggacgagaagatcggcttcgagatcagcgagaaccagaagagacaggccgccatgaccgtgagaaagctgcccttcccccagctgagcgaggccagaatctgcagccccaagggcttcgccagcgtgttcaacggcacctgctgcggcgagagctag

SEQ ID NO: 277827 - protein, 267 aa, Artificial Sequence
  derived and/or modified sequence
MVLEVSDHQVLNDAEVAALLENFSSSYDYGENESDSCCTSPPCPQDFSLNFDRAFLPALYSLLFLLGLLGNGAVAAVLLSRRTALSSTDTFLLHLAVADTLLVLTLPLWAVDAAVQWVFGSGLCKVAGALFNINFYAGALLLACISFDRYLNIVHATQLYRRGPPARVTLTCLAVWGLCLLFALPDFIFLSAHHDERLNATHCQYNFPQGSSSGSGCGCCSCAWAAPTREGSRGSHRLPAGIHPGLRPQRPPTRACEAGIRAPLSPT

SEQ ID NO: 277828 - DNA, 804 bp, Artificial Sequence
  derived and/or modified sequence
atggtcttggaggtgagcgaccaccaggttctgaacgacgccgaggtggccgcacttcttgagaacttctcttcatcctacgattacggggagaacgagtccgattcttgctgcacttcaccgccctgcccacaggactttagcttgaacttcgatcgggcctttctccccgcgctgtatagcctgctgttcctcttgggcttgctaggcaatggggctgtggccgctgtgctgctgagccgacgcacagccctgagtagtaccgatacttttctgttgcatctcgccgtagccgatacactgttagtgctgacactcccactctgggcagtcgacgccgccgtccagtgggtcttcggttctgggctgtgtaaagtagccggagcactgttcaacatcaatttctacgccggcgcattgttgctcgcttgtattagcttcgatcgttacctgaatatcgtccacgccacacagctttaccggaggggaccacctgccagagtgaccctcacttgcctggcagtgtggggcctgtgtcttctcttcgccttacccgattttatctttctttccgctcaccacgatgaaagactgaatgccactcattgccagtataatttcccccaaggctcctccagcggcagcgggtgtggatgttgttcctgcgcatgggcagctcctactagagagggctccagggggagtcaccgcctgcccgctggtattcacccagggctccgcccacaaagacctcccacccgggcttgcgaagccggtatcagagccccgttatcccctacttag

SEQ ID NO: 277829 - DNA, 804 bp, Artificial Sequence
  derived and/or modified sequence
atggtgctggaggtgtctgaccaccaggtgctgaatgatgctgaggtggccgccctgctggagaacttcagcagcagctatgactatggagaaaatgaaagtgacagctgctgcaccagccccccctgcccccaggacttcagcctgaactttgaccgggccttcctgcctgccctgtacagcctgctcttcctgctgggcctgctgggcaatggagctgtggccgctgtgctgctgagcagaagaacagccctgagcagcacagacaccttcctgctgcacctggccgtggccgacaccctgctggtgctgaccctgcccctgtgggccgtggatgctgctgtgcagtgggtgtttggaagtggcctgtgcaaggtggccggggccctcttcaacatcaacttctacgccggggccctgctgctggcctgcatcagctttgaccgctacctgaacatcgtgcacgccacccagctgtacagaagaggccccccagcccgggtgaccctgacctgcctggccgtgtggggcctgtgcctgctgtttgccctgcctgacttcatcttcctgagcgcccaccatgatgagcggctgaatgccacccactgccagtacaacttcccccagggcagcagcagcggcagcggctgcggctgctgcagctgtgcctgggccgcccccacccgggagggcagccggggcagccaccggctgcctgctggcatccaccctggcctgcggccccagaggcctcccacccgggcctgtgaggccggcatccgggcccccctgagccccacctag

SEQ ID NO: 277830 - DNA, 804 bp, Artificial Sequence
  derived and/or modified sequence
atggtgctggaggtgagcgaccaccaggtgctgaacgacgccgaggtcgcagcgctcctggagaatttttcgtcctcttacgactacggtgagaatgagtccgactcttgctgtactagccccccatgtccccaagatttttccctaaacttcgatagggcctttcttcccgcgctttactctttgctgttcctgctgggactgctcggtaatggagccgttgctgctgtgctcctttctcgacgaaccgcccttagtagcaccgacacatttctgctccatctggccgtcgcagatactctgctagtgctgactctgcctttgtgggccgtcgacgctgctgtgcagtgggtatttgggtctggtctgtgcaaagtcgcaggtgccctctttaacatcaacttctatgccggggcactccttctcgcctgtatttcctttgacaggtaccttaacatcgtgcacgccacacagctgtaccggagagggcctcctgcccgcgttaccttgacctgtctggcggtgtgggggctctgcctgttatttgccctgcctgacttcatcttcctgtcagcacaccacgacgagaggctcaacgcgactcattgccagtacaactttccccaaggctccagctctggatctggctgcggatgctgctcctgcgcttgggcagccccgacccgggagggatccaggggaagtcaccgcctgcccgccggaattcatcctggcctgcgcccccagaggcctcccaccagagcttgcgaagccggcatccgagcccccctctcacccacgtag

SEQ ID NO: 277831 - DNA, 804 bp, Artificial Sequence
  derived and/or modified sequence
atggtgctcgaggtgagcgaccatcaggttctgaatgatgcggaagtcgcagctttgttagaaaacttctcatccagttatgactacggagaaaacgaatccgatagctgctgtacctctccaccatgtccccaagacttttccctgaactttgaccgggcttttcttccggcactctacagcttactcttcctgcttggattactcggaaatggcgctgtagctgccgtcctgctgtcccggaggacagctctttcctcaacagatactttcctcctgcaccttgcggtagcagacacactgttggtgctgacactgcctctctgggccgtagatgcagcagtgcagtgggtattcggcagtgggctgtgtaaagtcgccggagctctgtttaacattaacttctacgctggggctctgctgctggcatgcatctcttttgacaggtatctgaacatcgtgcacgcaacgcaactctatcgtagaggccctcccgctagagtgactctgacgtgtctggccgtctggggcctctgcctgctctttgccctgcctgacttcattttcctaagtgcacaccatgacgaacgactgaacgccacccattgccagtataactttccacaggggtcttcttctggatctggctgcgggtgctgctcctgtgcttgggctgcgccaacaagagaagggtcacggggatctcataggctgcccgcaggcatccatccaggcctgcggcctcagagacctcctacccgtgcctgtgaggcgggtatccgagcccctctctcacccacatag

SEQ ID NO: 277832 - DNA, 869 bp, Artificial Sequence
  derived and/or modified sequence
ccaaccacaagcaccaaagcagaggggcaggcagcacaccacccagcagccagagcaccagcccagccatggtccttgaggtgagtgaccaccaagtgctaaatgacgccgaggttgccgccctcctggagaacttcagctcttcctatgactatggagaaaacgagagtgactcgtgctgtacctccccgccctgcccacaggacttcagcctgaacttcgaccgggccttcctgccagccctctacagcctcctctttctgctggggctgctgggcaacggcgcggtggcagccgtgctgctgagccggcggacagccctgagcagcaccgacaccttcctgctccacctagctgtagcagacacgctgctggtgctgacactgccgctctgggcagtggacgctgccgtccagtgggtctttggctctggcctctgcaaagtggcaggtgccctcttcaacatcaacttctacgcaggagccctcctgctggcctgcatcagctttgaccgctacctgaacatagttcatgccacccagctctaccgccgggggcccccggcccgcgtgaccctcacctgcctggctgtctgggggctctgcctgcttttcgccctcccagacttcatcttcctgtcggcccaccacgacgagcgcctcaacgccacccactgccaatacaacttcccacaggggtcaagttccgggagcggatgtggatgctgctcttgcgcctgggctgccccaaccagagagggctccagaggcagccatcgtcttcccgccgggattcatcctggtctgagacctcagaggcctcctactcgggcttgtgaggccggaatccgggctcccctttcgcccaca

SEQ ID NO: 277833 - DNA, 804 bp, Artificial Sequence
  derived and/or modified sequence
atggtgctggaggtgagcgaccaccaggtgctgaacgacgccgaggtggccgccctgctggagaacttcagcagcagctacgactacggcgagaacgagagcgacagctgctgcaccagccccccctgcccccaggacttcagcctgaacttcgacagagccttcctgcccgccctgtacagcctgctgttcctgctgggcctgctgggcaacggcgccgtggccgccgtgctgctgagcagaagaaccgccctgagcagcaccgacaccttcctgctgcacctggccgtggccgacaccctgctggtgctgaccctgcccctgtgggccgtggacgccgccgtgcagtgggtgttcggcagcggcctgtgcaaggtggccggcgccctgttcaacatcaacttctacgccggcgccctgctgctggcctgcatcagcttcgacagatacctgaacatcgtgcacgccacccagctgtacagaagaggcccccccgccagagtgaccctgacctgcctggccgtgtggggcctgtgcctgctgttcgccctgcccgacttcatcttcctgagcgcccaccacgacgagagactgaacgccacccactgccagtacaacttcccccagggcagcagcagcggcagcggctgcggctgctgcagctgcgcctgggccgcccccaccagagagggcagcagaggcagccacagactgcccgccggcatccaccccggcctgagaccccagagaccccccaccagagcctgcgaggccggcatcagagcccccctgagccccacctag

SEQ ID NO: 277834 - protein, 694 aa, Artificial Sequence
  derived and/or modified sequence
MGHPPLEFSDCYLDSPDFRERLKCYEQELERTNKFIKDVIKDGNALISAMRNYSSAVQKFSQTLQSFQFDFIGDTLTDDEINIAESFKEFAELLNEVENERMMMVHNASDLLIKPLENFRKEQIGFTKERKKKFEKDGERFYSLLDRHLHLSSKKKESQLQEADLQVDKERHNFFESSLDYVYQIQEVQESKKFNIVEPVLAFLHSLFISNSLTVELTQDFLPYKQQLQLSLQNTRNHFSSTREEMEELKKRMKEAPQTCKLPGQPTIEGYLYTQEKWALGISWVKYYCQYEKETKTLTMTPMEQKPGAKQGPLDLTLKYCVRRKTESIDKRFCFDIETNERPGTITLQALSEANRRLWMEAMDGKEPIYHSPITKQQEMELNEVGFKFVRKCINIIETKGIKTEGLYRTVGSNIQVQKLLNAFFDPKCPGDVDFHNSDWDIKTITSSLKFYLRNLSEPVMTYRLHKELVSAAKSDNLDYRLGAIHSLVYKLPEKNREMLELLIRHLVNVCEHSKENLMTPSNMGVIFGPTLMRAQEDTVAAMMNIKFQNIVVEILIEHFGKIYLGPPEESAAPPVPPPRVTARRHKPITISKRLLRERTVFYTSSLDESEGDADSFSKVRPPGEKPTIIRPPVRPPDPPCRAATPQKPEPKPDIVAGNAGEITSSVVASRTRFFETASRKTGSSQGRLPGDES

SEQ ID NO: 277835 - DNA, 2085 bp, Artificial Sequence
  derived and/or modified sequence
atgggccaccccccactggaatttagcgactgctatttagactcacccgatttcagagaaaggctgaagtgctacgaacaggagctagagaggacgaacaagtttatcaaggatgttattaaggatggtaacgcactgattagcgccatgagaaactacagtagcgccgtacagaagtttagtcaaaccctccaatcgtttcaattcgacttcattggcgatacacttaccgatgatgagatcaatatcgcagagtctttcaaggaattcgcagagctcttgaatgaggtggagaacgagcgaatgatgatggtacacaatgcttccgatctcctgattaagcctctggagaatttccgcaaggaacagattggtttcaccaaagagaggaaaaagaaatttgaaaaagatggggaacggttctacagcctgctggatagacatctccatttaagttcgaagaagaaagagtctcagctccaagaggctgatcttcaggtcgacaaagaacgacacaattttttcgagtcctccctcgactatgtgtaccaaatccaagaagtacaggagtcaaagaaattcaacatcgtggaacctgtgttggcctttctacacagcttgtttattagcaactccctgaccgtggaactaacccaggacttcctgccatataagcagcaattgcagctcagcctgcagaataccaggaatcactttagctccacaagggaggagatggaggagctgaaaaagcgaatgaaggaagctcctcagacctgtaagctgccggggcagcccacaattgagggttacctttacacccaagaaaagtgggctctcggtatctcttgggtcaaatactattgtcagtacgagaaggagactaagactttgacgatgactcctatggagcagaagccgggcgctaaacaggggccactggacctgaccctgaagtactgtgtgaggcgcaaaactgaatccatagataagagattttgtttcgacattgaaactaatgagaggccgggcactatcactcttcaggccctcagcgaagcgaatagaagactttggatggaagctatggacggtaaggagcccatatatcatagcccaataactaagcagcaagagatggagttaaacgaggttgggtttaaatttgtgaggaaatgcattaacattatcgaaaccaagggaatcaaaacggagggtctttatcgcactgtggggtctaacatccaggtgcagaaactgctgaacgcgtttttcgaccccaaatgtccgggagacgtcgatttccacaacagtgactgggacatcaaaaccattactagtagccttaagttttacctgcgcaatctgagtgagccagtgatgacttatagactccataaggaattggtctccgcagccaaatctgacaatcttgactatcgactgggagccatacattcattggtgtataagctgccggaaaagaaccgtgagatgctcgagctcctcatccgacacctggtgaatgtttgcgaacactcaaaggaaaacttgatgacgccatctaacatgggtgtcatcttcggacctactcttatgagagctcaggaggacacagtggctgcgatgatgaatatcaagtttcagaacatcgtggttgagatactgattgaacacttcggaaagatctacttagggccaccggaggaatctgccgccccacccgtgccgccaccgcgcgtgaccgcccggcgccacaaaccaatcactatctcaaaaagactccttcgggaacggactgtgttttataccagtagtctggacgagtccgaaggggatgcggattccttttccaaggtgaggccccccggcgaaaagccaactatcatccggccccctgtgcgccccccagaccccccctgtcgcgccgcgacacctcaaaagccggagccgaaaccagacattgtggctggcaacgccggagagatcacctcctccgtcgtggctagcagaaccagattcttcgaaacagcttctcggaaaacgggatcaagtcaggggcgcttgccgggcgacgagtcctag

SEQ ID NO: 277836 - DNA, 225 bp, Artificial Sequence
  derived and/or modified sequence
atgctagagctcctgatacgccatctcgtgaacgtttgcgaacatagcaaggagaatctgatgaccccttcaaatatgggcgtgatcttcggccctactcttatgcgtgcccaagaagacacggtggccgctatgatgaacattaagtttcagaacatcgtggtggaaatcctgatcgagcactttggcaaaatttcttcatttttcttgcacaggtcgatttag

SEQ ID NO: 277837 - DNA, 2085 bp, Artificial Sequence
  derived and/or modified sequence
atgggccacccccccctggagttcagtgactgctacctggacagcccagacttccgggagcggctgaagtgctatgagcaggagctggagaggaccaacaagttcatcaaggatgtgatcaaggatggaaatgccctgatcagcgccatgaggaactacagcagcgctgtgcagaagttcagccagaccctgcagagcttccagtttgacttcatcggggacaccctgacagatgatgagatcaacattgctgagagcttcaaggagtttgctgagctgctgaatgaggtggagaatgaaagaatgatgatggtgcacaatgccagtgacctgctgatcaagcccctggagaacttcaggaaggagcagatcggcttcaccaaggagaggaagaagaagtttgagaaggatggagagcgcttctacagcctgctggacagacacctgcacctgagcagcaagaagaaggagagccagctgcaggaggccgacctgcaggtggacaaggagcggcacaacttctttgagagcagcctggactatgtgtaccagatccaggaggtgcaggagagcaagaagttcaacatcgtggagcctgtgctggccttcctgcacagcctcttcatcagcaacagcctgactgtggagctgacccaggacttcctgccctacaagcagcagctgcagctgagcctgcagaacaccaggaaccacttcagcagcacccgggaggagatggaggagctgaagaagaggatgaaggaggccccccagacctgcaagctgcccggccagcccaccatcgagggctacctgtacacccaggagaagtgggccctgggcatctcctgggtgaagtactactgccagtatgagaaggagaccaagaccctgaccatgacccccatggagcagaagccaggggccaagcagggccccctggacctgaccctgaagtactgtgtgcggaggaagacagagagcattgacaagcgcttctgctttgatattgagaccaatgaaagacctggcaccatcaccctgcaggccctgtctgaggccaacagaaggctgtggatggaggccatggatggcaaggagcccatctaccacagccccatcaccaagcagcaggagatggagctgaatgaggtgggcttcaagtttgtgaggaagtgcatcaacatcatcgagaccaagggcatcaagacagagggcctgtacagaacagtgggcagcaacatccaggtgcagaagctgctgaatgccttctttgaccccaagtgccctggagatgtggacttccacaacagcgactgggacatcaagaccatcaccagcagcctgaagttctacctgaggaacctgtctgagcctgtgatgacctaccgcctgcacaaggagctggtgtctgctgccaagagtgacaacctggactaccgcctgggcgccatccacagcctggtgtacaagctgcctgagaagaaccgggagatgctggagctgctgatccgccacctggtgaatgtgtgtgagcacagcaaggagaacctgatgacccccagcaacatgggcgtcatcttcggccccaccctgatgagggcccaggaggacacagtggccgccatgatgaacatcaagttccagaacatcgtggtggagatcctgattgagcactttgggaagatctacctgggccccccagaggagagcgctgcccctcctgtgcccccaccccgggtgacagcccggcggcacaagcccatcaccatcagcaagaggctgctgcgggagaggacagtgttctacaccagcagcctggatgaaagtgaaggagatgctgacagcttcagcaaggtgcggcccccaggagagaagcccaccatcatccggccccctgtgcggcccccagaccccccctgcagagctgccaccccccagaagccagagcccaagccagacatcgtggccggaaatgctggggagatcaccagctctgtggtggccagcaggacccgcttctttgaaacagccagcaggaagacaggcagcagccagggccgcctgcctggagatgagagctag

SEQ ID NO: 277838 - DNA, 225 bp, Artificial Sequence
  derived and/or modified sequence
atgctggagctgctgatccgccacctggtgaatgtgtgtgagcacagcaaggagaacctgatgacccccagcaacatgggcgtcatcttcggccccaccctgatgagggcccaggaggacacagtggccgccatgatgaacatcaagttccagaacatcgtggtggagatcctgattgagcactttgggaagatcagcagcttcttcctgcacaggagcatctag

SEQ ID NO: 277839 - DNA, 2085 bp, Artificial Sequence
  derived and/or modified sequence
atgggccacccccccctggagttcagcgactgctacctggacagccctgactttcgcgagcgacttaaatgttacgagcaagaactcgagagaaccaataagttcattaaagacgtgatcaaggacgggaacgctctcattagtgcaatgagaaactactcctccgctgtgcagaagttttctcaaacgctgcagagcttccagtttgatttcatcggagataccctgaccgatgacgagataaatatcgccgagagtttcaaagagtttgccgaactgcttaacgaagtggagaatgagagaatgatgatggtccacaacgcctcggacctgctcattaaaccacttgaaaatttcaggaaagaacagatcggattcacaaaggaacgcaaaaaaaaattcgagaaagacggtgaacggttttattccctgcttgacaggcacctgcatctttcctcaaagaagaaggaaagccagcttcaagaagccgatctccaggttgacaaggagcgtcacaactttttcgagagctccctcgactacgtgtaccaaattcaagaagtgcaggaatccaagaaattcaacattgtagaaccagtacttgccttcctccacagcttattcatttctaactccctgaccgtggagctgacccaagacttcctgccatataagcagcagttgcagctgtctcttcagaatacaaggaaccacttctccagtactagggaggagatggaagaactcaaaaagcgaatgaaggaggccccccaaacatgcaaattgcctggacagcccacgatcgagggctatttgtatactcaggaaaagtgggcgctagggatttcctgggtaaagtattattgtcagtatgaaaaagaaacgaaaacattgactatgactccaatggagcaaaagcccggagctaaacagggacctttagatctgactctcaagtactgtgtgcggagaaagacggagagcatcgataagcgcttctgcttcgacatcgagaccaatgagcgccccggcactattacgctgcaggccctgtcagaggccaaccggagactgtggatggaggcaatggacggcaaagagcctatctaccacagtccgatcaccaaacagcaggagatggaactgaatgaggtgggctttaagttcgttaggaaatgcataaatatcatcgagacaaagggcataaaaactgaaggcttgtataggacagtgggttcaaatattcaggtccagaagcttctgaacgccttcttcgatccgaaatgtccaggcgatgtagacttccacaatagcgattgggatatcaaaacaattaccagctccctgaaattctacctgcggaacctcagtgaacctgtcatgacatatcgactccacaaggagctggtttctgcagccaagtccgacaacctggattatcggctcggggccattcactctctggtctacaagttaccagaaaaaaacagagagatgctggagctacttattcgccatcttgtgaatgtctgcgagcatagtaaagaaaatctcatgaccccaagcaacatgggcgtgatatttggtcccacgctcatgcgagcacaagaagatacggtcgctgcaatgatgaacataaaattccagaatatagtggtcgagatactcatcgagcacttcgggaaaatatacctgggaccccctgaggagtccgccgctcctcccgtgccacccccaagagtgactgcccgcaggcacaagcccatcacgatctctaaacgcctgctgagagagcgcaccgtgttctacacctcatcgctcgatgagtctgagggcgatgccgattcattctccaaggttagacctccaggcgagaaaccaactataatcaggccccctgttcgccctcctgaccccccatgcagggctgctacacctcagaagccagaacccaaacccgacattgtggccggcaacgccggagaaatcacgagttccgtggtcgccagccgcacgcgctttttcgagacagccagtcggaagacaggaagctctcaggggagactcccgggagatgagtcttag

SEQ ID NO: 277840 - DNA, 225 bp, Artificial Sequence
  derived and/or modified sequence
atgctggagctgctgatccggcacctggtgaacgtgtgcgagcacagtaaagagaatctcatgactccttctaacatgggcgtaatttttggtccgactctcatgagagctcaggaggacaccgtggccgcaatgatgaacatcaagttccaaaatattgtggtggaaatattgatagagcactttgggaaaatctcctcattctttctgcaccggagtatttag

SEQ ID NO: 277841 - DNA, 2959 bp, Artificial Sequence
  derived and/or modified sequence
agtgcaatccgggttgcccgcggagttcggccaaggaagtcttccgctcgctccggagcgaggagcctgtagagaggctgttcccagctccagctctaacctcgcctacaccttgggcgggcccaagtgtcacgtttgcaattgctcaggaaggatccggcccgtctccggaggcaagtcgggctgcggtttttgctgcttatctgggaaggcgatgcctaagggacatgctgcttgctaggcagcaccctgccgggatccgactgcgatagttagctctccctggccctgaagccatcgccggggcgcctgttctctgtccggaccagccagcgctcctcaggagtctcactgaaacagaaccatgggtcatcccccgctggagttcagcgactgctacctggacagccccgatttccgcgagaggctcaagtgttatgagcaggaactggagaggaccaacaaattcatcaaagacgtaatcaaagacggcaacgcgcttatcagcgctatgagaaattattcttctgctgttcagaaattttcccagacgctgcagtcatttcagtttgatttcattggagacactctgactgatgatgaaattaacatcgctgaatccttcaaggaatttgctgaattgctcaacgaggtagaaaatgagaggatgatgatggtacacaatgctagtgatttgctgattaaacccttggaaaatttccggaaggaacaaataggcttcaccaaggagcggaaaaagaaatttgaaaaggatggtgagaggttttattctttactggatcggcacttacacctgtcttcaaaaaagaaagaatctcagttacaagaggcagacctacaggtggacaaggagaggcacaattttttcgagtcctctcttgattatgtttatcaaatccaggaagttcaggagtccaagaagttcaatattgtggagcctgtcttggcctttcttcatagtctgttcatttctaacagcctgactgtggagctcacacaggatttcctcccatacaaacaacagctccaactcagtttacagaatacaagaaatcatttctccagtacccgggaagagatggaagaacttaagaaaaggatgaaagaagctccccagacatgcaaacttccaggacagccaactattgaaggctatctctatacacaagagaaatgggctttaggaatatcctgggtgaaatactattgccagtatgagaaagagaccaaaacactgaccatgacgcctatggagcagaagccaggtgctaagcaggggcccttggacttaacactgaagtactgtgtgagaaggaagacggagtctatcgacaagaggttctgttttgacatagaaactaatgaaaggccaggaaccatcactctgcaggccctttcagaagctaacagaaggctatggatggaagccatggatgggaaagaacctatctaccacagccctataacaaaacagcaagaaatggagctaaatgaagtgggcttcaagtttgtcaggaagtgcatcaatattattgagaccaaagggatcaagacagaagggttgtaccgcactgtgggcagcaatattcaggttcagaagctgctgaatgccttttttgatcctaaatgcccaggagatgttgattttcataatagtgactgggacattaagacaatcaccagctccttgaaattctacctcaggaatctttctgaacctgtcatgacctatagacttcacaaagagctggtctctgctgccaagtctgacaacctggattaccgcctaggagctattcactccctggtatataagctaccagaaaagaaccgagagatgctggaacttctgataagacacttggtcaatgtgtgtgagcacagcaaagagaatcttatgaccccctccaacatgggagtaatctttgggcccaccctgatgagagctcaggaggacactgtggccgccatgatgaacatcaaattccagaacatagtggtggaaatactaatcgagcactttggcaagatctatttaggtccacctgaggaaagcgctgcaccgccagtgcctccgcctcgggtgacagcaagaaggcacaaaccaatcacgatttcaaagcgcttgctgcgagaaaggacggttttctatacttcttccctggatgaaagcgaaggggatgctgacagtttcagcaaagtgcggcctccaggagaaaagccaaccatcatccgccccccagtgaggcccccagatcctccctgccgggcagctactccccaaaagccagaaccaaagccagatattgtggctggcaatgcgggggaaatcacatcatctgtggtggcttccaggaccaggttttttgaaacagcttcccggaaaacaggaagttctcaaggcagacttcctggagatgaaagttgaggctacaggttttaaaagccttggcctcagaggaccctttccaggttctgaaagagtctttcttcttcaaacctttgtgtgcggagtcattttgtgttgaagagcagctccttcctagccttgcactttcagactctctctgggaggccataaaataaggagcatatgtcctagacaggtgtttatatctcctttgtattctgtcttcatcccctcagaaggtctgttttgagttcctataacactgtgaagagctggactccctcaagccagactctgccaaaaccaagatatccacttacctgagttgaagaggggagctcagttttcaactcttccctgaacttcctgcttcctcagagggccattgaactctgagagatttggggctaaagactgatctcaggggtcttaccttgaactgaaggccacttgagttggggccattgcttaccttggttggaagggaatagaaatgtttgctgaacattggagaatctcaacatgtct

SEQ ID NO: 277842 - DNA, 2085 bp, Artificial Sequence
  derived and/or modified sequence
atgggccacccacccctggagttctcagactgttaccttgactcccctgacttccgggagcgcctgaaatgttatgagcaggagctagaaaggacaaacaagtttataaaggacgttatcaaggatggcaacgccctgatctccgccatgagaaactactcctcagccgtccaaaagttttctcagactctgcaaagctttcagtttgatttcataggggataccctgaccgatgacgagattaatattgcagagagcttcaaggaattcgccgagttgctgaacgaggttgagaatgaaaggatgatgatggtccacaacgcttccgaccttttgatcaaaccactcgagaacttccgaaaggaacagattggatttacgaaagaaaggaagaaaaagtttgaaaaggatggagagcgcttttattctctcctggatcgccacttgcacctaagtagcaagaaaaaggagagccagttacaagaagccgacttacaggtcgacaaggaaaggcacaacttttttgaatctagcctggactacgtatatcagatccaagaggtgcaagaatcgaaaaagtttaatatcgttgaacctgtgctagccttcctccacagcctgttcattagtaattccctcacagtcgagctcacccaggacttcctaccctataaacagcagctccagctttctctccagaacacaagaaatcacttctccagcacgcgggaggagatggaggagcttaaaaagcgcatgaaggaggctccccagacctgcaagctgccaggccaacccacgattgagggctacctttacacgcaagaaaaatgggccctaggtatatcatgggtgaagtactactgtcagtacgagaaggagaccaagactctcaccatgacccccatggaacaaaaacccggagccaagcaagggccactggatctgaccctgaagtactgcgtcagacggaaaacagaaagcattgataagagattttgcttcgatatcgaaactaacgaacggcctggtaccatcactctgcaagcactgtccgaggctaatcggaggctctggatggaggccatggacggcaaggagcccatctaccacagcccaatcacaaagcagcaggaaatggaactgaatgaggtgggcttcaaattcgtgagaaagtgcatcaatataatcgagaccaagggcattaagacagaaggcctctatcgaacagtcggttccaatatccaagtgcagaagctgcttaacgcattttttgatcccaaatgtccaggtgatgttgacttccacaactctgattgggatattaagactattacctcctctttgaaattttatctgcgcaatctgagtgaacccgtgatgacctaccgcctgcacaaagagctggtgtccgcagccaagtccgataatttagactaccgcttgggcgctatccacagtctggtgtacaaactgccagagaaaaaccgtgagatgttggagcttttaatccgccatttggtaaacgtgtgtgaacactccaaggaaaatctaatgaccccatctaatatgggtgtcatatttggcccaactctcatgcgggcacaggaggacacagtagccgctatgatgaatattaagttccaaaacatcgttgtcgaaatcttaattgaacatttcggcaagatttacttgggaccacccgaggaatcagctgccccaccagtaccccctcccagagttacagccaggaggcacaagccaatcaccatctccaaacgcttgctgagggaacggactgtgttttataccagctcacttgatgaaagcgagggtgacgccgactcattctctaaagtcaggccacctggggaaaaaccaaccataattcgtccacccgtcaggccccctgatcccccatgccgcgcagccactcctcagaagcctgagcccaagccggatatcgtcgctgggaacgctggggagataacgtcctcagtggtggcttcaaggacaagattctttgaaacagcatctcgcaagacaggatcaagccagggaagattacctggtgacgaatcatag

SEQ ID NO: 277843 - DNA, 225 bp, Artificial Sequence
  derived and/or modified sequence
atgttagaactactgatcaggcaccttgtgaacgtgtgcgagcactccaaggagaacctgatgacaccctcaaacatgggcgtaatttttggcccaacactcatgcgagcgcaggaagatactgtcgcggcaatgatgaacatcaagttccaaaacattgtggttgagattttaatagaacactttggaaaaataagctcgtttttcttgcaccgctctatttag

SEQ ID NO: 277844 - DNA, 2085 bp, Artificial Sequence
  derived and/or modified sequence
atgggccacccccccctggagttcagcgactgctacctggacagccccgacttcagagagagactgaagtgctacgagcaggagctggagagaaccaacaagttcatcaaggacgtgatcaaggacggcaacgccctgatcagcgccatgagaaactacagcagcgccgtgcagaagttcagccagaccctgcagagcttccagttcgacttcatcggcgacaccctgaccgacgacgagatcaacatcgccgagagcttcaaggagttcgccgagctgctgaacgaggtggagaacgagagaatgatgatggtgcacaacgccagcgacctgctgatcaagcccctggagaacttcagaaaggagcagatcggcttcaccaaggagagaaagaagaagttcgagaaggacggcgagagattctacagcctgctggacagacacctgcacctgagcagcaagaagaaggagagccagctgcaggaggccgacctgcaggtggacaaggagagacacaacttcttcgagagcagcctggactacgtgtaccagatccaggaggtgcaggagagcaagaagttcaacatcgtggagcccgtgctggccttcctgcacagcctgttcatcagcaacagcctgaccgtggagctgacccaggacttcctgccctacaagcagcagctgcagctgagcctgcagaacaccagaaaccacttcagcagcaccagagaggagatggaggagctgaagaagagaatgaaggaggccccccagacctgcaagctgcccggccagcccaccatcgagggctacctgtacacccaggagaagtgggccctgggcatcagctgggtgaagtactactgccagtacgagaaggagaccaagaccctgaccatgacccccatggagcagaagcccggcgccaagcagggccccctggacctgaccctgaagtactgcgtgagaagaaagaccgagagcatcgacaagagattctgcttcgacatcgagaccaacgagagacccggcaccatcaccctgcaggccctgagcgaggccaacagaagactgtggatggaggccatggacggcaaggagcccatctaccacagccccatcaccaagcagcaggagatggagctgaacgaggtgggcttcaagttcgtgagaaagtgcatcaacatcatcgagaccaagggcatcaagaccgagggcctgtacagaaccgtgggcagcaacatccaggtgcagaagctgctgaacgccttcttcgaccccaagtgccccggcgacgtggacttccacaacagcgactgggacatcaagaccatcaccagcagcctgaagttctacctgagaaacctgagcgagcccgtgatgacctacagactgcacaaggagctggtgagcgccgccaagagcgacaacctggactacagactgggcgccatccacagcctggtgtacaagctgcccgagaagaacagagagatgctggagctgctgatcagacacctggtgaacgtgtgcgagcacagcaaggagaacctgatgacccccagcaacatgggcgtgatcttcggccccaccctgatgagagcccaggaggacaccgtggccgccatgatgaacatcaagttccagaacatcgtggtggagatcctgatcgagcacttcggcaagatctacctgggcccccccgaggagagcgccgccccccccgtgcccccccccagagtgaccgccagaagacacaagcccatcaccatcagcaagagactgctgagagagagaaccgtgttctacaccagcagcctggacgagagcgagggcgacgccgacagcttcagcaaggtgagaccccccggcgagaagcccaccatcatcagaccccccgtgagaccccccgaccccccctgcagagccgccaccccccagaagcccgagcccaagcccgacatcgtggccggcaacgccggcgagatcaccagcagcgtggtggccagcagaaccagattcttcgagaccgccagcagaaagaccggcagcagccagggcagactgcccggcgacgagagctag

SEQ ID NO: 277845 - DNA, 225 bp, Artificial Sequence
  derived and/or modified sequence
atgctggagctgctgatcagacacctggtgaacgtgtgcgagcacagcaaggagaacctgatgacccccagcaacatgggcgtgatcttcggccccaccctgatgagagcccaggaggacaccgtggccgccatgatgaacatcaagttccagaacatcgtggtggagatcctgatcgagcacttcggcaagatcagcagcttcttcctgcacagaagcatctag

SEQ ID NO: 277846 - DNA, 5625 bp, Artificial Sequence
  derived and/or modified sequence
aagggagctcagtaagtcacttctgggcgactgttgttttatttccggtctatgggacccggctgcgatttgctgctgcggacagcagctaccatcactgctgccgccatcatgtcagacacggacagcgacgaagattccgctggaggcggcccattttctttagcgggtttccttttcggcaacatcaatggagccgggcagctggagggggaaagcgtcttggatgatgaatgtaagaagcacttggcaggcttgggggctttggggctgggcagcctgatcactgaactcacggcaaatgaagaattgaccgggactgacggtgccttggtaaatgatgaagggtgggttaggagtacagaagatgctgtggactattcagacatcaatgaggtggcagaagatgaaagccgaagataccagcagacgatggggagcttgcagcccctttgccactcagattatgatgaagatgactatgatgctgattgtgaagacattgattgcaagttgatgcctcctccacctccacccccgggaccaatgaagaaggataaggaccaggattctattactggtgtgtctgaaaatggagaaggcatcatcttgccctccatcattgccccttcctctttggcctcagagaaagtggacttcagtagttcctctgactcagaatctgagatgggacctcaggaagcaacacaggcagaatctgaagatggaaagctgacccttccattggctgggattatgcagcatgatgccaccaagctgttgccaagtgtcacagaactttttccagaatttcgacctggaaaggtgttacgttttctacgtctttttggaccagggaagaatgtcccatctgtttggcggagtgctcggagaaagaggaagaagaagcaccgtgagctgatacaggaagagcagatccaggaggtggagtgctcagtagaatcagaagtcagccagaagtctttgtggaactacgactacgctccaccaccacctccagagcagtgtctctctgatgatgaaatcacgatgatggctcctgtggagtccaaattttcccaatcaactggagatatagataaagtgacagataccaaaccaagagtggctgagtggcgttatgggcctgcccgactgtggtatgatatgctgggtgtccctgaagatggcagtgggtttgactatggcttcaaactgagaaagacagaacatgaacctgtgataaaatctagaatgatagaggaatttaggaaacttgaggaaaacaatggcactgatcttctggctgatgaaaacttcctgatggtgacacagctgcattgggaggatgatatcatctgggatggggaggatgtcaaacacaaagggacaaaacctcagcgtgcaagcctggcaggctggcttccttctagcatgactaggaatgcgatggcttacaatgttcagcaaggttttgcagccactcttgatgatgacaaaccttggtactccatttttcccattgacaatgaggatctggtatatggacgctgggaggacaatatcatttgggatgctcaggccatgccccggctgttggaacctcctgttttgacacttgatcccaatgatgagaacctcattttggaaattcctgatgagaaggaagaggccacctctaactccccctccaaggagagtaagaaggaatcatctctgaagaagagtcgaattctcttagggaaaacaggagtcatcaaggaggaaccacagcagaacatgtctcagccagaagtgaaagatccatggaatctctccaatgatgagtattattatcccaagcaacagggtcttcgaggcacctttggagggaatattatccagcattcaattcctgctgtggaattacggcagcccttctttcccacccacatggggcccatcaaactccggcagttccatcgcccacctctgaaaaagtactcatttggtgcactttctcagccaggtccccactcagtccaacctttgctaaagcacatcaaaaaaaaggccaagatgagagaacaagagaggcaagcttcaggtggtggagagatgttttttatgcgcacacctcaggacctcacaggcaaagatggtgatcttattcttgcagaatatagtgaggaaaatggacccttaatgatgcaggttggcatggcaaccaagataaagaactattataaacggaaacctggaaaagatcctggagcaccagattgtaaatatggggaaactgtttactgccatacatctcctttcctgggttctctccatcctggccaattgctgcaagcatttgagaacaacctttttcgtgctccaatttatcttcataagatgccagaaactgatttcttgatcattcggacaagacagggttactatattcgggaattagtggatatttttgtggttggccagcagtgtcccttgtttgaagttcctgggcctaactccaaaagggccaatacgcatattcgagactttctacaggtttttatttaccgccttttctggaaaagtaaagatcggccacggaggatacgaatggaagatataaaaaaagcctttccttcccattcagaaagcagcatccggaagaggctaaagctctgcgctgacttcaaacgcacagggatggactcaaactggtgggtgcttaagtctgattttcgtttaccaacggaagaagagatcagagctatggtgtcaccagagcagtgctgtgcttattatagcatgatagctgcagagcaacgactgaaggatgctggctatggtgagaaatccttttttgctccagaagaagaaaatgaggaagatttccagatgaagattgatgatgaagttcgcactgccccttggaacaccacaagggccttcattgctgccatgaagggcaagtgtctgctagaggtgactggggtggcagatcccacggggtgtggtgaaggattctcctatgtgaagattccaaacaaaccaacacagcagaaggatgataaagaaccgcagccagtgaagaagacagtgacaggaacagatgcagaccttcgtcgcctttccctgaaaaatgccaagcaacttctacgtaaatttggtgtgcctgaggaagagattaaaaagttgtcccgctgggaagtgattgatgtggtgcgcacaatgtcaacagaacaggctcgttctggagaggggcccatgagtaaatttgcccgtggatcaaggttttctgtggctgagcatcaagagcgttacaaagaggaatgtcagcgcatctttgacctacagaacaaggttctgtcatcaactgaagtcttatcaactgacacagacagcagctcagctgaagatagtgactttgaagaaatgggaaagaacattgagaacatgttgcagaacaagaaaaccagctctcagctttcacgtgaacgggaggaacaggagcggaaggaactacagcgaatgctactggcagcaggctcagcagcatccggaaacaatcacagagatgatgacacagcttccgtgactagccttaactcttctgccactggacgctgtctcaagatttatcgcacgtttcgagatgaagaggggaaagagtatgttcgctgtgagacagtccgaaaaccagctgtcattgatgcctatgtgcgcatacggactacaaaagatgaggaattcattcgaaaatttgccctttttgatgaacaacatcgggaagagatgcgaaaagaacggcggaggattcaagagcaactgaggcggcttaagaggaaccaggaaaaggagaagcttaagggtcctcctgagaagaagcccaagaaaatgaaggagcgtcctgacctaaaactgaaatgtggggcatgtggtgccattggacacatgaggactaacaaattctgccccctctattatcaaacaaatgcgccaccttccaaccctgttgccatgacagaagaacaggaggaggagttggaaaagacagtcattcataatgataatgaagaacttatcaaggttgaagggaccaaaattgtcttggggaaacagctaattgagagtgcggatgaggttcgcagaaaatctctggttctcaagtttcctaaacagcagcttcctccaaagaagaaacggcgagttggaaccactgttcactgtgactatttgaatagacctcataagtccatccaccggcgccgcacagaccctatggtgacgctgtcgtccatcttggagtctatcatcaatgacatgagagatcttccaaatacataccctttccacactccagtcaatgcaaaggttgtaaaggactactacaaaatcatcactcggccaatggacctacaaacactccgcgaaaacgtgcgtaaacgcctctacccatctcgggaagagttcagagagcatctggagctaattgtgaaaaatagtgcaacctacaatgggccaaaacactcattgactcagatctctcaatccatgctggatctctgtgatgaaaaactcaaagagaaagaagacaaattagctcgcttagagaaagctatcaaccccttgctggatgatgatgaccaagtggcgttttctttcattctggacaacattgtcacccagaaaatgatggcagttccagattcttggccatttcatcacccagttaataagaaatttgttccagattattacaaagtgattgtcaatccaatggatttagagaccatacgtaagaacatctccaagcacaagtatcagagtcgggagagctttctggatgatgtaaaccttattctggccaacagtgttaagtataatggacctgagagtcagtatactaagactgcccaggagattgtgaacgtctgttaccagacattgactgagtatgatgaacatttgactcaacttgagaaggatatttgtactgctaaagaagcagctttggaggaagcagaattagaaagcctggacccaatgaccccagggccctacacgcctcaggctaagcctcctgatttgtatgataccaacacatccctcagtatgtctcgagatgcctctgtatttcaagatgagagcaatatgtctgtcttggatattcccagtgccactccagaaaagcaggtaacacagatgcgccagggccgaggtaggctgggcgaggaagactctgatgtagatattgaagggtatgatgatgaggaggaggatgggaaacctaagactccagccccagaaggtgaagatggagatggtgatcttgcagatgaagaggaaggaactgtacaacagcctcaagccagtgtcctgtatgaggatttgcttatgtctgaaggagaagatgatgaggaagatgctgggagtgatgaagaaggagacaatcctttctctgctatccagctgagtgaaagtggaagtgactctgatgtgggatctggtggaataagacccaaacaaccccgcatgcttcaggagaacacaaggatggacatggaaaatgaagaaagcatgatgtcctatgagggagacggtggggaggcttcccatggtttggaggatagcaacatcagccatcaa

SEQ ID NO: 277847 - protein, 1906 aa, Artificial Sequence
  derived and/or modified sequence
MGPGCDLLLRTAATITAAAIMSDTDSDEDSAGGGPFSLAGFLFGNINGAGQLEGESVLDDECKKHLAGLGALGLGSLITELTANEELTGTDGALVNDEGWVRSTEDAVDYSDINEVAEDESRRYQQTMGSLQPLCHSDYDEDDYDADCEDIDCKLMPPPPPPPGPMKKDKDQDSITGEKVDFSSSSDSESEMGPQEATQAESEDGKLTLPLAGIMQHDATKLLPSVTELFPEFRPGKVLRFLRLFGPGKNVPSVWRSARRKRKKKHRELIQEEQIQEVECSVESEVSQKSLWNYDYAPPPPPEQCLSDDEITMMAPVESKFSQSTGDIDKVTDTKPRVAEWRYGPARLWYDMLGVPEDGSGFDYGFKLRKTEHEPVIKSRMIEEFRKLEENNGTDLLADENFLMVTQLHWEDDIIWDGEDVKHKGTKPQRASLAGWLPSSMTRNAMAYNVQQGFAATLDDDKPWYSIFPIDNEDLVYGRWEDNIIWDAQAMPRLLEPPVLTLDPNDENLILEIPDEKEEATSNSPSKESKKESSLKKSRILLGKTGVIKEEPQQNMSQPEVKDPWNLSNDEYYYPKQQGLRGTFGGNIIQHSIPAVELRQPFFPTHMGPIKLRQFHRPPLKKYSFGALSQPGPHSVQPLLKHIKKKAKMREQERQASGGGEMFFMRTPQDLTGKDGDLILAEYSEENGPLMMQVGMATKIKNYYKRKPGKDPGAPDCKYGETVYCHTSPFLGSLHPGQLLQAFENNLFRAPIYLHKMPETDFLIIRTRQGYYIRELVDIFVVGQQCPLFEVPGPNSKRANTHIRDFLQVFIYRLFWKSKDRPRRIRMEDIKKAFPSHSESSIRKRLKLCADFKRTGMDSNWWVLKSDFRLPTEEEIRAMVSPEQCCAYYSMIAAEQRLKDAGYGEKSFFAPEEENEEDFQMKIDDEVRTAPWNTTRAFIAAMKGKCLLEVTGVADPTGCGEGFSYVKIPNKPTQQKDDKEPQPVKKTVTGTDADLRRLSLKNAKQLLRKFGVPEEEIKKLSRWEVIDVVRTMSTEQARSGEGPMSKFARGSRFSVAEHQERYKEECQRIFDLQNKVLSSTEVLSTDTDSSSAEDSDFEEMGKNIENMLQNKKTSSQLSREREEQERKELQRMLLAAGSAASGNNHRDDDTASVTSLNSSATGRCLKIYRTFRDEEGKEYVRCETVRKPAVIDAYVRIRTTKDEEFIRKFALFDEQHREEMRKERRRIQEQLRRLKRNQEKEKLKGPPEKKPKKMKERPDLKLKCGACGAIGHMRTNKFCPLYYQTNAPPSNPVAMTEEQEEELEKTVIHNDNEELIKVEGTKIVLGKQLIESADEVRRKSLVLKFPKQQLPPKKKRRVGTTVHCDYLNRPHKSIHRRRTDPMVTLSSILESIINDMRDLPNTYPFHTPVNAKVVKDYYKIITRPMDLQTLRENVRKRLYPSREEFREHLELIVKNSATYNGPKHSLTQISQSMLDLCDEKLKEKEDKLARLEKAINPLLDDDDQVAFSFILDNIVTQKMMAVPDSWPFHHPVNKKFVPDYYKVIVNPMDLETIRKNISKHKYQSRESFLDDVNLILANSVKYNGPESQYTKTAQEIVNVCYQTLTEYDEHLTQLEKDICTAKEAALEEAELESLDPMTPGPYTPQPPDLYDTNTSLSMSRDASVFQDESNMSVLDIPSATPEKQVTQMRQGRGRLGEEDSDVDIEGYDDEEEDGKPKTPAPEGEDGDGDLADEEEGTVQQPQASVLYEDLLMSEGEDDEEDAGSDEEGDNPFSAIQLSESGSDSDVGSGGIRPKQPRMLQENTRMDMENEESMMSYEGDGGEASHGLEDSNISYGSYEEPDPKSNTQDTSFSSIGGYEVSEEEEDEEEEEQRSGPSVLSQVHLSEDEEDSEDFHSIAGDSDLDSDE

SEQ ID NO: 277848 - DNA, 5721 bp, Artificial Sequence
  derived and/or modified sequence
atgggccccggctgcgacctgctgctgagaaccgccgccaccatcaccgccgccgccatcatgagcgacaccgacagcgacgaggacagcgccggcggcggccccttcagcctggccggcttcctgttcggcaacatcaacggcgccggccagctggagggcgagagcgtgctggacgacgagtgcaagaagcacctggccggcctgggcgccctgggcctgggcagcctgatcaccgagctgaccgccaacgaggagctgaccggcaccgacggcgccctggtgaacgacgagggctgggtgagaagcaccgaggacgccgtggactacagcgacatcaacgaggtggccgaggacgagagcagaagataccagcagaccatgggcagcctgcagcccctgtgccacagcgactacgacgaggacgactacgacgccgactgcgaggacatcgactgcaagctgatgcccccccccccccccccccccggccccatgaagaaggacaaggaccaggacagcatcaccggcgagaaggtggacttcagcagcagcagcgacagcgagagcgagatgggcccccaggaggccacccaggccgagagcgaggacggcaagctgaccctgcccctggccggcatcatgcagcacgacgccaccaagctgctgcccagcgtgaccgagctgttccccgagttcagacccggcaaggtgctgagattcctgagactgttcggccccggcaagaacgtgcccagcgtgtggagaagcgccagaagaaagagaaagaagaagcacagagagctgatccaggaggagcagatccaggaggtggagtgcagcgtggagagcgaggtgagccagaagagcctgtggaactacgactacgcccccccccccccccccgagcagtgcctgagcgacgacgagatcaccatgatggcccccgtggagagcaagttcagccagagcaccggcgacatcgacaaggtgaccgacaccaagcccagagtggccgagtggagatacggccccgccagactgtggtacgacatgctgggcgtgcccgaggacggcagcggcttcgactacggcttcaagctgagaaagaccgagcacgagcccgtgatcaagagcagaatgatcgaggagttcagaaagctggaggagaacaacggcaccgacctgctggccgacgagaacttcctgatggtgacccagctgcactgggaggacgacatcatctgggacggcgaggacgtgaagcacaagggcaccaagccccagagagccagcctggccggctggctgcccagcagcatgaccagaaacgccatggcctacaacgtgcagcagggcttcgccgccaccctggacgacgacaagccctggtacagcatcttccccatcgacaacgaggacctggtgtacggcagatgggaggacaacatcatctgggacgcccaggccatgcccagactgctggagccccccgtgctgaccctggaccccaacgacgagaacctgatcctggagatccccgacgagaaggaggaggccaccagcaacagccccagcaaggagagcaagaaggagagcagcctgaagaagagcagaatcctgctgggcaagaccggcgtgatcaaggaggagccccagcagaacatgagccagcccgaggtgaaggacccctggaacctgagcaacgacgagtactactaccccaagcagcagggcctgagaggcaccttcggcggcaacatcatccagcacagcatccccgccgtggagctgagacagcccttcttccccacccacatgggccccatcaagctgagacagttccacagaccccccctgaagaagtacagcttcggcgccctgagccagcccggcccccacagcgtgcagcccctgctgaagcacatcaagaagaaggccaagatgagagagcaggagagacaggccagcggcggcggcgagatgttcttcatgagaaccccccaggacctgaccggcaaggacggcgacctgatcctggccgagtacagcgaggagaacggccccctgatgatgcaggtgggcatggccaccaagatcaagaactactacaagagaaagcccggcaaggaccccggcgcccccgactgcaagtacggcgagaccgtgtactgccacaccagccccttcctgggcagcctgcaccccggccagctgctgcaggccttcgagaacaacctgttcagagcccccatctacctgcacaagatgcccgagaccgacttcctgatcatcagaaccagacagggctactacatcagagagctggtggacatcttcgtggtgggccagcagtgccccctgttcgaggtgcccggccccaacagcaagagagccaacacccacatcagagacttcctgcaggtgttcatctacagactgttctggaagagcaaggacagacccagaagaatcagaatggaggacatcaagaaggccttccccagccacagcgagagcagcatcagaaagagactgaagctgtgcgccgacttcaagagaaccggcatggacagcaactggtgggtgctgaagagcgacttcagactgcccaccgaggaggagatcagagccatggtgagccccgagcagtgctgcgcctactacagcatgatcgccgccgagcagagactgaaggacgccggctacggcgagaagagcttcttcgcccccgaggaggagaacgaggaggacttccagatgaagatcgacgacgaggtgagaaccgccccctggaacaccaccagagccttcatcgccgccatgaagggcaagtgcctgctggaggtgaccggcgtggccgaccccaccggctgcggcgagggcttcagctacgtgaagatccccaacaagcccacccagcagaaggacgacaaggagccccagcccgtgaagaagaccgtgaccggcaccgacgccgacctgagaagactgagcctgaagaacgccaagcagctgctgagaaagttcggcgtgcccgaggaggagatcaagaagctgagcagatgggaggtgatcgacgtggtgagaaccatgagcaccgagcaggccagaagcggcgagggccccatgagcaagttcgccagaggcagcagattcagcgtggccgagcaccaggagagatacaaggaggagtgccagagaatcttcgacctgcagaacaaggtgctgagcagcaccgaggtgctgagcaccgacaccgacagcagcagcgccgaggacagcgacttcgaggagatgggcaagaacatcgagaacatgctgcagaacaagaagaccagcagccagctgagcagagagagagaggagcaggagagaaaggagctgcagagaatgctgctggccgccggcagcgccgccagcggcaacaaccacagagacgacgacaccgccagcgtgaccagcctgaacagcagcgccaccggcagatgcctgaagatctacagaaccttcagagacgaggagggcaaggagtacgtgagatgcgagaccgtgagaaagcccgccgtgatcgacgcctacgtgagaatcagaaccaccaaggacgaggagttcatcagaaagttcgccctgttcgacgagcagcacagagaggagatgagaaaggagagaagaagaatccaggagcagctgagaagactgaagagaaaccaggagaaggagaagctgaagggcccccccgagaagaagcccaagaagatgaaggagagacccgacctgaagctgaagtgcggcgcctgcggcgccatcggccacatgagaaccaacaagttctgccccctgtactaccagaccaacgccccccccagcaaccccgtggccatgaccgaggagcaggaggaggagctggagaagaccgtgatccacaacgacaacgaggagctgatcaaggtggagggcaccaagatcgtgctgggcaagcagctgatcgagagcgccgacgaggtgagaagaaagagcctggtgctgaagttccccaagcagcagctgccccccaagaagaagagaagagtgggcaccaccgtgcactgcgactacctgaacagaccccacaagagcatccacagaagaagaaccgaccccatggtgaccctgagcagcatcctggagagcatcatcaacgacatgagagacctgcccaacacctaccccttccacacccccgtgaacgccaaggtggtgaaggactactacaagatcatcaccagacccatggacctgcagaccctgagagagaacgtgagaaagagactgtaccccagcagagaggagttcagagagcacctggagctgatcgtgaagaacagcgccacctacaacggccccaagcacagcctgacccagatcagccagagcatgctggacctgtgcgacgagaagctgaaggagaaggaggacaagctggccagactggagaaggccatcaaccccctgctggacgacgacgaccaggtggccttcagcttcatcctggacaacatcgtgacccagaagatgatggccgtgcccgacagctggcccttccaccaccccgtgaacaagaagttcgtgcccgactactacaaggtgatcgtgaaccccatggacctggagaccatcagaaagaacatcagcaagcacaagtaccagagcagagagagcttcctggacgacgtgaacctgatcctggccaacagcgtgaagtacaacggccccgagagccagtacaccaagaccgcccaggagatcgtgaacgtgtgctaccagaccctgaccgagtacgacgagcacctgacccagctggagaaggacatctgcaccgccaaggaggccgccctggaggaggccgagctggagagcctggaccccatgacccccggcccctacaccccccagccccccgacctgtacgacaccaacaccagcctgagcatgagcagagacgccagcgtgttccaggacgagagcaacatgagcgtgctggacatccccagcgccacccccgagaagcaggtgacccagatgagacagggcagaggcagactgggcgaggaggacagcgacgtggacatcgagggctacgacgacgaggaggaggacggcaagcccaagacccccgcccccgagggcgaggacggcgacggcgacctggccgacgaggaggagggcaccgtgcagcagccccaggccagcgtgctgtacgaggacctgctgatgagcgagggcgaggacgacgaggaggacgccggcagcgacgaggagggcgacaaccccttcagcgccatccagctgagcgagagcggcagcgacagcgacgtgggcagcggcggcatcagacccaagcagcccagaatgctgcaggagaacaccagaatggacatggagaacgaggagagcatgatgagctacgagggcgacggcggcgaggccagccacggcctggaggacagcaacatcagctacggcagctacgaggagcccgaccccaagagcaacacccaggacaccagcttcagcagcatcggcggctacgaggtgagcgaggaggaggaggacgaggaggaggaggagcagagaagcggccccagcgtgctgagccaggtgcacctgagcgaggacgaggaggacagcgaggacttccacagcatcgccggcgacagcgacctggacagcgacgagtag

SEQ ID NO: 277849 - DNA, 5721 bp, Artificial Sequence
  derived and/or modified sequence
atggggcccggctgtgacctgctgctgcgaactgctgcaactatcacagcggccgctattatgtctgacaccgattcggacgaggactctgcaggcggcggacctttctccttggcaggatttcttttcggcaacattaacggcgccggccagctggaaggagagtctgtgctcgatgatgaatgcaaaaaacatcttgccgggctgggagcactcggtctgggaagcctgattacggaactaacggccaatgaggaactcacagggactgatggagcactcgtgaacgacgaaggctgggtgcgatccaccgaggacgccgtggattatagcgatatcaacgaggttgctgaagatgagagccggagatatcagcagacgatggggtctttgcagcccctgtgccatagcgactatgacgaagatgactatgacgcagattgcgaagacattgactgtaagctcatgcctccgcctccgccgccaccaggaccaatgaagaaagataaagaccaagactcaataactggggagaaggtggatttttcgagctcatctgatagtgagagcgagatggggcctcaggaagccacacaggccgagtccgaggatggaaagcttacacttccgctggccggtatcatgcagcacgacgcgacaaagctactgccgtccgtcaccgaactcttcccagagtttcgaccaggcaaggtgctacgtttcctaagacttttcggcccaggtaaaaatgttcctagcgtatggagatccgcccgtcggaaaaggaaaaaaaaacaccgggagcttatccaagaggagcagatacaggaagtggagtgcagcgttgagtccgaagttagccagaaatcactgtggaactatgattacgccccaccccctccccccgagcagtgcctgtctgatgacgaaatcacaatgatggcgcctgtcgagtcaaagtttagtcagtccactggggacattgacaaggtgacggacacaaagcctcgcgtagcggagtggcggtacggaccagcccggttgtggtatgacatgttaggagtgcccgaggatggatcgggattcgattacgggtttaagctgcgaaagaccgagcatgagcccgtgatcaagtccaggatgattgaggagttcaggaagcttgaggaaaacaacggtaccgatcttctggcagatgaaaacttcctaatggtcactcagctccattgggaagatgatattatctgggatggcgaagacgtgaagcacaagggaaccaagccgcaaagggcatctctcgctggatggctccccagctccatgaccagaaacgcgatggcctacaacgtgcaacaaggctttgctgctaccctggacgacgacaaaccctggtatagtatttttcctattgacaacgaggacctagtgtacggccggtgggaggacaacattatttgggacgcccaagccatgccccggctgctggaacctcccgtattaactctggatcccaatgacgaaaacttaattctggagatcccagatgagaaggaagaggctactagtaacagcccttcaaaggagtctaagaaggaatcatctctcaaaaagtcacggatacttctgggcaagaccggtgttattaaagaagagcctcagcagaacatgtcacaacctgaggtgaaggacccctggaacttgtcaaacgatgagtattactacccaaagcagcaggggcttagagggacgttcggaggcaatatcattcagcatagcattccagccgtcgagctgcggcagccttttttccctacacacatgggtcccatcaagctacgccaatttcaccgaccacccctgaagaagtacagtttcggcgctttgtcccaacccggcccgcattccgtccagccccttctcaaacatataaagaagaaagcaaagatgagagagcaggagcggcaggcgagcggcggtggcgagatgtttttcatgaggactcctcaggacctgactgggaaagacggggatcttatcttggcggagtattcagaggagaatggacccctgatgatgcaggttggcatggctacaaagataaagaactactacaagagaaaacccgggaaggatccaggcgctccagattgcaagtacggagaaaccgtttactgtcacacctctccatttctgggatctctgcaccccggacaactgttgcaagcattcgagaataatctgtttagggctccgatttatctgcataaaatgccagagactgattttcttattattcggaccaggcagggatattacatccgtgaactcgtcgatatttttgtggttgggcaacaatgcccgttgtttgaggtcccaggccccaacagtaagagggcaaatactcatattcgcgacttcctgcaggtctttatatatcgtctcttttggaaaagtaaagacagaccgcggcgaattcgaatggaagacatcaaaaaagcctttcctagtcattcggaatcttccatccgcaagagactcaagctttgcgctgatttcaaacgaacgggaatggatagcaattggtgggttttgaagagtgactttcgactccccacagaagaagagattcgcgctatggtctcccctgaacagtgctgtgcttattattcaatgatcgccgcagagcagagactcaaagatgctggctatggcgaaaaaagcttcttcgctccagaggaggagaatgaggaggacttccagatgaaaatcgatgacgaagtgcgcaccgccccttggaatacaactcgcgctttcatcgctgccatgaaggggaagtgcttactcgaggtcacgggggtggcagacccgactggctgcggtgaaggattttcctacgtcaagatcccgaataagccaacgcagcagaaagatgataaggagccgcaacccgttaagaaaaccgtgaccggcacagacgccgacctccgcagactaagcttgaagaatgccaagcagcttctgaggaagtttggagtgcctgaagaggagataaagaaactgtccagatgggaagtgatcgatgtggttagaacaatgtctacggaacaggcgcgctcaggggaggggccaatgtccaaattcgcgagagggtctcggttctctgtggcggaacaccaggagagatataaagaggagtgccagcgcattttcgatctgcagaacaaagtgctctcctccactgaagttctgtctacagatactgactcctctagcgctgaggattcagacttcgaagagatggggaagaacatcgaaaatatgttacagaataagaaaacttcatcacagttatcaagggagagggaggagcaggaaaggaaggaactgcagcggatgttgctggccgccggatctgcggcttccggaaacaatcacagggacgatgacacggccagtgtcacctcattaaattcctctgcaacaggaaggtgcctgaagatttaccgcacatttcgcgacgaggagggcaaagaatacgttcgctgcgagaccgtcagaaagcccgccgtcattgacgcatatgtgcgaatacgcaccacgaaagatgaggaattcattaggaagttcgcccttttcgacgaacaacatcgggaagagatgcgtaaggagcgtcggcgcatccaggagcagctgaggcgtctcaaaagaaaccaggagaaggaaaaactgaagggcccacccgaaaagaaaccaaagaagatgaaggagcggcctgatctgaagctgaagtgtggcgcctgtggagctatcggccacatgcgcaccaacaaattttgccccttgtattatcagactaacgccccaccttccaatcctgtagcgatgactgaagaacaggaggaggagctggagaagactgtcattcataatgacaatgaggagctaattaaggtcgagggtaccaaaatagttctcggtaaacagctgattgagagtgcagacgaggtgaggagaaagtcgttagtgctgaagttcccgaaacaacaactgccacctaaaaagaagagacgggtgggcacaaccgtgcactgtgattatttaaataggcctcataaatccatccaccggcggagaacagatcccatggtgaccctgtctagtatactcgaatccattataaacgatatgagagacctccccaacacctatccgtttcacactcctgtgaatgccaaggtcgttaaggactactataaaattatcactagacctatggacctacagactctgagggaaaacgtgagaaagagactgtacccgagcagggaagagttccgggagcacctcgagctcatagtgaagaactctgctacttataacgggcccaaacattctttaacccaaatttcacaaagcatgttggatctgtgcgacgagaaactgaaggagaaagaagataagctggcccgtctggagaaagcgataaatcccctcctggatgatgacgatcaagtggcgttttctttcatcctggacaatattgtcacacagaaaatgatggctgtcccggactcatggccgtttcatcacccagtgaataagaagtttgtgccggactattacaaggtgatcgtgaatccaatggaccttgagaccatccggaagaacatctcaaagcacaaatatcagagccgagagtcctttctggatgacgtcaatttaatcctggccaactctgtgaagtacaacggcccagagtcccaatacaccaaaaccgcccaggagattgtgaacgtttgttaccagactctcacggaatacgatgagcaccttacgcagctagagaaagatatctgcacagcaaaagaggcagctcttgaggaggccgaattggaatcgctcgatcccatgaccccggggccttataccccccagccccctgacctgtatgacactaacacttcactgtcgatgtcacgggacgccagcgtcttccaggacgagagcaatatgtctgtgctcgacatccctagcgctacacctgagaagcaggttacccaaatgcgccagggcaggggacgcctgggcgaagaagatagcgacgtggatattgaggggtatgacgacgaagaggaagacgggaaaccaaaaactccagcccccgagggggaggacggcgacggagatctggccgatgaggaggagggcacagtccaacaaccccaggcttccgtgctgtatgaggatttgctgatgtcagagggagaagatgatgaagaagacgccgggtccgacgaggaaggcgataacccttttagcgctattcagctaagtgaatcaggcagtgactcagacgttggatccgggggcatcaggccgaagcaacctaggatgttgcaggagaatacgcggatggatatggaaaatgaagagtctatgatgagctatgaaggcgacggcggggaggcaagtcacggactggaagactctaacatatcgtacggcagttacgaggaacctgatcccaagtctaatacccaagacacttcattcagctcaataggcggctacgaagtgtccgaggaggaagaagacgaggaagaagaggaacagcgctctgggccgtcggtattgtctcaggttcacctctcagaagatgaggaggattccgaggacttccacagcatagctggggattccgatctggacagcgatgaatag

SEQ ID NO: 277850 - DNA, 5721 bp, Artificial Sequence
  derived and/or modified sequence
atgggccctggctgtgacctgctgctgaggacagctgccaccatcacagctgctgccatcatgtctgacacagacagtgatgaggacagcgctgggggcggccccttcagcctggccggcttcctgtttggaaacatcaatggagctggccagctggagggggagagcgtgctggatgatgagtgcaagaagcacctggccggcctgggcgccctgggcctgggcagcctcatcacagagctgacagccaatgaggagctgaccggcacagatggagccctggtgaatgatgagggctgggtgcgcagcacagaagatgctgtggactacagcgacatcaatgaggtggccgaggatgagagccgccgctaccagcagaccatgggcagcctgcagcccctgtgccacagcgactatgatgaagatgattatgatgctgactgtgaagatattgactgcaagctgatgcctcctcctcctcctcctcctggccccatgaagaaggacaaggaccaggacagcatcaccggggagaaggtggacttcagcagcagcagtgacagcgagagcgagatgggcccccaggaggccacccaggccgagagtgaagatggcaagctgaccctgcccctggccggcatcatgcagcatgatgccaccaagctgctgcccagcgtgacagagctgtttcctgagttccggcctgggaaggtgctgcgcttcctgcggctgtttggacctgggaagaatgtgcccagcgtgtggaggtctgcccggaggaagaggaagaagaagcaccgggagctgatccaggaggagcagatccaggaggtggagtgcagcgtggagagcgaggtgtcccagaagagcctgtggaactatgactatgcccctcctcctcctcctgagcagtgcctgagtgatgatgagatcaccatgatggcccctgtggagagcaagttcagccagagcactggagacatcgacaaggtgacagacaccaagccccgggtggccgagtggaggtatggccctgcccggctgtggtatgacatgctgggcgtgcctgaagatggcagcggctttgattatggcttcaagctgaggaagacagaacatgagcctgtgatcaagagcaggatgattgaggagttcaggaagctggaggagaacaacggcacagacctgctggctgatgagaacttcctgatggtgacccagctgcactgggaggatgacatcatctgggatggagaagatgtgaagcacaagggcaccaagccccagagggccagcctggccggctggctgcccagctccatgaccagaaatgccatggcctacaacgtgcagcagggctttgctgccaccctggatgatgacaagccctggtacagcatcttccccatcgacaatgaagacctggtgtatggccgctgggaggacaacatcatctgggatgcccaggccatgccccggctgctggagccccctgtgctgaccctggaccccaatgatgaaaatctcatcctggagatcccagatgagaaggaggaggccaccagcaacagccccagcaaggagagcaagaaggagagcagcctgaagaagagccgcatcctgctgggcaagacaggagtcatcaaggaggagccccagcagaacatgagccagcctgaggtgaaggacccctggaacctgagcaatgatgagtactactaccccaagcagcagggcctgcggggcaccttcggcggcaacatcatccagcacagcatcccagctgtggagctgcggcagcccttcttccccacccacatgggccccatcaagctgcggcagttccaccggccccccctgaagaagtacagctttggagccctgagccagcccggcccccacagcgtgcagcccctgctgaagcacatcaagaagaaggccaagatgagggagcaggagcggcaggccagcggcggcggggagatgttcttcatgaggaccccccaggacctgaccgggaaggatggagacctgatcctggccgagtacagcgaggagaatggccccctgatgatgcaggtgggcatggccaccaagatcaagaactactacaagaggaagccaggcaaggaccccggggccccagactgcaagtatggagagaccgtgtactgccacaccagccccttcctgggcagcctgcaccctggccagctgctgcaggcctttgagaacaacctcttccgggcccccatctacctgcacaagatgcctgagacagacttcctgatcatccgcacccggcagggctactacatccgggagctggtggacatctttgtggtgggccagcagtgccccctgtttgaggtgcccggccccaacagcaagagggccaacacccacatccgggacttcctgcaggtgttcatctaccgcctcttctggaagagcaaggaccggccccggcgcatccgcatggaggacatcaagaaggccttccccagccacagcgagagcagcatcaggaagaggctgaagctgtgtgccgacttcaagaggacaggcatggacagcaactggtgggtgctgaagagtgacttccggctgcccacagaggaggagatccgggccatggtgtccccagagcagtgctgtgcctactacagcatgattgctgctgagcagaggctgaaggatgctggctatggagagaagagcttctttgcccctgaggaggagaatgaggaggacttccagatgaagattgatgatgaggtgaggacagccccctggaacaccacccgggccttcatcgccgccatgaagggcaagtgcctgctggaggtgactggagtggccgaccccaccggctgtggggagggcttctcctatgtgaagatccccaacaagcccacccagcagaaggatgacaaggagccccagcctgtgaagaagacagtgactggaacagatgctgacctgcggcggctgagcctgaagaatgccaagcagctgctgaggaagtttggagtgcctgaggaggagatcaagaagctgagccgctgggaggtgattgatgtggtgaggaccatgagcacagagcaggcccggtctggagagggccccatgagcaagtttgcccggggcagccgcttctctgtggccgagcaccaggagcgctacaaggaggagtgccagaggatctttgacctgcagaacaaggtgctgagcagcacagaggtgctgagcacagacacagacagcagcagcgcagaagattctgactttgaggagatgggcaagaacatcgagaacatgctgcagaacaagaagaccagcagccagctgagccgggagcgggaggagcaggagaggaaggagctgcagaggatgctgctggccgccggcagcgctgccagcggcaacaaccacagagatgatgacacagcctctgtgaccagcctgaacagcagcgccaccggccgctgcctgaagatctaccgcaccttcagagatgaggagggcaaggagtatgtgcgctgtgagaccgtgaggaagccagctgtgattgatgcctacgtgcgcatccgcaccaccaaggatgaggagttcatcaggaagtttgccctgtttgatgagcagcaccgggaggagatgaggaaggagcggcggcgcatccaggagcagctgcggcggctgaagaggaaccaggagaaggagaagctgaagggccccccagagaagaagcccaagaagatgaaggagaggccagacctgaagctgaagtgtggggcctgtggggccatcggccacatgaggaccaacaagttctgccccctgtactaccagaccaatgccccacccagcaaccctgtggccatgacagaggagcaggaggaggagctggagaagacagtcatccacaatgacaatgaggagctgatcaaggtggagggcaccaagatcgtgctgggcaagcagctgattgagagcgcagatgaggtgcggaggaagagcctggtgctgaagttccccaagcagcagctgccccccaagaagaagagaagagtgggcaccaccgtgcactgtgactacctgaaccggccccacaagagcatccacagaagaagaacagaccccatggtgaccctgagcagcatcctggagagcatcatcaatgacatgagggacctgcccaacacctaccccttccacacccctgtgaatgccaaggtggtgaaggactactacaagatcatcacccggcccatggacctgcagaccctgcgggagaatgtgaggaagaggctgtaccccagccgggaggagttccgggagcacctggagctgattgtgaagaacagcgccacctacaacggccccaagcacagcctgacccagatcagccagagcatgctggacctgtgtgatgagaagctgaaggagaaggaggacaagctggcccggctggagaaggccatcaaccccctgctggatgatgatgaccaggtggccttctccttcatcctggacaacatcgtgacccagaagatgatggctgtgcctgacagctggcccttccaccaccctgtgaacaagaagtttgtgcctgactactacaaggtgattgtgaaccccatggacctggagaccatcaggaagaacatcagcaagcacaagtaccagagccgggagagcttcctggatgatgtgaacctgatcctggccaacagcgtgaagtacaatggacctgagagccagtacaccaagacagcccaggagatcgtgaatgtgtgctaccagaccctgacagaatatgatgagcacctgacccagctggagaaggacatctgcacagccaaggaggccgccctggaggaggccgagctggagagcctggaccccatgaccccaggcccctacaccccccagcccccagacctgtatgacaccaacaccagcctgtccatgagcagagatgcctctgtgttccaggatgagagcaacatgtctgtgctggacatccccagcgccaccccagagaagcaggtgacccagatgaggcagggccggggccgcctgggggaggaggacagtgatgtggacatcgagggctatgatgatgaggaggaggatggcaagcccaagaccccagcccctgagggggaggatggagatggagacctggctgatgaggaggagggcaccgtgcagcagccccaggcctctgtgctgtatgaggacctgctgatgtctgagggggaggatgatgaggaggatgctggcagtgatgaggagggggacaaccccttcagcgccatccagctgtctgagagcggcagtgacagtgatgtgggcagcggcggcatccggcccaagcagcccaggatgctgcaggagaacaccaggatggacatggagaatgaggagagcatgatgtcctatgaaggagatggaggagaggccagccacggcctggaggacagcaacatctcctatggcagctatgaggagccagaccccaagagcaacacccaggacaccagcttcagcagcatcggcggctatgaggtgtctgaggaggaggaggatgaggaggaggaggagcagaggagcggccccagcgtgctgagccaggtgcacctgtctgaagatgaggaggacagcgaggacttccacagcattgctggggacagcgacctggacagtgatgaatag

SEQ ID NO: 277851 - DNA, 5721 bp, Artificial Sequence
  derived and/or modified sequence
atgggccccggctgcgacctgctgctgcggaccgccgccaccatcactgctgccgcaataatgagcgatacggactcggatgaggactccgcagggggagggccatttagtctggccggttttctgttcggcaacattaatggtgccgggcagctggagggggaatccgtcctcgatgatgagtgcaaaaaacatctagccgggttgggcgcactcggccttggctctttgattaccgaattaactgcaaatgaggagctgacgggaacagacggcgcgctggtgaacgacgagggttgggtgcgatcaaccgaggatgctgtcgattattccgatattaatgaggtggcggaagacgagagccgcagatatcagcagacgatgggtagtctccagccgctgtgtcacagtgattatgacgaggatgattatgacgctgactgtgaggatattgactgtaagttgatgcctcctcccccacctccaccggggccaatgaaaaaggataaggaccaggatagtatcacaggagagaaggtcgactttagctcctcatctgacagcgagagcgagatggggccgcaggaagcaactcaagctgaaagcgaggatggtaaactgactctgcccctggctggcatcatgcagcacgacgctacaaaattgctaccgtcagttacagagctgttcccagagttccggcctggtaaggtgctgaggtttctgcgactcttcggtccagggaaaaacgtcccgagtgtgtggagatccgccagacgaaagcgcaagaagaagcacagagaactcattcaggaggaacagatacaggaagtcgaatgtagcgtggagtccgaggtgtcacagaaaagtctatggaactacgattatgccccaccacctccccctgagcagtgcctttccgacgatgagatcacaatgatggctccagtggaatccaagttctctcaatctaccggagacatcgacaaagtcactgataccaagccacgcgtggccgaatggcggtatggtcccgctaggctttggtatgatatgctcggagtgccagaggacggatcagggttcgactacgggtttaaactccgcaagacggaacacgagcctgtgataaaatctcggatgatagaagagtttcggaaactcgaagaaaacaatggaaccgaccttctggctgacgagaacttccttatggtcacacagttacactgggaagacgatatcatttgggacggcgaagacgtcaaacataagggcacaaaaccccagagagctagcctggcaggttggctcccctctagtatgacaaggaacgctatggcttataatgttcagcagggcttcgccgctacattagacgacgacaagccttggtactcaatcttccctatagacaatgaggacctggtgtacggacgctgggaggataacattatttgggacgcccaggcaatgcctcggctcctcgagccacctgtccttacgctggatccaaatgacgaaaacctcatcctagagattcctgacgaaaaagaggaggcaaccagcaactcaccatcaaaggagtccaaaaaggaatcatccttaaagaagtctcggattctgctaggaaaaactggcgttataaaggaggagccacagcagaatatgtcccagcccgaagttaaagacccgtggaatctatcaaatgacgagtactattaccctaaacagcaaggcctcaggggaacatttggaggtaatattatccaacattctatcccggcagtcgagctacggcaacctttctttcctacacacatgggccccatcaaattgcggcagtttcaccggccccctttaaaaaaatacagttttggggccttaagccagcccggcccccatagcgtacagcctctactgaaacatataaagaaaaaggctaaaatgagagaacaggaaagacaggcctctggcggcggggagatgttttttatgcgcaccccccaggatctcacgggaaaggatggggaccttattttggccgagtactcagaagaaaatggcccattgatgatgcaggtaggtatggcgaccaagattaagaactactacaagagaaagcctggcaaggatcctggcgcccctgactgtaagtacggagaaaccgtgtactgtcataccagccctttcttaggcagcttgcatcccggtcaactgcttcaggcatttgagaataacctgtttagggctccgatctacttacacaagatgccagagacagattttttaataatacggactaggcaaggctactacatccgcgagctggtggatatttttgttgtgggccagcagtgtcccctgttcgaggtccccggccctaatagtaagcgggccaacactcacatcagagatttcctccaggtgttcatatatcgcctattctggaagtcaaaagaccgcccaagaagaatccgaatggaggatattaagaaagccttcccatcgcactcagaatcttctatacgaaaacgcctgaaactgtgtgccgattttaaacgcacgggtatggactccaattggtgggtgctcaagtcagacttccgcttgcccaccgaagaggaaattagagccatggtctctcctgagcagtgttgtgcttattacagcatgattgcagccgaacagcgtctgaaggatgcgggttacggagagaagtccttcttcgcccccgaggaggaaaatgaagaggacttccagatgaagatcgatgacgaagttcgcacagctccttggaacaccaccagggcatttatcgcagctatgaagggaaagtgcctgttagaagtgacaggggtggctgacccaactggctgcggagagggattcagctacgtgaaaattcccaacaaacccactcagcaaaaagatgacaaggagccccaacctgtcaaaaagaccgtgaccgggaccgacgcagacttgaggagactgagtctgaagaatgctaagcaactactgcgtaaattcggggttcctgaagaggaaattaagaaactctctcgctgggaggtgatcgatgtggtgcgcaccatgtcaaccgagcaggcccgatcaggagaagggcctatgtcaaaattcgccaggggctcgcgattctctgttgccgagcaccaggaacgctacaaagaagagtgccaacgcatctttgaccttcagaataaggtgctgtcgagcaccgaggtactgtccacagacaccgatagttcttcggcggaagacagtgattttgaggaaatgggcaagaatatcgagaatatgcttcaaaacaagaaaaccagttcacaattgagcagggagagggaagagcaggaacgcaaggaactgcagcgaatgctgcttgccgcaggctcagcggccagcgggaataaccaccgcgacgacgatacagcttcagtgaccagtctgaattcaagcgcgacagggcggtgtctcaaaatctaccgcaccttcagagacgaagagggtaaggagtatgtccgctgcgaaacagtacgaaagccagccgttattgatgcctatgttagaattcgaactacaaaggacgaggagttcatacgaaaatttgccttatttgacgaacaacaccgtgaagaaatgaggaaagaacgcagacggattcaggaacagctccgtcgtttgaagcggaaccaggaaaaggaaaagctcaagggtcctcccgagaaaaagcctaagaaaatgaaagagaggcccgatctgaagctaaagtgtggagcctgtggagcaatcggccacatgcgcacaaataagttctgccctctctattaccaaaccaatgctccacctagcaaccccgtggccatgaccgaagaacaggaggaagagctggagaagaccgtgattcataatgacaacgaggaactgattaaggtcgagggcacaaaaattgtactggggaagcagttgattgagtctgcggatgaggtcaggagaaaatctttggtactgaagtttcctaagcagcaattaccgcccaaaaagaaacgccgagtcggcactacagtccactgtgactatttaaatcggccacacaagagtattcatcggaggaggacagatcccatggtgaccctgtcttccatactggaaagcatcatcaatgacatgcgtgacctgcctaatacatacccttttcacacgcccgtgaacgccaaggtagttaaagactattacaagatcattactaggccgatggatctccagacactgagagaaaacgtcaggaaacggctctatcctagcagggaagagttcagggaacacttggaacttatcgttaagaatagcgcgacctataacggaccaaagcactccttaacacagatctcccagtctatgctggacctttgtgatgaaaagctgaaggagaaagaagacaagctggctaggctggagaaggcaatcaaccctctgctggacgacgatgaccaagtggccttttcttttatattagataatatagtgacacagaagatgatggccgtcccagatagctggcctttccatcaccccgtgaacaaaaagtttgtgccggattactacaaggttattgtgaaccctatggatctggagacaatccgcaagaacatttctaaacacaagtaccagagtagagaaagtttcttagacgacgttaatttgatactggctaacagcgtgaaatacaacggacctgagtcccagtacaccaagaccgcacaggagatagtcaacgtttgttatcagaccttaactgaatacgacgagcaccttacccaacttgaaaaggacatctgcaccgcaaaagaagcagccctggaagaggccgagctggagagtctggaccctatgacacctggaccctatacaccccaaccccccgatctgtacgatactaatactagtctgagcatgtcgagagacgctagcgtgttccaggacgagtccaacatgagcgtgcttgacattccgtctgctactcccgagaaacaggttactcagatgcgccaaggcaggggccgactgggcgaggaggacagtgatgtggacatcgaaggatatgacgatgaggaagaggatgggaagccgaaaaccccagcacccgaaggggaagatggcgatggagacttggctgatgaggaggaaggtactgtacaacagcctcaggcctcagtcctctacgaggacctcctgatgtccgagggtgaagacgatgaggaggacgcgggcagtgatgaggaaggtgataatcctttcagtgcaatccagctcagtgagtcaggctcagattctgacgtaggatcaggaggaatcagacctaaacagccacgaatgctccaagaaaatacaagaatggatatggagaatgaggaatccatgatgtcttatgaaggtgatggaggcgaggcttcccatggtctcgaggacagcaatatatcctatggcagctacgaggaaccagatccgaaatctaacactcaggatacatccttctccagcattggaggctacgaggtgagcgaggaggaagaggacgaggaggaggaggagcagagatctggaccatccgtgctgtcccaggtccacctgagcgaagatgaggaggacagtgaggactttcactcaatcgcaggggacagcgatctcgatagcgacgaatag

SEQ ID NO: 277852 - DNA, 5720 bp, Artificial Sequence
  derived and/or modified sequence
atgggacctggttgtgatctcctgcttcgcaccgctgcaactattactgccgcagcgattatgtctgatacagacagcgatgaagattctgcgggaggcggtccctttagcctcgctgggtttttgtttgggaatatcaacggggctgggcagctggagggcgagagtgttttagatgacgaatgcaaaaagcatctggcaggtcttggggctttgggcttaggaagcctgattaccgaactgacggctaacgaggaactcacggggaccgacggtgctctggttaacgacgaagggtgggtgcggtcaaccgaagacgcagtagactatagtgacatcaacgaagtggccgaggacgagtccaggcgctaccagcagactatgggctcgttacagcctttatgtcacagtgactatgacgaggacgactatgatgccgattgcgaggatatcgactgcaagctcatgccacctcctccacctccacctggtcctatgaagaaggataaggatcaagactcgataaccggggaaaaagtggatttctcgtctagctctgactccgaatctgaaatgggtccacaggaggctacacaggccgaaagcgaggacggaaagctcacactccctcttgccggaataatgcaacacgatgccaccaaactgctcccttctgtaacagagctcttccctgagtttcggccaggcaaagtccttaggttcttgcggctgtttggaccaggcaagaatgtgcccagcgtgtggcgttcagccagacgaaagaggaagaaaaaacacagagagctgattcaagaggagcagatccaggaggtggagtgctccgtcgagagcgaagtgtcacagaagtccctttggaattacgactatgctccgcctccccctccggaacagtgtttgagtgatgacgaaatcacaatgatggctccggtggagtccaagttcagtcagtcaacaggagacattgacaaagtaacagacaccaagcctagggtggccgaatggagatacgggcctgccaggctatggtacgacatgctgggtgttcccgaggacggctccgggttcgattatggctttaagctgcgaaagacagagcacgaaccggtcattaaatcccgtatgattgaagaatttcgcaaattagaagaaaacaacggtaccgatctactagcagacgagaatttcctcatggtaacacaattgcactgggaggatgatatcatatgggatggagaggacgtgaaacacaagggaaccaagccccagagggcgtccctcgctggctggctcccctcaagcatgacccgcaacgctatggcctataatgtccagcagggattcgctgctaccctggatgacgataagccctggtacagcattttccctatagataacgaagacctggtgtacgggcgatgggaggataacattatctgggacgcccaggcaatgccacgcttacttgagccaccagtgctcacactcgatccaaacgacgagaacttgatcctcgagatcccagacgaaaaggaagaagcaacatctaactctccgtccaaagagtcaaagaaagaatcatctttgaaaaaatccaggattctcctcggaaagacaggggtaattaaggaggaacctcagcagaatatgtcacaaccagaagtcaaagacccttggaatttaagcaacgacgaatactattatcccaaacagcagggattaagaggaacattcgggggaaatataatccagcatagcattcctgcagtggagctcaggcagcctttttttcccacccacatggggcctataaagctacgtcagttccaccggcctccgctgaagaaatattcttttggcgcactctcacagccgggtccccactccgtgcagcccctgttaaagcatatcaagaagaaggccaagatgagggagcaagagcgtcaggcttctggaggtggtgagatgtttttcatgcggacccctcaggacctgacaggcaaagatggcgatttaatccttgccgagtacagtgaggagaatggaccactgatgatgcaggtgggtatggccactaagattaagaactactataagcggaaaccgggtaaagaccctggagccccagactgcaagtacggggagaccgtgtactgtcatacatcaccgtttctgggatccctgcaccctggacagcttctccaagcctttgaaaataaccttttccgagcccctatctacttgcacaagatgcccgagaccgacttcctgataataaggacaagacaaggatattatatacgggagctggtggacatattcgtcgttggccagcagtgtccactgttcgaggtccccggacccaactccaagagagctaacacacacatacgagatttcctgcaggtttttatataccgcctgttttggaaaagcaaagacagacccagaagaataaggatggaggatatcaagaaggcgttcccttcccactcggagagtagcattaggaaaaggcttaaactgtgcgctgacttcaaacggactggtatggattcaaactggtgggttctcaaatcagactttcgcctgcctaccgaggaagagatcagggctatggtgtcgcctgagcagtgctgtgcttactacagcatgatcgccgcagaacagaggttgaaggacgctggttatggcgaaaaatctttctttgcacctgaagaggagaacgaggaggactttcagatgaaaatagacgatgaggtcaggacagcgccttggaacacgacacgagccttcatcgctgccatgaaaggcaaatgcctgctggaagtaactggggtagccgatcccaccggctgtggtgaaggtttctcttacgtaaagattcctaataaaccgactcaacaaaaagatgacaaggagccacagcccgtgaagaaaactgttaccgggaccgacgcagatttacgcaggttgtccctgaagaacgctaagcagctgctgcgtaaattcggtgtgcccgaggaagagattaaaaagttgtctcgctgggaagtcatcgatgttgttagaactatgagcactgagcaggcacgttcaggggaaggtcccatgtccaaattcgcccgaggcagcaggttctccgttgcagaacatcaggagaggtataaggaggagtgccaaagaatcttcgatctgcagaataaagtgctgtcctctacggaggtgttgtctactgacaccgactcgtcctctgctgaggatagcgacttcgaagagatgggcaagaacatagagaacatgctacaaaacaagaaaacctcatcacagctatccagggagcgcgaggagcaggagagaaaagagcttcaacgcatgcttctagcagcgggatccgctgcctccggcaataaccaccgtgacgatgacaccgctagtgtgacctcactgaacagctctgcaaccgggagatgccttaaaatctatcggaccttcagggatgaggaagggaaagagtacgttaggtgcgaaaccgtcaggaaacccgctgttattgatgcctacgtccggatcaggaccaccaaagatgaggagttcatccgcaagtttgccctgtttgacgaacagcatagggaggagatgcgcaaggagcgcagacgcatccaggagcagctaaggcggttgaagcgcaaccaggagaaggagaagcttaaaggaccccctgagaaaaaacccaagaaaatgaaggagcgcccagatttgaaacttaaatgtggggcttgtggcgctatcggacacatgagaactaacaaattctgcccactgtactaccaaaccaatgcaccaccctccaacccggtggccatgaccgaggaacaggaagaggagctggagaagactgtaattcataacgacaatgaagaacttattaaggtggaggggacaaaaatagtgttgggcaaacagcttatcgaatccgctgatgaggtgaggaggaaatcacttgtgctgaaatttccaaagcagcagctgccacccaagaagaagcgcagagtggggactacggtccattgcgactacttgaaccgaccacataagtcaatccatcgcaggagaactgatcctatggttaccctgtcatcgatcttagaatcaattataaacgatatgagagaccttcccaatacatatcctttccacacccctgtaaacgcgaaggtcgttaaggattattataaaatcattacccgcccaatggatctgcagactctgcgggagaacgtgcggaagcggttgtatccctcaagagaagaatttagggagcatctcgaactgatcgtgaaaaactcggccacgtataatggtcctaagcattctcttactcagatttcacaaagcatgctcgacctgtgtgatgaaaagcttaaggagaaggaagacaaactcgctcgcctcgagaaggctattaacccgctattggacgatgacgaccaggtcgcctttagctttattctcgataatatagttacacaaaaaatgatggcagtgccggacagctggccattccatcaccccgtgaacaagaagtttgttccagactactacaaggtgatcgtgaaccctatggatctcgagaccattcgtaaaaatatcagtaagcataagtatcaaagtagagagagcttcttagatgacgtaaacttgatcttggccaacagtgtaaaatacaatggacccgagtcccagtacacaaaaaccgctcaggaaatagtcaacgtgtgttatcagaccctgactgagtacgacgagcacctgacgcagctggagaaggacatatgcaccgcaaaggaggctgcactggaggaggcagagcttgaatctcttgaccccatgacccccggaccctacactccacagccacctgatctgtacgacaccaatacctcgctgtcaatgagtcgcgatgcatccgtgttccaggatgaaagcaatatgtccgtgctcgatatcccatcagccaccccagaaaaacaggtgactcagatgcggcaaggccgaggtagactgggagaagaagacagcgacgtggacatcgagggctatgacgacgaggaagaggacgggaaaccaaaaactccggctcctgaaggggaggacggtgacggggatctcgctgatgaggaggaggggacagttcaacaaccccaagcctcagtcctctacgaggatcttctgatgagcgaaggagaagacgatgaggaagacgcaggttcggacgaagagggggacaaccctttcagcgcaatacagctgtcagaaagcggaagtgatagcgacgtgggaagcggaggcatccgccctaaacaaccacgtatgctgcaggagaacacaagaatggatatggagaacgaagaaagcatgatgtcatatgaaggggacggaggagaagcctcccacggtctggaggacagtaacatttcctatggatcctacgaagagccggacccgaaaagcaacactcaagatacaagtttttcaagcatcggaggatacgaggttagcgaggaggaagaggatgaagaggaggaggaacagagatccggcccttccgtgctgagtcaggtgcacctgtccgaagatgaagaggacagtgaggactttcactccattgccggagatagtgaccttgattccgacgaata

SEQ ID NO: 277853 - DNA, 7708 bp, Artificial Sequence
  derived and/or modified sequence
aagggagctcagtaagtcacttctgggcgactgttgttttatttccggtctatgggacccggctgcgatttgctgctgcggacagcagctaccatcactgctgccgccatcatgtcagacacggacagcgacgaagattccgctggaggcggcccattttctttagcgggtttccttttcggcaacatcaatggagccgggcagctggagggggaaagcgtcttggatgatgaatgtaagaagcacttggcaggcttgggggctttggggctgggcagcctgatcactgaactcacggcaaatgaagaattgaccgggactgacggtgccttggtaaatgatgaagggtgggttaggagtacagaagatgctgtggactattcagacatcaatgaggtggcagaagatgaaagccgaagataccagcagacgatggggagcttgcagcccctttgccactcagattatgatgaagatgactatgatgctgattgtgaagacattgattgcaagttgatgcctcctccacctccacccccgggaccaatgaagaaggataaggaccaggattctattactggtgagaaagtggacttcagtagttcctctgactcagaatctgagatgggacctcaggaagcaacacaggcagaatctgaagatggaaagctgacccttccattggctgggattatgcagcatgatgccaccaagctgttgccaagtgtcacagaactttttccagaatttcgacctggaaaggtgttacgttttctacgtctttttggaccagggaagaatgtcccatctgtttggcggagtgctcggagaaagaggaagaagaagcaccgtgagctgatacaggaagagcagatccaggaggtggagtgctcagtagaatcagaagtcagccagaagtctttgtggaactacgactacgctccaccaccacctccagagcagtgtctctctgatgatgaaatcacgatgatggctcctgtggagtccaaattttcccaatcaactggagatatagataaagtgacagataccaaaccaagagtggctgagtggcgttatgggcctgcccgactgtggtatgatatgctgggtgtccctgaagatggcagtgggtttgactatggcttcaaactgagaaagacagaacatgaacctgtgataaaatctagaatgatagaggaatttaggaaacttgaggaaaacaatggcactgatcttctggctgatgaaaacttcctgatggtgacacagctgcattgggaggatgatatcatctgggatggggaggatgtcaaacacaaagggacaaaacctcagcgtgcaagcctggcaggctggcttccttctagcatgactaggaatgcgatggcttacaatgttcagcaaggttttgcagccactcttgatgatgacaaaccttggtactccatttttcccattgacaatgaggatctggtatatggacgctgggaggacaatatcatttgggatgctcaggccatgccccggctgttggaacctcctgttttgacacttgatcccaatgatgagaacctcattttggaaattcctgatgagaaggaagaggccacctctaactccccctccaaggagagtaagaaggaatcatctctgaagaagagtcgaattctcttagggaaaacaggagtcatcaaggaggaaccacagcagaacatgtctcagccagaagtgaaagatccatggaatctctccaatgatgagtattattatcccaagcaacagggtcttcgaggcacctttggagggaatattatccagcattcaattcctgctgtggaattacggcagcccttctttcccacccacatggggcccatcaaactccggcagttccatcgcccacctctgaaaaagtactcatttggtgcactttctcagccaggtccccactcagtccaacctttgctaaagcacatcaaaaaaaaggccaagatgagagaacaagagaggcaagcttcaggtggtggagagatgttttttatgcgcacacctcaggacctcacaggcaaagatggtgatcttattcttgcagaatatagtgaggaaaatggacccttaatgatgcaggttggcatggcaaccaagataaagaactattataaacggaaacctggaaaagatcctggagcaccagattgtaaatatggggaaactgtttactgccatacatctcctttcctgggttctctccatcctggccaattgctgcaagcatttgagaacaacctttttcgtgctccaatttatcttcataagatgccagaaactgatttcttgatcattcggacaagacagggttactatattcgggaattagtggatatttttgtggttggccagcagtgtcccttgtttgaagttcctgggcctaactccaaaagggccaatacgcatattcgagactttctacaggtttttatttaccgccttttctggaaaagtaaagatcggccacggaggatacgaatggaagatataaaaaaagcctttccttcccattcagaaagcagcatccggaagaggctaaagctctgcgctgacttcaaacgcacagggatggactcaaactggtgggtgcttaagtctgattttcgtttaccaacggaagaagagatcagagctatggtgtcaccagagcagtgctgtgcttattatagcatgatagctgcagagcaacgactgaaggatgctggctatggtgagaaatccttttttgctccagaagaagaaaatgaggaagatttccagatgaagattgatgatgaagttcgcactgccccttggaacaccacaagggccttcattgctgccatgaagggcaagtgtctgctagaggtgactggggtggcagatcccacggggtgtggtgaaggattctcctatgtgaagattccaaacaaaccaacacagcagaaggatgataaagaaccgcagccagtgaagaagacagtgacaggaacagatgcagaccttcgtcgcctttccctgaaaaatgccaagcaacttctacgtaaatttggtgtgcctgaggaagagattaaaaagttgtcccgctgggaagtgattgatgtggtgcgcacaatgtcaacagaacaggctcgttctggagaggggcccatgagtaaatttgcccgtggatcaaggttttctgtggctgagcatcaagagcgttacaaagaggaatgtcagcgcatctttgacctacagaacaaggttctgtcatcaactgaagtcttatcaactgacacagacagcagctcagctgaagatagtgactttgaagaaatgggaaagaacattgagaacatgttgcagaacaagaaaaccagctctcagctttcacgtgaacgggaggaacaggagcggaaggaactacagcgaatgctactggcagcaggctcagcagcatccggaaacaatcacagagatgatgacacagcttccgtgactagccttaactcttctgccactggacgctgtctcaagatttatcgcacgtttcgagatgaagaggggaaagagtatgttcgctgtgagacagtccgaaaaccagctgtcattgatgcctatgtgcgcatacggactacaaaagatgaggaattcattcgaaaatttgccctttttgatgaacaacatcgggaagagatgcgaaaagaacggcggaggattcaagagcaactgaggcggcttaagaggaaccaggaaaaggagaagcttaagggtcctcctgagaagaagcccaagaaaatgaaggagcgtcctgacctaaaactgaaatgtggggcatgtggtgccattggacacatgaggactaacaaattctgccccctctattatcaaacaaatgcgccaccttccaaccctgttgccatgacagaagaacaggaggaggagttggaaaagacagtcattcataatgataatgaagaacttatcaaggttgaagggaccaaaattgtcttggggaaacagctaattgagagtgcggatgaggttcgcagaaaatctctggttctcaagtttcctaaacagcagcttcctccaaagaagaaacggcgagttggaaccactgttcactgtgactatttgaatagacctcataagtccatccaccggcgccgcacagaccctatggtgacgctgtcgtccatcttggagtctatcatcaatgacatgagagatcttccaaatacataccctttccacactccagtcaatgcaaaggttgtaaaggactactacaaaatcatcactcggccaatggacctacaaacactccgcgaaaacgtgcgtaaacgcctctacccatctcgggaagagttcagagagcatctggagctaattgtgaaaaatagtgcaacctacaatgggccaaaacactcattgactcagatctctcaatccatgctggatctctgtgatgaaaaactcaaagagaaagaagacaaattagctcgcttagagaaagctatcaaccccttgctggatgatgatgaccaagtggcgttttctttcattctggacaacattgtcacccagaaaatgatggcagttccagattcttggccatttcatcacccagttaataagaaatttgttccagattattacaaagtgattgtcaatccaatggatttagagaccatacgtaagaacatctccaagcacaagtatcagagtcgggagagctttctggatgatgtaaaccttattctggccaacagtgttaagtataatggacctgagagtcagtatactaagactgcccaggagattgtgaacgtctgttaccagacattgactgagtatgatgaacatttgactcaacttgagaaggatatttgtactgctaaagaagcagctttggaggaagcagaattagaaagcctggacccaatgaccccagggccctacacgcctcagcctcctgatttgtatgataccaacacatccctcagtatgtctcgagatgcctctgtatttcaagatgagagcaatatgtctgtcttggatattcccagtgccactccagaaaagcaggtaacacagatgcgccagggccgaggtaggctgggcgaggaagactctgatgtagatattgaagggtatgatgatgaggaggaggatgggaaacctaagactccagccccagaaggtgaagatggagatggtgatcttgcagatgaagaggaaggaactgtacaacagcctcaagccagtgtcctgtatgaggatttgcttatgtctgaaggagaagatgatgaggaagatgctgggagtgatgaagaaggagacaatcctttctctgctatccagctgagtgaaagtggaagtgactctgatgtgggatctggtggaataagacccaaacaaccccgcatgcttcaggagaacacaaggatggacatggaaaatgaagaaagcatgatgtcctatgagggagacggtggggaggcttcccatggtttggaggatagcaacatcagttatgggagctatgaggagcctgatcccaagtcgaacacccaagacacaagcttcagcagcatcggtgggtatgaggtatcagaggaggaagaagatgaggaggaggaagagcagcgctctgggccgagcgtactaagccaggtccacctgtcagaggacgaggaggacagtgaggatttccactccattgctggggacagtgacttggactctgatgaatgaggcttcctttgggcctccttggtcagccttccctgttctccagcctaggtggttcacctttccccaatttgttcatatttgtacagtatctgatcctgaaatcatgaaattaactaacaccttagcctttttaaaagtagtaagtaaatgataataaatcacctctcctaatcttcctggggcaatgtcaccctttgatttaaaacaaagcaaccccctttcccctaccactacggaaaagagcaagctcatttttccgtgtcctcctttatttaactccatttattgcttttggtataatttttccctggggaaggaggggaaattatgaaagaactagtaactttatgtcctcttgatgtattaggaaatttccggccaggcgtggtggctcacacctgtaatctcagcactctgggaggccgaggcgggcagatcacctgaggtcagaagttcgagaccagcttggccaacatggcgaaaccgcatctctactaaaaatacaaaaattagccaggtgtggtggcgtatgcctgttaatcctagctactcgggaggctgaggcaggagaattacttgaacccgggaggcagaggttgcagtgagtggaggtcacgccactgcactccagcctgggcgaaagagtgagattcagtctcaaaaaaaaaaaaatttccaagcatggtatcatctcacttttctaatttacaggctggagcagatgagagccctcctgctgggacagagaattgggttctagtggactctgtgctacacttaaacctgtgagacaaaccgcccattattttattatttaattatgcaatgcctagttcctaaatggattggaggcaaattaccgtaaattttgaaacagcctatatgtcagaaatgataatgttgccacctaaatgttttctgtcccccccaccctccccaggggaaatggtaggaaaatggtaagtttcttagggcaaagactgtgtcttctgtttcttttcatgcttaggatatggttctgtgcatagtaggtactcagtaaatgttcctagaatcataaaatcctcaacagatatgttactgagcatctgcttttcatgataagcactctatcagatccttgggatgcaaaggtaaataagacaaatcccttttacccaaagagctcaccatcaagttgggggagggaaagtggaattcaaaacatgttaataaatcatcatagtactgtgagataagtgcaattaagaagctagttataaagtataggggaaatagaggagtaatcatgtctgaaaagtcaggaaagtcttcctagaggtaatttttaagctgattgttttagaattagtagaagcttgccagatggaaaagtccaggcaaagtgtaacatgaatgggaaaggccacagtctagaaatggcagagtgtgttcctagtttgtttgtttgtttgtttgtacctgccttgttccaggaaggatttaatgtggtttatattccagtcctttaatgctggaagggctgagatgagactgaaagatgggcaggaagtatatcatcacaagctttgtgtttgatgttaatgtgtatgatttttatattatgggaaataagctcttagaggagtgatataatcaggtttgtgttttagaaatctgtgtaatgaatgaatgaagaaagaaattgaagaatcatgtaacatatgtgatcgcatttttgtaaaagaaccatgtgtgtttatatgtgtttatatatatacttgtgtatgcaaaggtaaaagtctgaaaggatatatgctaactgttcacaatgataaccccccaggaatgggattggaggggagggggcttctgtgtttgttatgtatgctgggtgggatattgtgcttttatttctatattgtttgaatttttttacagtatgtattatttttgt

SEQ ID NO: 277854 - protein, 291 aa, Artificial Sequence
  derived and/or modified sequence
MSWESGAGPGLGSQGMDLVWSAWYGKCVKGKGSLPLSAHGIVVAWLSRAEWDQVTVYLFCDDHKLQRYALNRITVWRSRSGNELPLAVASTADLIRCKLLDVTGGLGTDELRLLYGMALVRFVNLISERKTKFAKVPLKCLAQEVNIPDWIVDLRHELTHKKMPHINDCRRGCYFVLDWLQKTYWCRQLENSLRETWELEEFREGIEEEDQEEDKNIVVDDITEQKPEPQDDGKSTESDVKADGDSKGSEEVDSHCKKALSHKELYERARELLVSYEEEQFTGGCAGCFSG

SEQ ID NO: 277855 - DNA, 600 bp, Artificial Sequence
  derived and/or modified sequence
atgctgcccgtgcagcggcggaagctggaccccctgctgaagaagtatagacaccacaagaaggcaacccgaaccaagagacgccggaaagagaagatggaagcccagtgctcccctgtacctcctaccccaagcacgccaccccagtccgaggaggatgaggctgttgacaagaagccgacgctgttgtccgcacaggaagacactcctgatctccttcatgaggatagactgcaatatttacaggaagaaggcagtggcgtaatgcatcaagagtgtcagattcagagttgtgaacttagcgtggcacagaagccccggcctagctccccagccgtcaccagtctcgctagccccccgttgtgtttcggttcctttttgagctgcgtctgccagacattctctagatctcggaaacaaaaaccgcctaggcgaaaagggaataatcaggctgaggccgggggcgacgcagaggtgctgaggccgggtcccgccaagccagagctgtctctgagcaagacctgcagccatttgaagtcaatcgaactgtcattcgtgttttcatttatcgtcctttcagtctgtcattgctcctcctag

SEQ ID NO: 277856 - DNA, 876 bp, Artificial Sequence
  derived and/or modified sequence
atgagttgggagtcaggggccggacccggcctgggatcgcagggcatggacttggtctggagtgcatggtacgggaagtgcgtcaagggtaaagggtctctgcccttgagcgcacacggcattgtagttgcatggttatctagggcagaatgggaccaggtgactgtgtatctgttttgcgacgatcataaactgcaaaggtacgctttaaaccgaattacagtctggcgctcccggagcggcaatgagctgccgcttgccgtcgcttccactgcggatttgatccggtgcaaactcctcgacgtgacagggggattaggaaccgacgagctgcgattgctttacggcatggccctggtacggtttgtgaatctgatttctgagcgaaaaactaaattcgccaaggtgcccctgaagtgcctagcacaggaggtgaacatacctgattggatagtggatcttcgtcatgaactaacccataagaagatgccacacataaacgactgccgaaggggatgttattttgttcttgattggctacaaaagacctactggtgccgccagcttgagaatagcctgcgagaaacatgggagctggaggagttccgtgaaggaattgaagaggaagatcaggaggaagataagaacattgtggtggatgacatcaccgaacagaagcccgagcctcaagacgatggcaagagcacagagagcgacgtgaaagccgatggtgacagcaagggctccgaagaagttgacagtcactgcaagaaagccctgtcccacaaagaactgtatgagcgcgcacgggagctgcttgtgagttacgaggaggagcagttcacaggcggctgtgccggatgtttctcagggtag

SEQ ID NO: 277857 - DNA, 876 bp, Artificial Sequence
  derived and/or modified sequence
atgtcctgggagagcggggccggccctggcctgggcagccagggcatggacctggtgtggagcgcctggtacggcaaatgtgtgaagggcaagggcagcctgcccctgagcgcccatggaattgtggtggcctggctgagcagagctgagtgggaccaggtgacagtgtacctgttctgtgatgaccacaagctgcagagatatgccctgaaccgcatcaccgtgtggaggagccgctctggaaatgagctgcccctggccgtggccagcacagctgacctgatccgctgcaagctgctggatgtgactggaggcctgggcacagatgagctgcggctgctgtatggcatggccctggtgcgctttgtgaacctgatcagcgagaggaagaccaagtttgccaaggtgcccctgaagtgcctggcccaggaggtgaacatcccagactggatcgtggacctgcggcatgagctgacccacaagaagatgccccacatcaatgactgccggcggggctgctactttgtgctggactggctgcagaagacctactggtgccggcagctggagaacagcctgcgggagacctgggagctggaggagttccgggagggcatcgaggaggaggaccaggaggaggacaagaacatcgtggtggatgacatcacagagcagaagccagagccccaggatgatggcaagagcacagaaagtgatgtgaaggcagatggagacagcaaaggaagtgaggaggtggacagccactgcaagaaggccctgagccacaaggagctgtatgaaagagcccgggagctgctggtgtcctatgaggaggagcagttcaccggcggctgtgccggctgcttcagcggctag

SEQ ID NO: 277858 - DNA, 876 bp, Artificial Sequence
  derived and/or modified sequence
atgagctgggagagcggcgccggccccggcctgggcagccagggcatggatctggtttggtctgcctggtatgggaagtgcgtcaaggggaaaggctctcttcccctgtctgcacacgggatagtagtcgcctggctttcccgcgccgagtgggatcaggtcacagtgtatctgttttgtgacgatcacaagttgcaaagatatgccctcaataggattaccgtgtggcgctctcgtagtgggaatgagctacccctggctgtggcgagcaccgctgacctgatccgttgtaagcttctcgacgtaaccggcggccttggaacagacgaactgcgactgctatacggtatggctctcgtcagatttgtgaatctcatctcagagagaaagaccaagttcgctaaggtgcctttaaagtgcctggcacaggaggtgaatatacccgactggattgtcgacctgcggcacgagttgacacacaaaaagatgccacatatcaacgactgcaggcgaggctgctacttcgtcctcgattggcttcagaaaacttactggtgccgacagcttgagaactccctgcgggagacctgggaactggaggagttcagggagggaatcgaagaggaagaccaggaggaagacaaaaacattgttgtggatgatattacagaacagaagcctgagccccaggacgacggcaaatccacagaaagtgatgtgaaggctgatggggatagcaaaggtagtgaggaggtcgatagtcattgtaaaaaagctctctcccacaaggaactctatgagagggctcgggaactgttggtgtcatatgaggaggagcaattcaccggggggtgtgcgggctgtttcagtggatag

SEQ ID NO: 277859 - DNA, 876 bp, Artificial Sequence
  derived and/or modified sequence
atgagctgggagagtggagctgggccaggcctcggtagtcagggaatggacctggtgtggagcgcctggtatggaaaatgtgtgaaagggaaagggtccctgccgctgagtgcacacgggatcgtggtagcctggctctctcgggctgagtgggatcaggtgaccgtgtacctgttttgcgatgaccacaagttgcagcgttacgctctcaacagaattacggtgtggcggagcaggtccgggaacgaactaccactagccgtcgcttccaccgctgacttgatcagatgcaagcttttggacgtcacaggaggacttgggacagacgagcttcggctgctttacggcatggctctggtgcggttcgtaaacctgattagtgagaggaaaaccaagttcgctaaggtgcctttaaagtgcctggcccaggaggtgaacatacctgattggatcgtggacctccggcacgagctcacccacaagaagatgccgcacattaatgactgtcgccgtggttgctactttgtcctcgactggttgcaaaagacatattggtgcaggcagttagagaactcacttagggagacatgggagcttgaagagttccgagaaggcattgaggaggaggatcaggaagaggacaaaaacatcgtggtggatgatattacggagcaaaaacctgagcctcaagatgacgggaaatccaccgagtctgatgtgaaggctgatggcgattccaaaggttctgaagaagtcgactcgcactgtaaaaaggcattgtcccataaggagctgtatgagcgggctcgcgagttactggtgtcttatgaagaagaacagttcacaggcggatgcgctggatgcttttctggttag

SEQ ID NO: 277860 - DNA, 876 bp, Artificial Sequence
  derived and/or modified sequence
atgagctgggagagcggcgccggccccggcctgggcagccagggcatggacctggtgtggagcgcctggtacggcaagtgcgtgaagggcaagggcagcctgcccctgagcgcccacggcatcgtggtggcctggctgagcagagccgagtgggaccaggtgaccgtgtacctgttctgcgacgaccacaagctgcagagatacgccctgaacagaatcaccgtgtggagaagcagaagcggcaacgagctgcccctggccgtggccagcaccgccgacctgatcagatgcaagctgctggacgtgaccggcggcctgggcaccgacgagctgagactgctgtacggcatggccctggtgagattcgtgaacctgatcagcgagagaaagaccaagttcgccaaggtgcccctgaagtgcctggcccaggaggtgaacatccccgactggatcgtggacctgagacacgagctgacccacaagaagatgccccacatcaacgactgcagaagaggctgctacttcgtgctggactggctgcagaagacctactggtgcagacagctggagaacagcctgagagagacctgggagctggaggagttcagagagggcatcgaggaggaggaccaggaggaggacaagaacatcgtggtggacgacatcaccgagcagaagcccgagccccaggacgacggcaagagcaccgagagcgacgtgaaggccgacggcgacagcaagggcagcgaggaggtggacagccactgcaagaaggccctgagccacaaggagctgtacgagagagccagagagctgctggtgagctacgaggaggagcagttcaccggcggctgcgccggctgcttcagcggctag

SEQ ID NO: 277861 - protein, 52 aa, Artificial Sequence
  derived and/or modified sequence
MPLLDVFWSCFRKVKCFPLLQVKKNAEAEAKRACEWLQATGFPQYVQLFEGG

SEQ ID NO: 277862 - DNA, 159 bp, Artificial Sequence
  derived and/or modified sequence
atgcccctgctggacgtgttctggagctgcttcagaaaggtgaagtgcttccccctgctgcaggtgaagaagaacgccgaggccgaggccaagagagcctgcgagtggctgcaggccaccggcttcccccagtacgtgcagctgttcgagggcggctag

SEQ ID NO: 277863 - DNA, 159 bp, Artificial Sequence
  derived and/or modified sequence
atgccattacttgacgtattctggtcctgcttccgcaaagtcaagtgctttcccctcttgcaggtgaagaagaacgccgaggctgaagctaaaagagcctgcgagtggcttcaggcaacaggcttccctcagtacgtccaattattcgaaggggggtag

SEQ ID NO: 277864 - DNA, 159 bp, Artificial Sequence
  derived and/or modified sequence
atgcccctgctggatgtgttctggagctgcttcaggaaggtgaagtgcttccccctgctgcaggtgaagaagaatgctgaggccgaggccaagagggcctgtgagtggctgcaggccaccggcttcccccagtatgtgcagctgtttgaaggaggatag

SEQ ID NO: 277865 - DNA, 159 bp, Artificial Sequence
  derived and/or modified sequence
atgcccctgctggacgtgttctggagctgcttccggaaggtgaagtgctttcccctgctccaggtcaaaaagaacgctgaagcagaagccaagagagcatgtgagtggttacaggctacagggttcccccaatacgttcaacttttcgaaggagggtag

SEQ ID NO: 277866 - DNA, 159 bp, Artificial Sequence
  derived and/or modified sequence
atgcccttacttgacgtgttctggagctgctttaggaaggtaaagtgctttcccctcttgcaggtgaaaaagaatgccgaggctgaggccaagcgggcatgtgagtggctccaggcgactggctttcctcaatatgtccagctgtttgaaggagggtag

SEQ ID NO: 277867 - protein, 2180 aa, Artificial Sequence
  derived and/or modified sequence
MAAFGILSYEHRPLKRPRLGPPDVYPQDPKQKEDELTALNVKQGFNNQPAVSGDEHGSAKNVSFNPAKISSNFSSIIAEKLRCNTLPDTGRRKPQVNQKDNFWLVTARSQSAINTWFTDLAGTKPLTQLAKKVPIFSKKEEVFGYLAKYTVPVMRAAWLIKMTCAYYAAISETKVKKRHVDPFMEWTQIITKYLWEQLQKMAEYYRPGPAGSGGCGSTIGPLPHDVEVAIRQWDYTEKLAMFMFQDGMLDRHEFLTWVLECFEKIRPGEDELLKLLLPLLLRYSGEFVQSAYLSRRLAYFCTRRLALQLDGVSSHSSHVISAQSTSTLPTTPAPQPPTSSTPSTPFSDLLMCPQHRPLVFGLSCILQTILLCCPSALVWHYSLTDSRIKTGSPLDHLPIAPSNLPMPEGNSAFTQQVRAKLREIEQQIKERGQAVEVRWSFDKCQEATAGFTIGRVLHTLEVLDSHSFERSDFSNSLDSLCNRIFGLGPSKDGHEISSDDDAVVSLLCEWAVSCKRSGRHRAMVVAKLLEKRQAEIEAERCGESEAADEKGSIASGSLSAPSAPIFQDVLLQFLDTQAPMLTDPRSESERVEFFNLVLLFCELIRHDVFSHNMYTCTLISRGDLAFGAPGPRPPSPFDDPADDPEHKEAEGSSSSKLEDPGLSESMDIDPSSSVLFEDMEKPDFSLFSPTMPCEGKGSPSPEKPDVEKEVKPPPKEKIEGTLGVLYDQPRHVQYATHFPIPQEESCSHECNQRLVVLFGVGKQRDDARHAIKKITKDILKVLNRKGTAETDQLAPIVPLNPGDLTFLGGEDGQKRRRNRPEAFPTAEDIFAKFQHLSHYDQHQVTAQVSRNVLEQITSFALGMSYHLPLVQHVQFIFDLMEYSLSISGLIDFAIQLLNELSVVEAELLLKSSDLVGSYTTSLCLCIVAVLRHYHACLILNQDQMAQVFEGLCGVVKHGMNRSDGSSAERCILAYLYDLYTSCSHLKNKFGELFSDFCSKVKNTIYCNVEPSESNMRWAPEFMIDTLENPAAHTFTYTGLGKSLSENPANRYSFVCNALMHVCVGHHDPDRVNDIAILCAELTGYCKSLSAEWLGVLKALCCSSNNGTCGFNDLLCNVDVSDLSFHDSLATFVAILIARQCLLLEDLIRCAAIPSLLNAACSEQDSEPGARLTCRILLHLFKTPQLNPCQSDGNKPTVGIRSSCDRHLLAASQNRIVDGAVFAVLKAVFVLGDAELKGSGFTVTGGTEELPEEEGGGGSGGRRQGGRNISVETASLDVYAKYVLRSICQQEWVGERCLKSLCEDSNDLQDPVLSSAQAQRLMQLICYPHRLLDNEDGENPQRQRIKRILQNLDQWTMRQSSLELQLMIKQTPNNEMNSLLENIAKATIEVFQQSAETGSSSGSTASNMPSSSKTKPVLSSLERSGVWLVAPLIAKLPTSVQGHVLKAAGEELEKGQHLGSSSRKERDRQKQKSMSLLSQQPFLSLVLTCLKGQDEQREGLLTSLYSQVHQIVNNWRDDQYLDDCKPKQLMHEALKLRLNLVGGMFDTVQRSTQQTTEWAMLLLEIIISGTVDMQSNNELFTTVLDMLSVLINGTLAADMSSISQGSMEENKRAYMNLAKKLQKELGERQSDSLEKVRQLLPLPKQTRDVITCEPQGSLIDTKGNKIAGFDSIFKKEGLQVSTKQKISPWDLFEGLKPSAPLSWGWFGTVRVDRRVARGEEQQRLLLYHTHLRPRPRAYYLEPLPLPPEDEEPPAPTLLEPEKKAPEPPKTDKPGAAPPSTEERKKKSTKGKKRSQPATKTEDYGMGPGRSGPYGVTVPPDLLHHPNPGSITHLNYRQGSIGLYTQNQPLPAGGPRVDPYRPVRLPMQKLPTRPTYPGVLPTTMTGVMGLEPSSYKTSVYRQQQPAVPQGQRLRQQLQAKIQSQGMLGQSSVHQMTPSSSYGLQTSQGYTPYVSHVGLQQHTGPAGTMVPPSYSSQPYQSTHPSTNPTLVDPTRHLQQRPSGYVHQQAPTYGHGLTSTQRFSHQTLQQTPMISTMTPMSAQGVQAGVRSTAILPEQQQQQQQQQQQQQQQQQQQQQQQQQQYHIRQQQQQQILRQQQQQQQQQQQQQQQQQQQQQQQQQQHQQQQQQQAAPPQPQPQSQPQFQRQGLQQTQQQQQTAALVRQLQQQLSNTQPQPSTNIFGRY

SEQ ID NO: 277868 - protein, 2176 aa, Artificial Sequence
  derived and/or modified sequence
MAAFGILSYEHRPLKRPRLGPPDVYPQDPKQKEDELTALNVKQGFNNQPAVSGDEHGSAKNVSFNPAKISSNFSSIIAEKLRCNTLPDTGRRKPQVNQKDNFWLVTARSQSAINTWFTDLAGTKPLTQLAKKVPIFSKKEEVFGYLAKYTVPVMRAAWLIKMTCAYYAAISETKVKKRHVDPFMEWTQIITKYLWEQLQKMAEYYRPGPAGSGGCGSTIGPLPHDVEVAIRQWDYTEKLAMFMFQDGMLDRHEFLTWVLECFEKIRPGEDELLKLLLPLLLRYSGEFVQSAYLSRRLAYFCTRRLALQLDGVSSHSSHVISAQSTSTLPTTPAPQPPTSSTPSTPFSDLLMCPQHRPLVFGLSCILQTILLCCPSALVWHYSLTDSRIKTGSPLDHLPIAPSNLPMPEGNSAFTQQVRAKLREIEQQIKERGQAVEVRWSFDKCQEATAGFTIGRVLHTLEVLDSHSFERSDFSNSLDSLCNRIFGLGPSKDGHEISSDDDAVVSLLCEWAVSCKRSGRHRAMVVAKLLEKRQAEIEAERCGESEAADEKGSIASGSLSAPSAPIFQDVLLQFLDTQAPMLTDPRSESERVEFFNLVLLFCELIRHDVFSHNMYTCTLISRGDLAFGAPGPRPPSPFDDPADDPEHKEAEGSSSSKLEDPGLSESMDIDPSSSVLFEDMEKPDFSLFSPTMPCEGKGSPSPEKPDVEKEVKPPPKEKIEGTLGVLYDQPRHVQYATHFPIPQEESCSHECNQRLVVLFGVGKQRDDARHAIKKITKDILKVLNRKGTAETDQLAPIVPLNPGDLTFLGGEDGQKRRRNRPEAFPTAEDIFAKFQHLSHYDQHQVTAQVSRNVLEQITSFALGMSYHLPLVQHVQFIFDLMEYSLSISGLIDFAIQLLNELSVVEAELLLKSSDLVGSYTTSLCLCIVAVLRHYHACLILNQDQMAQVFEGLCGVVKHGMNRSDGSSAERCILAYLYDLYTSCSHLKNKFGELFSDFCSKVKNTIYCNVEPSESNMRWAPEFMIDTLENPAAHTFTYTGLGKSLSENPANRYSFVCNALMHVCVGHHDPDRVNDIAILCAELTGYCKSLSAEWLGVLKALCCSSNNGTCGFNDLLCNVDVSDLSFHDSLATFVAILIARQCLLLEDLIRCAAIPSLLNAACSEQDSEPGARLTCRILLHLFKTPQLNPCQSDGNKPTVGIRSSCDRHLLAASQNRIVDGAVFAVLKAVFVLGDAELKGSGFTVTGGTEELPEEEGGGGSGGRRQGGRNISVETASLDVYAKYVLRSICQQEWVGERCLKSLCEDSNDLQDPVLSSAQAQRLMQLICYPHRLLDNEDGENPQRQRIKRILQNLDQWTMRQSSLELQLMIKQTPNNEMNSLLENIAKATIEVFQQSAETGSSSGSTASNMPSSSKTKPVLSSLERSGVWLVAPLIAKLPTSVQGHVLKAAGEELEKGQHLGSSSRKERDRQKQKSMSLLSQQPFLSLVLTCLKGQDEQREGLLTSLYSQVHQIVNNWRDDQYLDDCKPKQLMHEALKLRLNLVGGMFDTVQRSTQQTTEWAMLLLEIIISGTVDMQSNNELFTTVLDMLSVLINGTLAADMSSISQGSMEENKRAYMNLAKKLQKELGERQSDSLEKVRQLLPLPKQTRDVITCEPQGSLIDTKGNKIAGFDSIFKKEGLQVSTKQKISPWDLFEGLKPSAPLSWGWFGTVRVDRRVARGEEQQRLLLYHTHLRPRPRAYYLEPLPLPPEDEEPPAPTLLEPEKKAPEPPKTDKPGAAPPSTEERKKKSTKGKKRSQPATKTEDYGMGPGRSGPYGVTVPPDLLHHPNPGSITHLNYRQGSIGLYTQNQPLPAGGPRVDPYRPVRLPMQKLPTRPTYPGVLPTTMTGVMGLEPSSYKTSVYRQQQPAVPQGQRLRQQLQSQGMLGQSSVHQMTPSSSYGLQTSQGYTPYVSHVGLQQHTGPAGTMVPPSYSSQPYQSTHPSTNPTLVDPTRHLQQRPSGYVHQQAPTYGHGLTSTQRFSHQTLQQTPMISTMTPMSAQGVQAGVRSTAILPEQQQQQQQQQQQQQQQQQQQQQQQQQQYHIRQQQQQQILRQQQQQQQQQQQQQQQQQQQQQQQQQQHQQQQQQQAAPPQPQPQSQPQFQRQGLQQTQQQQQTAALVRQLQQQLSNTQPQPSTNIFGRY

SEQ ID NO: 277869 - protein, 130 aa, Artificial Sequence
  derived and/or modified sequence
  misc_feature (1)..(1): Xaa can be any naturally occurring amino acid
XTPNRRRKKQLNAAFLPQDELTALNVKQGFNNQPAVSGDEHGSAKNVSFNPAKISSNFSSIIAEKLRCNTLPDTGRRKPQVNQKDNFWLVTARSQSAINTWFTDLAGTKPLTQLAKKVPIFSKKEEVFGY

SEQ ID NO: 277870 - protein, 925 aa, Artificial Sequence
  derived and/or modified sequence
GGSGGRRQGGRNISVETASLDVYAKYVLRSICQQEWVGERCLKSLCEDSNDLQDPVLSSAQAQRLMQLICYPHRLLDNEDGENPQRQRIKRILQNLDQWTMRQSSLELQLMIKQTPNNEMNSLLENIAKATIEVFQQSAETGSSSGSTASNMPSSSKTKPVLSSLERSGVWLVAPLIAKLPTSVQGHVLKAAGEELEKGQHLGSSSRKERDRQKQKSMSLLSQQPFLSLVLTCLKGQDEQREGLLTSLYSQVHQIVNNWRDDQYLDDCKPKQLMHEALKLRLNLVGGMFDTVQRSTQQTTEWAMLLLEIIISGTVDMQSNNELFTTVLDMLSVLINGTLAADMSSISQGSMEENKRAYMNLAKKLQKELGERQSDSLEKVRQLLPLPKQTRDVITCEPQGSLIDTKGNKIAGFDSIFKKEGLQVSTKQKISPWDLFEGLKPSAPLSWGWFGTVRVDRRVARGEEQQRLLLYHTHLRPRPRAYYLEPLPLPPEDEEPPAPTLLEPEKKAPEPPKTDKPGAAPPSTEERKKKSTKGKKRSQPATKTEDYGMGPGRSGPYGVTVPPDLLHHPNPGSITHLNYRQGSIGLYTQNQPLPAGGPRVDPYRPVRLPMQKLPTRPTYPGVLPTTMTGVMGLEPSSYKTSVYRQQQPAVPQGQRLRQQLQAKIQSQGMLGQSSVHQMTPSSSYGLQTSQGYTPYVSHVGLQQHTGPAGTMVPPSYSSQPYQSTHPSTNPTLVDPTRHLQQRPSGYVHQQAPTYGHGLTSTQRFSHQTLQQTPMISTMTPMSAQGVQAGVRSTAILPEQQQQQQQQQQQQQQQQQQQQQQQQQQYHIRQQQQQQILRQQQQQQQQQQQQQQQQQQQQQQQQQQHQQQQQQQAAPPQPQPQSQPQFQRQGLQQTQQQQQTAALVRQLQQQLSNTQPQPSTNIFGRY

SEQ ID NO: 277871 - DNA, 6543 bp, Artificial Sequence
  derived and/or modified sequence
atggctgcttttgggatattgagttacgaacaccgcccactaaagcggcccagactggggccaccagatgtgtacccgcaggatcccaagcagaaagaggacgagttaaccgccctcaatgtaaagcagggttttaataaccaacctgccgtctcaggggatgaacatggaagcgccaagaatgtctcatttaatccggccaagatttcctcaaacttttctagtattatagcagaaaaactaaggtgcaacacgctccctgacacaggacgaagaaaaccacaggtaaaccagaaagataatttttggctggtgaccgccagatctcagagcgctattaatacttggtttacagacctcgccggcaccaaacccctaacccaattggctaaaaaggttcctatcttcagcaagaaagaggaagtcttcggctacctcgcaaagtacaccgtgccagtgatgagggctgcctggcttatcaaaatgacttgcgcctattatgccgcaatcagtgagaccaaggtaaaaaagaggcatgttgatccttttatggagtggacacagatcatcacgaaatacctgtgggaacagctccagaaaatggctgagtattaccgcccagggccagccggcagtgggggctgcgggtctactattgggcccctcccccacgatgtggaagtggctattcggcagtgggattataccgaaaaactggcaatgttcatgttccaagacggcatgctcgatcgtcatgaattcttgacctgggtccttgagtgttttgaaaagatcagacctggggaggatgaattattaaaacttctgctgccactgcttctgagatactccggtgagtttgtgcagtcagcctacctgtcgcggcggcttgcatacttttgtacccgccggctggccttgcaacttgacggcgttagctctcactcttcccacgtcatcagcgctcaatcgacttctactctccccaccactccagcaccccagccccctactagctccacccctagcaccccctttagcgacctgttaatgtgtcctcagcatcggcctctggtgtttggtttaagttgcatcctgcagactatcctcctttgctgccccagcgcgctggtctggcattacagcctaactgactcccgcatcaaaacgggtagtcctctggaccacctgccaattgctccatccaaccttcccatgcctgagggcaattcagcctttacacaacaagtgagagccaaattgagagaaatcgagcagcagatcaaagaaagggggcaggctgtggaggttcgatggagttttgacaaatgccaagaggccacagctgggttcactattggcagggtgctgcatactctggaagtgcttgattcccacagcttcgagagatccgacttctcgaactcgcttgactcactctgtaaccgcatctttggcctggggccgagtaaagacggtcacgagatttctagtgatgacgacgcggtggtgtctctcctgtgtgaatgggcagtgagctgtaagcgcagcggacgacaccgcgcaatggtggtggctaaactgctggagaaacgccaggcggaaattgaggccgagcgctgcggagaatctgaggccgcagatgaaaagggcagcattgcttcagggtctctgagcgctccttccgcccccatcttccaggacgtgctgttacagtttcttgacacccaggctcctatgctgacagatcctcggtccgaatccgagagagtggaatttttcaatctggtcctgctattctgtgagctcatcagacacgatgtatttagccacaatatgtatacctgcacactcatctctagaggggatctggccttcggagcccctggacctaggcctccgtctccctttgacgatcctgccgacgaccccgagcacaaagaagctgaaggtagcagctcaagcaagctggaggatcccggcctgtctgaaagcatggatattgatccatcctcctctgtgctgtttgaggacatggaaaagcctgacttctctctctttagccccactatgccttgtgagggcaagggaagcccaagcccagagaaacctgacgtcgagaaggaagtcaaacccccacctaaggagaaaattgagggcacacttggggtcctttatgatcagcctcggcacgtgcaatacgcaacccacttccctatcccccaggaggagagttgttcacacgagtgcaatcagaggctggtggtcctatttggggtggggaaacagagggacgacgcgaggcacgccataaagaaaatcaccaaggacatcttgaaagtactgaaccgtaagggaaccgcagagaccgatcagctagctcccattgtcccactgaaccccggggacctgacattcctgggaggtgaggacggacagaaaaggcgacgaaatcggcccgaggccttccctactgccgaagacatctttgccaaatttcagcacctgtctcactacgaccagcatcaggtaacagctcaggtttctcgcaatgtgctggagcaaattacttcgtttgctttgggcatgagttaccacctgcccttggtccagcacgtgcaatttatctttgacctgatggagtactctttatcaatatccggcctcatcgactttgcaatccagctactgaacgagctgagcgtagtggaggccgagcttctgttgaagagcagcgatctcgtcgggtcctacaccacctccctgtgtctctgcatagtcgcagtgctgaggcattatcatgcctgcctgattttaaatcaggaccaaatggcacaggtcttcgagggattgtgtggtgtggtcaaacatggcatgaaccgttcagacgggtctagtgccgagagatgtattctggcctatctgtatgacctgtataccagttgttcacacctcaagaacaaattcggcgagctgttttccgacttttgttctaaggttaagaatactatctactgtaacgtcgaacctagcgaatcaaacatgcggtgggcccctgaatttatgatcgacactttggaaaatcctgctgcgcacacgtttacatatacgggcctgggtaagtcactctccgagaatcccgcgaaccggtatagtttcgtgtgtaacgccctgatgcacgtgtgcgtaggccaccacgatccagacagggtaaacgatatcgcaattttatgcgccgagctgaccggctactgtaaaagtctcagcgcggagtggctgggcgtcctgaaagccctttgctgtagctcaaataatgggacgtgcggctttaacgatctcctttgtaatgtcgatgtgagtgacctctcatttcacgacagtctagctacatttgtggccattctgattgcaaggcaatgtctgcttttggaggatctcattcggtgtgcggccatcccttccctgttgaacgccgcctgctcagaacaggattccgagccaggggcgcgcctcacatgccggatcctgctgcacctatttaagacgcctcagctcaacccctgtcagtccgatgggaataaacccacagtggggatcaggagctcttgcgaccggcacttactggctgcgtctcagaacaggattgtcgacggagccgtgttcgctgttctgaaggcagtgttcgtgcttggggatgcagaattaaagggcagtggcttcaccgtgaccggagggaccgaggaactgccagaagaggagggtgggggggggtctggcggtaggcgccagggcggaaggaacatctcagttgaaacggcttctctggatgtctatgccaagtacgttttacgatccatttgtcagcaggagtgggtgggagagcggtgtctgaagagcctgtgcgaggattccaacgacctccaagaccctgtgctgagcagtgcccaggctcagcgtctcatgcagctcatctgttaccctcaccgcttgctagataacgaggacggtgaaaacccccagcggcagcgcatcaaacgcatacttcagaaccttgatcagtggactatgaggcaatctagcctggagttgcaactcatgatcaaacaaacccccaacaacgagatgaattccctgctggagaacatcgccaaagcgactatcgaggtctttcagcagtccgctgagaccgggtcgtcaagcggatcaacagcctccaacatgcctagttcctcaaaaactaaacctgtattgtcctcgctggaaagatccggggtctggctggttgctcctcttatcgctaagctgccgacatccgtgcagggccacgtcttgaaggcagcgggtgaagagctagagaaagggcagcatctcggctcatcgtctcgaaaggaacgggatcgtcagaaacagaagtctatgtctctgctgtcccaacagcccttcctctcactggtgctgacctgtctgaagggccaagacgaacagagggagggcctgttgacatccctttactcacaggtgcaccaaattgtcaataactggcgggacgaccagtacttagacgattgcaagcctaaacagcttatgcatgaagccctgaagctgcgcctgaacttagtgggcggtatgttcgacaccgtccagcgtagcacgcaacaaaccacagaatgggccatgctcctgttggagattattatctccggtacggtcgatatgcaatcgaataatgagctatttactaccgttcttgatatgctaagcgttttaattaatggaaccctggccgccgacatgagctccatttctcaggggtctatggaagaaaacaaaagagcgtacatgaacctggctaagaagttgcagaaagagctgggtgagcgacaatctgatagtctagaaaaggtgagacagctgctacctctgccaaagcagactagggacgtaatcacttgtgagccgcaaggttcactcatcgataccaagggaaacaagattgccggtttcgacagtattttcaaaaaagagggcctccaggtgtcaacgaaacagaaaattagcccctgggacctctttgaaggtcttaagcctagcgcacctctctcttggggatggttcggtaccgtgcgtgtggaccgtcgggtggccagaggagaggagcaacagcgcctgctgctatatcacacccatcttagaccacgacccagagcttactacctggagcccctgccactccctcccgaggatgaagagcctcccgctccgaccctcttggagccagaaaaaaaggcgcctgagcctcctaaaactgacaagcccggcgctgctccaccaagcactgaagagcgcaagaagaaaagtaccaaaggcaaaaagagaagtcagccggccacaaagaccgaggattacggtatgggtccagggcgaagtggcccgtatggcgtcacagtgcctccagatctgctccaccacccgaatccaggctctatcacccatttgaactaccggcaaggttctatcgggttatatacacagaatcagcccttacccgccggaggacctagggtggacccttatagacctgtccgccttcctatgcagaagttgccaacaagacccacctaccccggtgtgctgcccaccaccatgaccggcgtaatgggactggaaccttcttcctataagaccagcgtctataggcaacagcagcctgcggtgcctcagggccagcgtcttcgccagcaactccaggccaaaattcaatcccagggaatgctagggcaaagtagcgtgcaccagatgacaccctctagctcatatgggctacagaccagccagggctacactccctacgtgtcacatgtgggcctccaacagcatacaggacccgccggtaccatggtgcctccctcatactctagccagccctaccagagtacacacccatctactaatcccacccttgtggatccaaccagacatctgcagcagcgccctagcggctacgtacatcagcaggctcccacgtatggtcacgggcttacgtctacacagaggtttagccaccaaaccctgcagcagacaccaatgataagcaccatgaccccgatgtctgcccagggggtccaggccggcgtcagatcaacggcaatcctgccggaacagcagcagcaacagcagcagcagcagcagcagcagcaacagcagcaacagcagcagcagcaacaacagcagcaacagtaccacattcggcaacagcagcaacaacaaatcctgcggcagcagcagcagcagcagcagcagcagcaacagcagcagcagcagcagcagcagcagcaacagcagcagcaacaacaacatcagcagcagcagcagcagcaggcggcaccgcctcaaccacaaccgcagtcacaacctcaattccagcggcaggggctccaacaaacccagcagcagcagcagactgctgcccttgtgcgccagttgcagcaacagctgtccaacacccaaccgcaaccatccaccaatatttttggcaggtactag

SEQ ID NO: 277872 - DNA, 393 bp, Artificial Sequence
  derived and/or modified sequence
tgaacacccaatcggcgcagaaagaagcagctcaatgccgctttccttccacaggatgaactgacagctctgaacgtgaagcagggcttcaacaaccagcccgcagtcagtggtgatgaacacgggtctgctaaaaatgtaagctttaaccctgccaagatttcctcaaacttctcatcgatcattgcagagaaactgagatgcaataccttgccagacaccggcaggcggaaaccacaggtaaatcagaaagacaatttctggttagtgactgcaagaagccagagcgctataaacacctggtttacagatctcgcgggcacaaagccccttactcaactggcgaagaaggtgcccatcttttctaaaaaggaagaggtgtttggctattag

SEQ ID NO: 277873 - DNA, 2778 bp, Artificial Sequence
  derived and/or modified sequence
ggaggtagcggtggccgaaggcagggcggaaggaacatctcggtcgaaaccgcaagtttagatgtgtacgccaagtacgttttgagaagcatttgccagcaggaatgggttggggagagatgcctaaaatcactctgtgaagattctaacgacctgcaggatccagtgctcagctccgcacaagcacagcgtcttatgcagctaatctgttatccacaccggctgctcgacaatgaggatggcgagaatcctcagcggcagaggatcaaaagaattctgcagaatctggatcagtggaccatgaggcagtcatcattagaactgcaacttatgatcaagcagacgcccaataatgaaatgaacagcttgctggagaacatcgctaaagccacaatcgaagttttccagcagagcgcagagacgggatccagttctggatcaaccgccagtaacatgccttcaagctccaaaacaaaacccgtattgtcctctttagaacgaagtggagtgtggctggttgcccccctaatcgccaaattgccaaccagcgttcagggccatgtgctcaaagctgccggcgaagagcttgaaaagggccagcatctgggatcctcatctaggaaagagagggatagacagaagcaaaaaagtatgagcctgctcagccagcagccattcctgagtctcgtgctgacctgtctcaagggtcaagatgagcaacgggagggcctgctgacatctctatactctcaggtgcaccagatcgttaataattggagagatgaccagtacctcgacgattgcaagcctaaacagctcatgcacgaggccctcaaattacggctcaatctcgtcggtggaatgtttgatacagtgcagaggtccacccagcaaacaactgaatgggccatgctgcttctagagattattatctcgggaactgtggacatgcagtccaacaacgaattatttacaacggtgctcgacatgctcagtgtcctaattaatggaactctcgcagctgacatgagcagcatatcccagggttcgatggaggaaaataaacgggcttatatgaatttggccaagaaactgcagaaggagctcggtgaaagacagtcagattctctcgaaaaagtgagacagctgctgcccctgcccaagcaaactagagacgttataacgtgtgagccccaagggtccttgatcgacacaaaaggcaacaaaattgctggattcgattccatcttcaaaaaagagggcttgcaggtgtcaacaaagcagaagattagcccgtgggatttgttcgaaggcttgaagccctcggccccactgtcgtgggggtggtttgggaccgtaagggtggacagacgggtcgcgagaggcgaagagcagcagcgacttctgttgtaccatacgcacctcagaccccggccccgggcatactatctcgaaccccttcctctaccacctgaggacgaggaaccacccgccccgactctcctcgaacccgagaagaaggctccagagcctccgaagacagataagcccggcgccgcaccccctagcactgaggagaggaagaaaaaatccacaaaaggcaagaaaaggtctcaacctgcgactaaaaccgaggactatgggatggggccaggcaggagtgggccctatggggttacagtgccgccggacctcctacatcaccccaatcccgggtcaatcacccacctgaactacagacaggggtccatcggattatatacccagaatcaaccactcccagcagggggccccagggtggatccttacagacccgttaggcttcctatgcagaagttacctactcgcccaacgtacccaggcgtgctgccaaccaccatgaccggagtaatggggctagagccttcttcctataagacgtctgtttaccggcaacagcaaccagcagttccccagggacagcggctccggcaacagctgcaggccaaaatccagagccaaggtatgctcggccagtcaagtgtgcaccagatgactccatcttcatcgtatgggctacagaccagccagggctataccccatacgtgtcccacgtcggacttcaacagcacacgggtccagccggtacaatggtaccgccttcttactcttctcagccatatcagagcacacaccctagtactaatcccacccttgttgatccaacaaggcatttgcagcagaggcctagcgggtatgtacatcaacaagccccgacctacgggcatgggctcacaagtacccagaggttctcccaccaaactctccagcagaccccaatgatcagcaccatgacacccatgtccgcccagggggtacaggccggggtacggtcaaccgctattctcccagaacagcagcagcagcagcaacaacagcagcaacagcagcaacaacagcagcagcaacagcagcagcagcagcaacagcaataccacataaggcagcagcaacagcagcagattctgcgacagcagcagcagcagcagcagcaacagcagcagcagcagcagcagcagcagcaacagcagcagcagcagcagcaacagcaccagcagcagcagcaacagcaggctgctcccccccagccacagcctcagtcacagccccagttccagcggcaggggctgcagcagacccagcagcagcagcagactgctgccttagtaagacagctacagcagcaactttctaatacccagccgcaaccatccactaatatcttcggaaggtattag

SEQ ID NO: 277874 - DNA, 6543 bp, Artificial Sequence
  derived and/or modified sequence
atggccgccttcggcatcctgtcctatgagcaccggcccctgaagaggccccggctgggccccccagatgtgtacccccaggaccccaagcagaaggaggatgagctgacagccctgaatgtgaagcagggcttcaacaaccagcctgctgtgtctggagatgagcacggcagcgccaagaatgtgtccttcaacccagccaagatcagcagcaacttcagcagcatcatcgccgagaagctgcgctgcaacaccctgcctgacacaggaagaaggaagccccaggtgaaccagaaggacaacttctggctggtgacagcccggagccagagcgccatcaacacctggttcacagacctggccggcaccaagcccctgacccagctggccaagaaggtgcccatcttcagcaagaaggaggaggtgtttggctacctggccaagtacacagtgcctgtgatgagagctgcctggctgatcaagatgacctgtgcctactatgctgccatcagcgagaccaaggtgaagaagagacatgtggaccccttcatggagtggacccagatcatcaccaagtacctgtgggagcagctgcagaagatggccgagtactacagacctggccctgctggcagcggcggctgcggcagcaccatcggccccctgccccatgatgtggaggtggccatccggcagtgggactacacagagaagctggccatgttcatgttccaggacggcatgctggacagacatgagttcctgacctgggtgctggagtgctttgagaagatccggcctggagaagatgagctgctgaagctgctgctgcccctgctgctgcgctacagcggggagtttgtgcagagcgcctacctgagccggcggctggcctacttctgcacccggcggctggccctgcagctggatggagtgagcagccacagcagccacgtgatcagcgcccagagcaccagcaccctgcccaccaccccagccccccagccccccaccagcagcacccccagcacccccttcagtgacctgctgatgtgcccccagcaccggcccctggtgtttggcctgagctgcatcctgcagaccatcctgctgtgctgccccagcgccctggtgtggcactacagcctgacagacagccgcatcaagacaggcagccccctggaccacctgcccatcgcccccagcaacctgcccatgcctgagggcaacagcgccttcacccagcaggtgcgggccaagctgcgggagattgagcagcagatcaaggagcggggccaggccgtggaggtgcgctggagctttgacaagtgccaggaggccacagctggcttcaccatcggccgggtgctgcacaccctggaggtgctggacagccacagctttgagaggagtgacttcagcaacagcctggacagcctgtgcaaccgcatcttcggcctgggccccagcaaggatggccacgagatcagcagtgatgatgatgctgtggtgtccctgctgtgtgagtgggccgtgtcctgcaagaggagcggccgccaccgggccatggtggtggccaagctgctggagaagaggcaggccgagattgaggccgagcgctgtggggagagcgaggccgcagatgagaagggcagcatcgccagcggcagcctgagcgcccccagcgcccccatcttccaggatgtgctgctgcagttcctggacacccaggcccccatgctgacagaccccaggtctgagagcgagcgggtggagttcttcaacctggtgctgctcttctgtgagctgatcagacatgatgtgttcagccacaacatgtacacctgcaccctcatcagcagaggagacctggccttcggggcccctggccccaggcctcccagcccctttgatgatcctgcagatgatcctgagcacaaggaggccgagggcagcagcagcagcaagctggaggaccccggcctgtctgagagcatggacatcgaccccagcagctctgtgctgtttgaggacatggagaagccagacttcagcctcttcagccccaccatgccctgtgagggcaagggcagccccagccctgagaagccagatgtggagaaggaggtgaagcccccacccaaggagaagattgagggcaccctgggcgtgctgtatgaccagcccaggcatgtgcagtatgccacccacttccccatcccccaggaggagagctgcagccatgagtgcaaccagaggctggtggtgctgtttggagtgggcaagcagagagatgatgcccggcatgccatcaagaagatcaccaaggacatcctgaaggtgctgaacagaaaaggaacagctgagacagaccagctggcccccatcgtgcccctgaaccctggggacctgaccttcctgggcggggaggatggccagaagagaagaagaaacagacctgaggccttccccacagctgaggacatctttgccaagttccagcacctgagccactatgaccagcaccaggtgacagcccaggtgtccagaaatgtgctggagcagatcaccagctttgccctgggcatgagctaccacctgcccctggtgcagcacgtgcagttcatctttgacctgatggagtacagcctgagcatcagcggcctgattgactttgccatccagctgctgaatgagctgtctgtggtggaggccgagctgctgctgaagagcagtgacctggtgggcagctacaccaccagcctgtgcctgtgcatcgtggccgtgctgcggcactaccacgcctgcctgatcctgaaccaggaccagatggcccaggtgtttgagggcctgtgtggggtggtgaagcacggcatgaacagaagtgatggcagcagcgctgagcgctgcatcctggcctacctgtatgacctgtacaccagctgcagccacctgaagaacaagtttggagagctgttcagtgacttctgcagcaaggtgaagaacaccatctactgcaatgtggagcccagcgagagcaacatgcgctgggcccctgagttcatgattgacaccctggagaacccagctgcccacaccttcacctacacaggcctgggcaagagcctgtctgaaaatcctgccaaccgctacagctttgtgtgcaatgccctgatgcacgtgtgtgtgggccaccacgaccctgacagagtgaatgacatcgccatcctgtgtgccgagctgaccggctactgcaagagcctgtctgctgagtggctgggcgtgctgaaggccctgtgctgcagcagcaacaacggcacctgtggcttcaatgacctgctgtgcaatgtggatgtgtctgacctgtccttccatgacagcctggccacctttgtggccatcctgattgcccggcagtgcctgctgctggaggacctgatccgctgtgccgccatccccagcctgctgaatgctgcctgcagcgagcaggacagcgagcccggggcccggctgacctgccgcatcctgctgcacctgttcaagaccccccagctgaacccctgccagagtgatggcaacaagcccaccgtgggcatccgcagcagctgtgacagacacctgctggccgccagccagaacagaattgtggatggagctgtgtttgctgtgctgaaggctgtgtttgtgctgggagatgctgagctgaagggcagcggcttcaccgtgactggaggaacagaggagctgcctgaggaggagggcggcggcggcagcggcggccggcggcagggcggcaggaacatctctgtggagacagccagcctggatgtgtatgccaagtatgtgctgcggagcatctgccagcaggagtgggtgggggagcgctgcctgaagagcctgtgtgaggacagcaatgacctgcaggaccctgtgctgagcagcgcccaggcccagaggctgatgcagctgatctgctacccccaccggctgctggacaatgaagatggagagaacccccagaggcagaggatcaagaggatcctgcagaacctggaccagtggaccatgaggcagagcagcctggagctgcagctgatgatcaagcagacccccaacaatgagatgaacagcctgctggagaacatcgccaaggccaccatcgaggtgttccagcagagcgctgagaccggcagcagcagcggcagcacagccagcaacatgcccagcagcagcaagaccaagcctgtgctgagcagcctggagaggtctggagtgtggctggtggcccccctcatcgccaagctgcccacctctgtgcagggccacgtgctgaaggctgctggggaggagctggagaagggccagcacctgggcagcagcagcaggaaggagcgggaccggcagaagcagaagtccatgagcctgctgagccagcagcccttcctgagcctggtgctgacctgcctgaagggccaggatgagcagcgggagggcctgctgaccagcctgtacagccaggtgcaccagatcgtgaacaactggagagatgaccagtacctggatgactgcaagcccaagcagctgatgcatgaggccctgaagctgcggctgaacctggtgggcggcatgtttgacacagtgcagaggagcacccagcagaccacagagtgggccatgctgctgctggagatcatcatctctggaacagtggacatgcagagcaacaatgagctgttcaccaccgtgctggacatgctgtctgtgctgatcaatggcaccctggccgctgacatgagcagcatcagccagggctccatggaggagaacaagagggcctacatgaacctggccaagaagctgcagaaggagctgggggagcggcagagcgacagcctggagaaggtgcggcagctgctgcccctgcccaagcagaccagagatgtgatcacctgtgagccccagggcagcctgattgacaccaagggcaacaagattgctggctttgacagcatcttcaagaaggagggcctgcaggtgtccaccaagcagaagatcagcccctgggacctgtttgagggcctgaagcccagcgcccccctgtcctggggctggtttggaacagtgcgggtggaccggcgggtggcccggggggaggagcagcagaggctgctgctgtaccacacccacctgcggccccggccccgggcctactacctggagcccctgcccctgcccccagaagatgaggagcccccagcccccaccctgctggagcctgagaagaaggcccctgagccccccaagacagacaagccaggggccgccccacccagcacagaggagaggaagaagaagagcaccaagggcaagaagaggagccagcctgccaccaagacagaggactatggcatgggccctggccgcagcggcccctacggcgtgacagtgcccccagacctgctgcaccaccccaaccctggcagcatcacccacctgaactaccggcagggcagcatcggcctgtacacccagaaccagcccctgcctgctgggggcccccgggtggacccctacagacctgtgcggctgcccatgcagaagctgcccacccggcccacctacccaggagtgctgcccaccaccatgactggagtgatgggcctggagcccagcagctacaagacctctgtgtaccggcagcagcagcctgctgtgccccagggccagaggctgcggcagcagctgcaggccaagatccagagccagggcatgctgggccagagctctgtgcaccagatgacccccagcagcagctatggcctgcagaccagccagggctacaccccctacgtgagccacgtgggcctgcagcagcacacaggccctgctggcaccatggtgccccccagctacagcagccagccctaccagagcacccaccccagcaccaaccccaccctggtggaccccaccaggcacctgcagcagaggccttctggctacgtgcaccagcaggcccccacctacggccacggcctgaccagcacccagcgcttcagccaccagaccctgcagcagacccccatgatcagcaccatgacccccatgtctgcccagggcgtgcaggccggcgtgcgcagcacagccatcctgcctgagcagcagcagcagcagcagcagcagcagcagcagcagcagcagcagcagcagcagcagcagcagcagcagcagcagcagtaccacatccggcagcagcagcagcagcagatcctgcggcagcagcagcagcagcagcagcagcagcagcagcagcagcagcagcagcagcagcagcagcagcagcagcagcagcagcaccagcagcagcagcagcagcaggccgccccaccccagccccagccccagagccagccccagttccagaggcagggcctgcagcagacccagcagcagcagcagacagctgccctggtgcggcagctgcagcagcagctgagcaacacccagccccagcccagcaccaacatcttcggccgctactag

SEQ ID NO: 277875 - DNA, 393 bp, Artificial Sequence
  derived and/or modified sequence
tgaacacccaacagaagaaggaagaagcagctgaatgctgccttcctgccccaggatgagctgacagccctgaatgtgaagcagggcttcaacaaccagcctgctgtgtctggagatgaacatggcagcgccaagaatgtgtccttcaacccagccaagatcagcagcaacttcagcagcatcatcgccgagaagctgcgctgcaacaccctgcctgacaccggccgcaggaagccccaggtgaaccagaaggacaacttctggctggtgacagcccggagccagagcgccatcaacacctggttcacagacctggccggcaccaagcccctgacccagctggccaagaaggtgcccatcttcagcaagaaggaggaggtgtttggctactag

SEQ ID NO: 277876 - DNA, 2778 bp, Artificial Sequence
  derived and/or modified sequence
gggggcagcggcggccggcggcagggcggcaggaacatctctgtggagacagccagcctggatgtgtatgccaagtatgtgctgcggagcatctgccagcaggagtgggtgggggagcgctgcctgaagagcctgtgtgaggacagcaatgacctgcaggaccctgtgctgagcagcgcccaggcccagaggctgatgcagctgatctgctacccccaccggctgctggacaatgaagatggagagaacccccagaggcagaggatcaagaggatcctgcagaacctggaccagtggaccatgaggcagagcagcctggagctgcagctgatgatcaagcagacccccaacaatgagatgaacagcctgctggagaacatcgccaaggccaccatcgaggtgttccagcagagcgctgagaccggcagcagcagcggcagcacagccagcaacatgcccagcagcagcaagaccaagcctgtgctgagcagcctggagaggtctggagtgtggctggtggcccccctgattgccaagctgcccacctctgtgcagggccacgtgctgaaggccgccggggaggagctggagaagggccagcacctgggcagcagcagcaggaaggagcgggaccggcagaagcagaagtccatgagcctgctgagccagcagcccttcctgagcctggtgctgacctgcctgaagggccaggatgagcagcgggagggcctgctgaccagcctgtacagccaggtgcaccagatcgtgaacaactggagagatgaccagtacctggatgactgcaagcccaagcagctgatgcatgaggccctgaagctgcggctgaacctggtgggcggcatgtttgacacagtgcagaggagcacccagcagaccacagagtgggccatgctgctgctggagatcatcatcagcggcaccgtggacatgcagagcaacaatgaactcttcaccaccgtgctggacatgctgtctgtgctgatcaatggcaccctggccgctgacatgagcagcatcagccagggctccatggaggagaacaagagggcctacatgaacctggccaagaagctgcagaaggagctgggggagcggcagagcgacagcctggagaaggtgcggcagctgctgcccctgcccaagcagaccagagatgtgatcacctgtgagccccagggcagcctgattgacaccaagggcaacaagattgctggctttgacagcatcttcaagaaggagggcctgcaggtgtccaccaagcagaagatcagcccctgggacctgtttgagggcctgaagcccagcgcccccctgtcctggggctggtttggcaccgtgcgggtggacagaagagtggcccggggggaggagcagcagaggctgctgctgtaccacacccacctgcggccccggccccgggcctactacctggagcccctgcccctgcccccagaagatgaggagcccccagcccccaccctgctggagcctgagaagaaggcccctgagccccccaagacagacaagccaggagctgccccacccagcacagaggagaggaagaagaagagcaccaagggcaagaagaggagccagcctgccaccaagacagaagattatggcatgggccctggccgcagcggcccctatggagtgacagtgcccccagacctgctgcaccaccccaaccctggcagcatcacccacctgaactaccggcagggcagcatcggcctgtacacccagaaccagcccctgcctgctgggggcccccgggtggacccctacagacctgtgcggctgcccatgcagaagctgcccacccggcccacctacccaggagtgctgcccaccaccatgactggagtgatgggcctggagcccagcagctacaagacctctgtgtaccggcagcagcagcctgctgtgccccagggccagaggctgcggcagcagctgcaggccaagatccagagccagggcatgctgggccagagctctgtgcaccagatgacccccagcagcagctatggcctgcagaccagccagggctacaccccctacgtgagccacgtgggcctgcagcagcacactggacctgctggcaccatggtgcccccatcctacagcagccagccctaccagagcacccaccccagcaccaaccccaccctggtggaccccaccaggcacctgcagcagaggcccagcggctacgtgcaccagcaggcccccacctacggccacggcctgaccagcacccagcgcttcagccaccagaccctgcagcagacccccatgatcagcaccatgacccccatgtctgcccagggcgtgcaggccggcgtgcgcagcacagccatcctgcctgagcagcagcagcagcagcagcagcagcagcagcagcagcagcagcagcagcagcagcagcagcagcagcagcagcagcagtaccacatccggcagcagcagcagcagcagatcctgcggcagcagcagcagcagcagcagcagcagcagcagcagcagcagcagcagcagcagcagcagcagcagcagcagcagcagcaccagcagcagcagcagcagcaggccgccccaccccagccccagccccagagccagccccagttccagaggcagggcctgcagcagacccagcagcagcagcagacagctgccctggtgcggcagctgcagcagcagctgagcaacacccagccccagcccagcaccaacatcttcggccgctactag

SEQ ID NO: 277877 - DNA, 6977 bp, Artificial Sequence
  derived and/or modified sequence
attgtccgatggttcccggcgtacctcggcttccctcggtagtttccggcaatggtcgagagtttctaacgtgcccccttgttgtctctcggccgccgtcctctcaaccaccgccccccttttcggctccctctcccccttcccgttcccccagtcagcctggccctgctggtgcctccggcgctacgggctgggcaagatggcggccttcgggatcttgagctacgaacaccggcccctgaagcggccgcggctggggcctcccgatgtttaccctcaggaccccaaacagaaggaggatgaactgacggccttgaatgtaaaacaaggtttcaataaccagcctgctgtctctggggatgagcatggcagtgccaagaacgtcagcttcaatcctgccaagatcagttccaacttcagcagcattattgcagagaaattacgttgtaatacccttcctgacactggtcgcaggaagccccaagtgaaccagaaggataacttctggctggtgactgcacgatcccagagtgccattaacacttggttcactgacttggctggcaccaagccactcacgcaactagccaaaaaggtccccattttcagtaagaaggaagaggtgtttgggtacttagccaaatacacagtgcctgtgatgcgggctgcctggctcattaagatgacctgtgcctactatgcagcaatctctgagaccaaggttaagaagagacatgttgaccctttcatggaatggactcagatcatcaccaagtacttatgggagcagttacagaagatggctgaatactaccggccagggcctgcaggaagtgggggctgtggttccacgatagggcccttgccccatgatgtagaggtggcaatccggcagtgggattacaccgagaagctggccatgttcatgtttcaggatggaatgctggacagacatgagttcctgacctgggtgcttgagtgttttgagaagatccgccctggagaggatgaattgcttaaactgctgctgcctctgcttctccgatactctggggaatttgttcagtctgcatacctgtcccgccggcttgcctacttctgtacacggagactggccctgcagctggatggtgtgagcagtcactcatctcatgttatatctgctcagtcaacaagcacgctacccaccacccctgctcctcagcccccaactagcagcacaccctcgactccctttagtgacctgcttatgtgccctcagcaccggcccctggtttttggcctcagctgtatcctacagaccatcctcctgtgctgtcctagtgccttggtttggcactactcactgactgatagcagaattaagaccggctcaccacttgaccacttgcctattgccccgtccaacctgcccatgccagagggtaacagtgccttcactcagcaggtccgtgcaaagttgcgggagatcgagcagcagatcaaggagcggggacaggcagttgaagttcgctggtctttcgataaatgccaggaagctactgcaggcttcaccattggacgggtacttcatactttggaagtgctggacagccatagttttgaacgctctgacttcagcaactctcttgactccctttgtaaccgaatctttggattgggacctagcaaggatgggcatgagatctcctcagatgatgatgctgtggtgtcattgctatgtgaatgggctgtcagctgcaagcgttctggtcggcatcgtgctatggtggtagccaagctcctggagaagagacaggcggagattgaggctgagcgttgtggagaatcagaagccgcagatgagaagggttccatcgcctctggctccctttctgctcccagtgctcccattttccaggatgtcctcctgcagtttctggatacacaggctcccatgctgacggaccctcgaagtgagagtgagcgggtggaattctttaacttagtactgctgttctgtgaactgattcgacatgatgttttctcccacaacatgtatacttgcactctcatctcccgaggggaccttgcctttggagcccctggtccccggcctccctctccctttgatgatcctgccgatgacccagagcacaaggaggctgaaggcagcagcagcagcaagctggaagatccagggctctcagaatctatggacattgaccctagttccagtgttctctttgaggacatggagaagcctgatttctcattgttctcccctactatgccctgtgaggggaagggcagtccatcccctgagaagccagatgtcgagaaggaggtgaagcccccacccaaggagaagattgaagggacccttggggttctttacgaccagccacgacacgtgcagtacgccacccattttcccatcccccaggaggagtcatgcagccatgagtgcaaccagcggttggtcgtactgtttggggtgggaaagcagcgagatgatgcccgccatgccatcaagaaaatcaccaaggatatcttgaaggttctgaaccgcaaagggacagcagaaactgaccagcttgctcctattgtgcctctgaatcctggagacctgacattcttaggtggggaggatgggcagaagcggcgacgcaaccggcctgaagccttccccactgctgaagatatctttgctaagttccagcacctttcacattatgaccaacaccaggtcacggctcaggtctcccggaatgttctggagcagatcacgagctttgcccttggcatgtcataccacttgcctctggtgcagcatgtgcagttcatcttcgacctcatggaatattcactcagcatcagtggcctcatcgactttgccattcagctgctgaatgaactgagtgtagttgaggctgagctgcttctcaaatcctcggatctggtgggcagctacactactagcctgtgcctgtgcatcgtggctgtcctgcggcactatcatgcctgcctcatcctcaaccaggaccagatggcacaggtctttgaggggctgtgtggcgtcgtgaagcatgggatgaaccggtccgatggctcctctgcagagcgctgtatccttgcttatctctatgatctgtacacctcctgtagccatttaaagaacaaatttggggagctcttcagcgacttttgctcaaaggtgaagaacaccatctactgcaacgtggagccatcggaatcaaatatgcgctgggcacctgagttcatgatcgacactctagagaaccctgcagctcacaccttcacctacacggggctaggcaagagtcttagtgagaaccctgctaaccgctacagctttgtctgcaatgcccttatgcacgtctgtgtggggcaccatgatcccgatagggtgaatgacatcgcaatcctgtgtgcagagctgaccggctattgcaagtcactgagtgcagaatggctaggagtgcttaaggccttgtgctgctcctctaacaatggcacttgtggtttcaacgatctcctctgcaatgttgatgtcagtgacctatcttttcatgactcgctggctacttttgttgccatcctcatcgctcggcagtgtttgctcctggaagatctgattcgctgtgctgccatcccttcactccttaatgctgcttgtagtgaacaggactctgagccaggggcccggcttacctgccgcatcctccttcaccttttcaagacaccgcagctcaatccttgccagtctgatggaaacaagcctacagtaggaatccgctcctcctgcgaccgccacctgctggctgcctcccagaaccgcatcgtggatggagccgtgtttgctgttctcaaggctgtgtttgtacttggggatgcggaactgaaaggttcaggcttcactgtgacaggaggaacagaagaacttccagaggaggagggaggaggtggcagtggtggtcggaggcagggtggccgcaacatctctgtggagacagccagtctggatgtctatgccaagtacgtgctgcgcagcatctgccaacaggaatgggtaggagaacgttgccttaagtctctgtgtgaggacagcaatgacctgcaagacccagtgttgagtagtgcccaggcgcagcgcctcatgcagctcatttgctatccacatcgactgctggacaatgaggatggggaaaacccccagcggcagcgcataaagcgcattctccagaacttggaccagtggaccatgcgccagtcttccttggagctgcagctcatgatcaagcagacccctaacaatgagatgaactccctcttggagaacatcgccaaggccacaatcgaggttttccaacagtcagcagagacagggtcatcttctggaagtactgcaagcaacatgcccagcagcagcaagaccaagcctgtgctcagctctctagagcgctctggtgtatggctggtggcccccctcattgctaaactgcccacctcagtccagggacatgtgttaaaggctgctggggaagaattggagaagggtcagcacctgggttcctcttcacgcaaagaacgtgatcgacaaaagcagaagagcatgtccctattgagccagcagcccttcttatcgctggtgctaacatgtctgaaagggcaggatgaacaacgcgagggactccttacctccctctacagccaggtgcaccagattgtgaataattggcgagatgaccagtacttagatgattgcaaaccaaagcagcttatgcatgaggcactcaaactgcggctcaacctggtggggggcatgtttgacacggtgcagcgcagcacccagcagaccacggagtgggccatgctcctcctggagatcatcatcagcggcactgtcgacatgcagtccaacaatgagctcttcactactgtgttggacatgctgagcgtgctcatcaatgggacattggctgcagacatgtctagcatctcgcaaggtagcatggaggaaaacaagcgtgcatacatgaacctggcgaagaagttgcagaaggagttgggggagcgccagtcagacagtctggaaaaggttcgccagctgctgccactgcccaagcagacccgagatgtcatcacgtgtgagccacagggctcccttatcgataccaagggcaacaagattgctggcttcgattccatcttcaagaaggagggtctacaggtttccaccaaacagaagatctcgccctgggatctttttgaggggttgaagccgtcagcaccactctcttggggctggtttggaacagtccgagtggaccggcgagtggctcgaggagaggagcagcagcggttgctgctctaccacacacacctgaggccccggccccgcgcctattacctggagccactgccactgcccccagaagatgaggagccgcctgctcctaccctgctagagcctgagaaaaaggctccagagccccccaaaactgacaaaccgggggctgctccacccagtactgaggaacgcaagaagaagtccaccaagggcaagaaacgcagccagccagctaccaagacagaggactatggaatgggcccgggtcggagcggcccttatggtgtgacagtgcctccggacctcctgcaccacccaaaccctggttctataacacaccttaactacaggcaaggctccataggcctgtacacccagaaccagccactacctgcaggtggccctcgtgtggacccataccgtcctgtgcgcttaccaatgcagaagctgcccacccgaccaacttaccctggagtgctgcccacaaccatgactggcgtcatgggtttagaaccctcctcttataagacctctgtgtaccggcagcagcaacctgcggtgccccaaggacagcgccttcgccaacagctccaggcaaagatacagagtcagggcatgttgggacagtcatctgtccatcagatgactcccagctcttcctacggtttgcagacttcccagggctatactccttatgtttctcatgtgggattgcagcaacacacaggccctgcaggtaccatggtgccccccagctactccagccagccttaccagagcacccacccttctaccaatcctactcttgtagatcctacccgccacctgcaacagcggcccagtggctatgtgcaccagcaggcccccacctatggacatggactgacctccactcaaaggttttcacaccagacactgcagcagacacccatgataagtaccatgactccaatgagtgcccagggcgtccaggcaggcgtccgttcaacagccatcctacctgagcagcagcagcagcagcaacagcagcaacagcaacagcagcagcagcagcaacagcaacagcagcagcagcagcagcagtaccacatccggcagcagcagcagcagcagatcctgcggcagcagcagcaacagcaacagcagcagcagcagcagcagcaacagcaacagcagcagcagcaacagcaacaacagcaacaccagcagcaacagcagcaacaggcggctcctccccaaccccagccccagtcccagccccagttccagcgccaggggcttcagcagacccagcagcagcaacagacagcagctttggtccggcaacttcaacaacagctctctaatacccagccacagcccagtaccaacatatttggacgctactgagccacctggaggaactgcttgtgcactggatgtggccccaccctttcctcttaattcccaatcccattcctgggctagcaccagtagtggttggggccctcccctcaggctccatttttaataagtttttagtatttttgttaatgtgaggcattgagctgttgggttttgtatattatttatatagagaccccagagctgttgcacccaatacacagagcttctttgcaaaggg

SEQ ID NO: 277878 - DNA, 389 bp, Artificial Sequence
  derived and/or modified sequence
ggaccccaaacagaaggaggaaaaaacaactaaacgccgctttcctgcctcaggatgaactgacggccttgaatgtaaaacaaggtttcaataaccagcctgctgtctctggggatgagcatggcagtgccaagaacgtcagcttcaatcctgccaagatcagttccaacttcagcagcattattgcagagaaattacgttgtaatacccttcctgacactggtcgcaggaagccccaagtgaaccagaaggataacttctggctggtgactgcacgatcccagagtgccattaacacttggttcactgacttggctggcaccaagccactcacgcaactagccaaaaaggtccccattttcagtaagaaggaagaggtgtttgggtac

SEQ ID NO: 277879 - DNA, 3010 bp, Artificial Sequence
  derived and/or modified sequence
ggtggcagtggtggtcggaggcagggtggccgcaacatctctgtggagacagccagtctggatgtctatgccaagtacgtgctgcgcagcatctgccaacaggaatgggtaggagaacgttgccttaagtctctgtgtgaggacagcaatgacctgcaagacccagtgttgagtagtgcccaggcgcagcgcctcatgcagctcatttgctatccacatcgactgctggacaatgaggatggggaaaacccccagcggcagcgcataaagcgcattctccagaacttggaccagtggaccatgcgccagtcttccttggagctgcagctcatgatcaagcagacccctaacaatgagatgaactccctcttggagaacatcgccaaggccacaatcgaggttttccaacagtcagcagagacagggtcatcttctggaagtactgcaagcaacatgcccagcagcagcaagaccaagcctgtgctcagctctctagagcgctctggtgtatggctggtggcccccctcattgctaaactgcccacctcagtccagggacatgtgttaaaggctgctggggaagaattggagaagggtcagcacctgggttcctcttcacgcaaagaacgtgatcgacaaaagcagaagagcatgtccctattgagccagcagcccttcttatcgctggtgctaacatgtctgaaagggcaggatgaacaacgcgagggactccttacctccctctacagccaggtgcaccagattgtgaataattggcgagatgaccagtacttagatgattgcaaaccaaagcagcttatgcatgaggcactcaaactgcggctcaacctggtggggggcatgtttgacacggtgcagcgcagcacccagcagaccacggagtgggccatgctcctcctggagatcatcatcagcggcactgtcgacatgcagtccaacaatgagctcttcactactgtgttggacatgctgagcgtgctcatcaatgggacattggctgcagacatgtctagcatctcgcaaggtagcatggaggaaaacaagcgtgcatacatgaacctggcgaagaagttgcagaaggagttgggggagcgccagtcagacagtctggaaaaggttcgccagctgctgccactgcccaagcagacccgagatgtcatcacgtgtgagccacagggctcccttatcgataccaagggcaacaagattgctggcttcgattccatcttcaagaaggagggtctacaggtttccaccaaacagaagatctcgccctgggatctttttgaggggttgaagccgtcagcaccactctcttggggctggtttggaacagtccgagtggaccggcgagtggctcgaggagaggagcagcagcggttgctgctctaccacacacacctgaggccccggccccgcgcctattacctggagccactgccactgcccccagaagatgaggagccgcctgctcctaccctgctagagcctgagaaaaaggctccagagccccccaaaactgacaaaccgggggctgctccacccagtactgaggaacgcaagaagaagtccaccaagggcaagaaacgcagccagccagctaccaagacagaggactatggaatgggcccgggtcggagcggcccttatggtgtgacagtgcctccggacctcctgcaccacccaaaccctggttctataacacaccttaactacaggcaaggctccataggcctgtacacccagaaccagccactacctgcaggtggccctcgtgtggacccataccgtcctgtgcgcttaccaatgcagaagctgcccacccgaccaacttaccctggagtgctgcccacaaccatgactggcgtcatgggtttagaaccctcctcttataagacctctgtgtaccggcagcagcaacctgcggtgccccaaggacagcgccttcgccaacagctccaggcaaagatacagagtcagggcatgttgggacagtcatctgtccatcagatgactcccagctcttcctacggtttgcagacttcccagggctatactccttatgtttctcatgtgggattgcagcaacacacaggccctgcaggtaccatggtgccccccagctactccagccagccttaccagagcacccacccttctaccaatcctactcttgtagatcctacccgccacctgcaacagcggcccagtggctatgtgcaccagcaggcccccacctatggacatggactgacctccactcaaaggttttcacaccagacactgcagcagacacccatgataagtaccatgactccaatgagtgcccagggcgtccaggcaggcgtccgttcaacagccatcctacctgagcagcagcagcagcagcaacagcagcaacagcaacagcagcagcagcagcaacagcaacagcagcagcagcagcagcagtaccacatccggcagcagcagcagcagcagatcctgcggcagcagcagcaacagcaacagcagcagcagcagcagcagcaacagcaacagcagcagcagcaacagcaacaacagcaacaccagcagcaacagcagcaacaggcggctcctccccaaccccagccccagtcccagccccagttccagcgccaggggcttcagcagacccagcagcagcaacagacagcagctttggtccggcaacttcaacaacagctctctaatacccagccacagcccagtaccaacatatttggacgctactgagccacctggaggaactgcttgtgcactggatgtggccccaccctttcctcttaattcccaatcccattcctgggctagcaccagtagtggttggggccctcccctcaggctccatttttaataagtttttagtatttttgttaatgtgaggcattgagctgttgggttttgtatattatttatatagagaccccagagctgttgcacccaatacacagagcttctttgcaaa

SEQ ID NO: 277880 - DNA, 6543 bp, Artificial Sequence
  derived and/or modified sequence
atggccgccttcggcatcctgagctacgagcaccggcccctgaagcgacccagactgggccctccggacgtttacccacaggatccaaaacagaaagaagatgagctgacagctctcaatgtcaaacagggcttcaataatcagcccgccgtgtcgggcgatgagcacgggtctgccaagaatgtcagtttcaacccggctaagattagctccaacttttcctccattattgccgagaaactgaggtgcaacactctgcccgataccgggcgacggaaacctcaggtcaatcagaaggacaacttttggctggtgacagctaggtcccagagtgccataaacacctggtttactgatctagccgggacaaagccattgacacaactggcaaagaaagtacccatctttagtaaaaaagaggaagtttttggatatctggccaagtacaccgttccagtcatgagagccgcttggctcattaaaatgacttgcgcgtattacgccgccatatcggagacaaaagtcaagaaaagacacgtggacccattcatggaatggactcagattattactaaatacctgtgggaacagctgcagaagatggctgagtactaccgccccggacctgctggcagtggtggctgcggcagcaccatcggcccattgccccatgacgtggaagttgccatacgtcagtgggattatactgagaagcttgcaatgtttatgttccaggacgggatgctcgatcggcacgaatttctcacctgggtgctggagtgtttcgagaaaatccggccaggggaagacgaactgttgaagcttctgctcccactgctgcttcgttactccggagaatttgtccagagtgcatatctcagccggcgccttgcatatttttgtacacggcgattggctctccaactcgatggcgtcagttcccatagcagtcatgtgattagcgcacagtccacatctacattacctacaacgcctgccccccagcctccgacaagttctacacctagtacacccttcagtgatctgctcatgtgcccgcagcaccggccgttggtgttcggcctttcgtgtattctccagaccattctgctgtgttgtccaagcgctttggtctggcattacagcttgacagattctagaatcaagactggttcgcctcttgaccacttacccatcgctccatcaaacctcccaatgcctgaaggaaacagtgcctttactcaacaggtgagggcaaaattacgagagatagagcaacaaattaaagagcggggacaagctgtggaagttcgatggtccttcgataagtgtcaggaagctactgcagggttcaccataggtagggtcttgcacaccctggaggtgctggacagtcacagttttgagagatcagatttctcgaattccctggactctttgtgtaataggatcttcggattagggccctcaaaggacgggcatgaaatctcctcagatgacgacgcggtggttagcctcctatgtgagtgggccgtcagctgtaaacgctcaggaagacatcgcgccatggttgtggcaaagcttctcgaaaagagacaggcagagattgaagctgagagatgcggggagagtgaagctgccgatgagaagggttctatcgcttccgggagtctgtccgcgccttccgccccgatcttccaggatgtcctgttacagtttctagatacccaggcacctatgctgaccgaccccagatcagagtctgagcgggtagaattctttaatctggtgctgcttttctgcgagctgattcggcacgacgtcttctcccataacatgtacacctgcactctcatttcaagaggcgatctcgccttcggcgcgccggggcctaggccaccatctcctttcgacgaccccgcagatgaccccgagcacaaggaggctgaggggtcctccagtagcaagttggaagaccctggcctatcagaaagtatggatatcgatccatcttcttccgtcctgttcgaggacatggaaaagccagactttagcttattcagtccaaccatgccatgcgagggcaaagggtcgccatccccggaaaaacccgacgttgagaaggaagtcaaacctcctccgaaggagaagatagagggcactctgggggttctctacgatcaaccacgtcacgtgcagtatgccactcacttcccaattcctcaggaggagagttgttctcatgagtgtaaccaaaggttggttgtgctgttcggagtcggaaaacaacgggacgatgcccgacacgccatcaaaaaaattacaaaagatatcctcaaagttctcaaccggaagggcaccgctgaaacagatcagttggcccctatcgtcccactgaatcctggcgacttaacgttcttgggcggcgaggacggccaaaagcgtcgtcgtaaccgacctgaggcatttcctactgctgaagacatattcgccaaattccaacatctgtctcattatgatcagcaccaggtgactgcccaggtctccaggaatgttttggaacagattacctcttttgccttgggtatgtcctaccacctcccactggtacaacacgtgcagttcatctttgatcttatggagtattcgcttagcatctcaggcctcatcgatttcgccatccagctcctgaatgagctcagtgtcgttgaagctgagctattgctgaaatccagcgatcttgtaggtagctatactacctccttgtgtctttgcatcgtggccgtcttacgccactaccacgcctgcctgatcttgaatcaagatcagatggctcaagtgtttgaagggctgtgcggtgttgtgaagcacgggatgaaccggtctgacgggtcatctgccgaaaggtgtattctagcatatttatacgacctctatacctcatgctcccatctgaaaaacaagtttggggagttgtttagcgacttttgttcaaaggtgaagaacactatctattgcaacgtcgagccctcggaaagcaacatgcggtgggccccagaattcatgatagacaccttagagaacccagccgcacacactttcacctatacaggactcggaaagtcgctctctgaaaatcccgcaaatcggtactcttttgtgtgtaacgccctgatgcatgtgtgtgtgggccaccacgatcctgatcgggtcaacgatatcgctatactgtgcgccgaactcaccggctactgcaaaagcttgtcggcggagtggctgggggttttgaaagccctctgttgtagcagcaacaacggcacctgtggcttcaacgacttgctctgcaatgtcgacgtctccgacctgtcttttcacgactcactggccaccttcgtcgctatcctgatcgcccgccaatgcctgcttcttgaggacttgattaggtgcgccgctataccttctctgctcaatgcggcctgctctgagcaggatagcgagccaggcgcccgattaacttgcaggatattgctgcacctgtttaaaacaccgcagctgaatccttgccagtctgacggaaacaaacctaccgtgggaatccgctcttcctgcgacaggcacctgttagccgccagccaaaatcgtattgtcgatggcgccgtgtttgccgtgctcaaggccgtctttgtgttaggcgatgccgagctgaaagggtccggctttacggtaacaggcgggaccgaggagcttcccgaagaggagggcggtggcgggagcggggggaggagacaaggcgggagaaacatatctgtggagacagcctcactggatgtgtacgcaaagtacgttctccggagtatttgtcagcaggagtgggttggagagaggtgtctgaaaagcctgtgcgaagactctaatgatctacaggaccctgtgctcagctctgcacaggcacagaggctgatgcagcttatctgttatccgcacaggctactggacaacgaggacggggagaatccccagaggcagagaattaaaaggatcctgcagaacctggatcagtggaccatgcgacaatcatcactagagctgcagctgatgattaaacagacacccaacaacgaaatgaacagtctgctggagaacatcgccaaagcgactattgaggtcttccagcagtccgccgaaacggggtcatctagtggatcaacggcctccaatatgcctagcagcagcaagaccaagcctgtactcagcagcctggagagatctggagtctggctcgtggcaccactcatagccaaattgccaacctctgtgcaggggcacgttctcaaagcagcaggggaggaactcgaaaagggacagcacttgggctcatccagcaggaaagagagggatcggcagaagcagaagtccatgtctttgctgagtcagcagccctttttgtcccttgtgctcacatgcttgaaaggccaggatgagcagcgcgaagggctcctcacttcactgtactcgcaggtgcaccaaatcgtcaataactggcgcgatgatcaataccttgacgactgtaaacccaaacaacttatgcacgaggctctcaagctcagactgaatcttgtgggggggatgttcgacaccgtacagagatcaacacagcagactacagagtgggctatgctcttgctcgagatcatcatcagtggcacggttgatatgcagtccaataatgagctgttcactaccgtactggatatgctgtcagttttgataaacggtacattggctgcggacatgagcagtatctctcaagggagcatggaggagaataaaagggcatacatgaatctggccaaaaagcttcaaaaggagctaggagaacgccaaagtgactctctagaaaaagtacgccaactgctgccactgcccaagcaaacacgcgacgtgattacttgtgaaccgcagggctcattgatcgacacgaaagggaataagatcgctggctttgactctatcttcaaaaaagagggtctccaggtttcaactaagcagaagatctccccgtgggacctctttgaggggctgaagccaagtgcccctctttcatggggttggtttggcaccgtgagggtcgatcgccgagtggcgcggggtgaggaacagcagcgtctgctcctgtatcacacccatctacgccctcgcccgcgtgcgtactatctagaaccactgccattgcctcccgaagatgaggagcccccagcaccaaccctgttggaacctgaaaagaaagctccagaaccccccaaaaccgataaacctggcgccgccccaccttctacagaagagaggaagaaaaagagcacgaaaggcaagaagcgcagtcaaccggccactaagactgaggactatggaatgggcccggggaggagcggtccctacggggtaacggtgccccccgacctgttacatcaccccaaccccggcagcatcactcatcttaattataggcagggctcgatcggtctctacacccagaaccagccattgcccgcaggaggaccgcgcgtggatccctacagaccagtgaggctgcctatgcaaaaactgccgacccgcccgacctatccaggggttctaccaaccactatgactggagttatgggtctggaaccctcatcctacaaaacatctgtgtatcggcagcagcagcccgccgtgccgcagggacagcggttacggcagcagttgcaggccaagattcagtctcaaggtatgctgggccagtccagcgtgcaccagatgacaccgtcttcctcctacggcctgcagactagtcagggctacactccttatgtgtctcatgtagggctgcaacagcacaccggccctgctggcactatggtacccccttcctactcctcacaaccctaccaatctacccatccctcaaccaatcccacactggtcgatccaacacgccatctgcagcagaggccttctggttatgtgcaccagcaggctccaacttatggacatggtctgaccagcacacagcggtttagtcatcaaaccctgcagcagaccccaatgatcagcactatgacacctatgtccgcacaaggtgtccaggcaggcgttcgctccaccgccattctgcccgaacagcagcagcagcaacagcaacaacaacagcaacaacagcagcagcagcagcagcagcaacagcaacaacaacagcaataccatattcgccagcagcagcagcagcagatccttaggcagcagcagcagcagcagcagcaacaacagcaacagcaacagcagcaacagcaacagcagcagcagcagcagcagcagcaccaacagcagcaacaacagcaagctgccccgccacagcctcagcctcagtcacagccgcagttccagaggcaggggttacagcagactcagcagcagcagcagacggcagcactggtcagacaactgcagcagcagttaagcaatacacagccacagccatccactaacatattcggtcgttactag

SEQ ID NO: 277881 - DNA, 393 bp, Artificial Sequence
  derived and/or modified sequence
tgaacccccaaccggcggcggaagaagcagctgaacgccgccttccttccccaggatgaactgacagccctgaacgtgaagcagggatttaacaatcagccagccgtgtccggggacgaacacggcagcgccaagaacgtgagtttcaatcccgctaagatctcttctaatttctcttctattatcgctgaaaagcttagatgcaacactcttccagacaccggaaggcgtaaacctcaggtaaaccagaaggataatttttggctggtcacggcccgcagccagtctgctataaacacgtggtttacagacttagcaggcactaagccacttacccagctggcaaagaaagtgccaatcttcagtaaaaaggaggaggtcttcgggtactag

SEQ ID NO: 277882 - DNA, 2778 bp, Artificial Sequence
  derived and/or modified sequence
ggcggcagcggcggccggcggcagggcggccggaacatcagcgtggagaccgcgtccctcgatgtttacgccaaatacgtgctccgaagcatttgccagcaggagtgggttggtgaacgctgcttaaaaagcctgtgcgaggactccaatgacttacaggatccagtcttatcatctgcgcaagcccagcgactcatgcagctcatatgctatccccatagactgttagacaatgaagatggagaaaatcctcagcggcaacgaatcaagagaattctacagaatctggatcagtggacaatgcgccagtcttccctggaactacagttgatgatcaagcagacccctaataacgaaatgaactccctgttggagaacattgctaaggctacgatcgaggtgtttcagcaaagcgccgagactgggagtagcagcgggagtaccgcctcaaatatgcctagttcatctaagacgaaacctgtcctgtcttccctggaacgttcaggagtgtggctagtagcacccctgatcgccaagctgccgacttctgttcaaggacacgtgcttaaggcggctggtgaggagttggagaaagggcagcacctgggttcttcatcccgtaaagaacgcgataggcaaaaacaaaaaagtatgagtctgcttagtcagcagccttttctgagcctcgtcctgacctgtttgaaaggacaggacgagcagcgcgagggtcttctgacctcgttgtactctcaggtacaccagatcgtgaataactggagggacgaccagtatctggacgattgcaagcctaagcagctcatgcacgaagcattgaagctccggctgaacctggtcggcgggatgtttgacactgtacagcgcagtacccaacaaaccacagagtgggctatgctcctgctagaaataattataagcggaacagttgatatgcaatctaacaatgagttgttcaccacagtccttgacatgctttccgtgctgattaatggtactctggctgctgatatgtctagcatcagtcagggctctatggaagaaaacaaaagggcgtacatgaatctagctaaaaagcttcagaaagagttgggcgaacgccagagtgatagcctagagaaggtcaggcagcttctgcctcttccaaaacagacccgggacgtgatcacgtgtgaaccccaggggtctctgatcgacactaagggcaacaaaatagccgggttcgattcaatcttcaaaaaagagggcctgcaggtctcaacgaagcaaaaaatttcgccctgggatctcttcgagggcctgaagccttctgctccactttcgtgggggtggttcggaacagttagggtcgaccgccgagtggccagaggcgaggaacagcagaggctgctgttgtatcacacccatcttaggcccaggcctagggcctactatctagaacctttaccactgcctcccgaagacgaagagcctcctgcaccgactttactcgagcccgaaaaaaaagctccagagccacctaaaacagacaagccaggagctgcaccacccagtaccgaagagagaaagaaaaagagtactaagggaaagaaacgcagccagcctgccactaagaccgaagattacgggatgggacctggaagaagtggcccctatggggtaactgtacctcctgatttactgcatcaccctaatccaggcagtatcacgcacctgaattatcgccaaggatcaatcggcctttatacacagaaccagcccctcccagcgggcggcccaagagtcgacccctacaggccagtaaggctgcctatgcaaaagctccctacccgccctacttaccccggcgtgctcccaacaactatgacaggagtgatgggcctggagcccagctcctataagacgtccgtgtatcgacaacagcagcccgctgttccacagggacagcgactgcggcagcagctgcaagcaaagattcagagccagggtatgttagggcaatcaagcgtgcatcagatgacgccctcaagctcttacggcctccagacttcccagggatatacaccatacgtgagtcatgtcgggctccagcagcataccggacctgcggggacgatggtgccgccttcctactcttcccaaccctaccagtctactcaccctagcactaatccaaccctggtggacccgaccaggcatctgcaacagcgcccaagtggctacgtgcaccaacaagcgcccacttatggacatggactaaccagtacccagcgtttttcacatcaaacgctgcagcagacgcccatgatttctacgatgacgccaatgtcagcccagggcgtccaggccggggtcaggtctacagccatcttacctgagcagcagcaacagcagcagcaacagcagcagcaacaacaacagcaacagcagcagcagcaacagcaacaacaacagcagtaccatataagacaacaacaacaacaacagatcctccgccagcaacagcaacaacagcagcagcaacagcaacagcagcaacagcaacaacaacagcagcagcagcagcagcagcagcaccaacagcaacaacaacagcaggctgctccaccccagccccagccccagagccagcctcagtttcagagacaggggcttcaacagacccagcagcagcagcaaacagccgctctggtgcgtcagctgcagcagcagctcagcaatacccagccccagccaagtacgaatatatttggaagatattag

SEQ ID NO: 277883 - DNA, 6542 bp, Artificial Sequence
  derived and/or modified sequence
atggccgcattcggcattctgtcttacgaacaccgacctctaaagcggccacgtctcggcccacccgacgtttatccacaggatcctaaacaaaaggaggacgaactcacagctctgaatgtgaaacaggggtttaacaatcagcccgcagttagtggtgacgagcacgggagtgctaagaatgtgtccttcaatccggcaaaaattagttctaacttttcttcaattattgccgagaaactgcggtgcaacactctgccagacactgggcgtcgtaaaccacaagtcaaccagaaagataatttttggctggttacagccagatcacagtcagcaatcaatacctggtttactgacctcgcaggtactaagcccctaactcagttagcaaaaaaggtgccaatattttcaaaaaaagaggaagtttttggctacctggccaagtacacagtgcccgtaatgagagctgcctggttgataaagatgacatgcgcatattatgcggcaatctcggaaactaaagtgaagaagcggcacgtggacccattcatggaatggacgcagattatcactaaatacctatgggagcaactccaaaagatggcagagtattatagacctggaccagccggatctgggggatgcggcagcactattggcccacttccgcatgatgttgaggtcgctatacgccaatgggattatacagaaaaactggccatgtttatgtttcaggacggaatgctggacagacatgagtttctgacatgggttctcgagtgtttcgaaaaaatccggccaggggaagatgagctcctgaagctcttgctgccgttgctgttgagatactctggcgagttcgtccagtcagcctatctgagccgtcgactggcctacttctgcactcgcagactggccctgcagctagatggcgtatccagtcattcatcccatgtgattagtgcccaaagtacctccacgttgcccactaccccggctccccaacccccaacctcttccaccccttccacaccctttagcgacttgcttatgtgtcctcagcatcggcctctcgtattcggactctcgtgcatcctgcagacgattctcttgtgttgccccagtgccctcgtgtggcactatagtctgacggatagtaggatcaaaaccggaagccccttggatcacttgcccatcgccccttctaacctgcctatgcctgaaggaaattccgcattcacgcagcaagtgagggctaaactacgcgagattgagcagcaaattaaagagagagggcaggccgtggaggttaggtggtcttttgataagtgccaggaggcaacggccggatttactatcggcagggttctgcacacactagaggttctcgactcccactcctttgagagatccgacttctcaaactcgctcgactcgctgtgcaatcgtatctttgggttggggccttctaaagacggccatgagatctcaagtgacgacgacgcggtcgtgagcctcctctgtgaatgggctgtgtcctgcaagagatctgggcgtcacagagccatggttgtcgcgaagttactggaaaaacgacaggccgaaattgaagcggaaagatgtggcgaaagcgaggctgctgacgaaaaggggtcaatcgcgagcggcagcttgtctgcgccttctgctcccatctttcaggacgttctactccagtttctggatacacaggcacctatgctgacggatcctagatcagagtctgaaagggttgagtttttcaatctcgtccttttgttctgcgagctgattaggcacgacgtgtttagccacaatatgtatacatgtaccctaatctcacgtggtgatttggcttttggggctcctggtccacggccaccttccccatttgatgatcctgctgacgaccccgaacataaggaagctgaggggtcttccagttcaaaactagaggacccagggctcagcgaatctatggatatcgatccttcctcctcagtactgttcgaagacatggaaaagcctgattttagcctcttttccccgactatgccgtgtgaaggcaaaggaagtccctctcccgagaaacctgacgttgagaaggaggtgaagcctcctcccaaggagaagatcgagggaacactcggggtgctttatgatcagccgagacacgtacagtacgctacacattttcccattccccaggaggagtcttgctcacacgagtgcaatcagagattggtggtgctctttggggtggggaaacagagggacgatgccaggcacgctataaaaaagataacgaaggatattctgaaggtgctgaacaggaagggcaccgccgaaacagatcagctagcccctattgtccccctgaatcctggtgacttgacctttttaggaggtgaggatgggcagaagcgcagaaggaaccggccagaggcctttccgaccgctgaggacatattcgctaaattccaacatctgagccactatgaccagcatcaggtgacggcacaggtgtcccggaacgtcctagagcagattacgagttttgcgctaggaatgtcctaccacctgccactcgtgcagcacgtgcagtttattttcgaccttatggagtattccctcagcatcagcggattgatcgactttgcaattcagttgttaaacgagctctccgtggtcgaggcagaacttcttctaaagagcagcgacctggttggtagttataccacctcgctttgtctctgtatcgtcgccgtgcttagacactatcacgcttgtctcattttaaatcaggatcaaatggcccaggtatttgaaggactgtgcggcgtagttaagcatggtatgaatcggagtgacggatctagcgccgagcgatgtatccttgcctacctgtatgatttgtatacgagctgctcacacctgaagaataaattcggagagttatttagcgacttctgttctaaggtgaagaatactatctactgtaacgtggagcccagcgagtcaaacatgcggtgggctccagaatttatgattgacaccctggaaaatcccgctgcccacacgtttacatacacgggcctgggcaagtctctatccgagaaccctgctaatagatactcatttgtttgcaacgctctgatgcatgtgtgtgtgggtcatcatgacccggaccgggtgaacgacattgctatcctctgtgcggagctaactggatactgcaagtcactgtccgccgagtggcttggggttttgaaggctttgtgctgcagctctaacaacggcacttgtggtttcaatgacttgctgtgtaatgtggacgtctccgacctctcttttcatgacagcctcgcgacattcgtggctatcctgatcgccaggcagtgtctcctgctcgaagatttaatccgatgtgctgcaatcccctcactccttaatgccgcatgctctgaacaggacagcgagcctggagcacgactaacttgtcgaatcctcctgcacctgttcaagacccctcaacttaatccctgccagagtgatggcaataagcccacagttggtattagatccagctgcgatcgccatctcctggctgctagccagaacaggatcgtggatggggctgtctttgctgtgttaaaagcggtgtttgtgctgggagatgcggagctgaaaggctctggatttaccgttaccgggggaactgaagaactgccagaggaggaggggggaggtggttcagggggacggagacaaggaggccgtaatatctccgtggaaaccgcgtctttggacgtgtacgccaagtacgtcctgcgcagtatttgtcaacaggagtgggttggcgaaagatgtctcaaatctttgtgtgaagattccaacgatctccaggaccccgtgttatcaagcgcacaagcgcaaaggctaatgcagttgatatgttatccccatcgattactcgataatgaagacggggagaacccacagagacagagaattaaacgcatcctccaaaatttagaccagtggacaatgcgccaatctagccttgaacttcaactgatgatcaagcagaccccaaacaacgagatgaactctttgctcgagaatattgccaaggcaaccattgaggtttttcaacagtcggccgaaacagggagttcaagcgggagcaccgcatcaaatatgccaagctcgtctaagacaaagcccgtcctcagctctctggagcgtagcggtgtctggcttgtcgcacccctcattgccaagctgcctacgagcgttcaaggacacgttctgaaggctgccggagaagagctcgagaaggggcaacaccttggctctagctcacggaaggaaagagacagacagaagcagaagtccatgtctctgctgagtcagcagcctttcctgtccctcgtgctaacatgccttaagggtcaggatgagcagcgggaggggctcttgacttccctctacagtcaggttcaccaaattgtcaacaactggagagatgaccagtacttggatgattgtaagcccaagcagctgatgcatgaagccctcaagcttcgcttgaacctggtggggggaatgttcgataccgtccagaggtccacccagcagaccactgagtgggcaatgcttctccttgaaatcataatcagcgggactgtggatatgcagagtaataatgagttgtttaccaccgtcctcgatatgctgagcgtgctcattaacgggacattggctgccgatatgtcatctatttctcaagggagtatggaagagaacaagagagcatatatgaacctagcaaagaaattacaaaaggaactcggcgaacgccagagcgactccctggaaaaggtccgccagttgttgccgcttccgaaacagacccgcgatgttatcacctgtgagcctcagggttctctgatagatactaaaggcaacaaaatagcaggttttgactcaatttttaaaaaagaagggctgcaggtgtcaaccaaacagaaaatttcaccctgggatctgtttgagggccttaaaccttccgcccctctgagttgggggtggttcggcactgtgagggttgatcgacgcgttgcaaggggggaagaacagcagcggttactcctatatcatactcatctgcggcctcgaccgagagcatactacttagagcccctgccactccctcccgaggacgaggaacccccagccccaactctgctggaacccgaaaagaaggcacccgagccccctaagactgataaaccaggcgctgccccaccctcaaccgaagaaaggaaaaagaaaagcacaaagggaaagaagcgctctcagcccgctacgaagacagaggattatggcatgggccctggcagatccggaccatatggagtgacggtccccccagacctgctacatcacccgaaccctggaagcattacacacctcaattacagacagggctctataggcctgtatacacaaaaccagcccttgcccgctggaggccctagagttgacccctacagacctgtgaggctgccaatgcagaagttacccactaggcccacttatccaggcgtgctacccacgactatgacaggagttatggggctcgaaccttcctcctacaaaactagcgtctaccgccaacagcagcctgcggtaccccaggggcagaggctccgccagcagctgcaggccaaaattcagtctcaaggcatgctgggccaatctagcgtgcatcagatgactccttcctcatcatatggattacagaccagccaggggtacacgccttacgtttctcacgtggggcttcaacagcacactgggccagctggcactatggtgcctccttcttacagcagccaaccataccagagtacacaccccagtactaacccgactctggtggatccaacccggcatttacagcaacggccatccggctatgtccatcagcaagcccctacgtacggacacggacttacgtccacgcagcggtttagccaccagactctgcagcagaccccgatgatttctactatgacacccatgtctgctcagggtgtgcaggctggcgtgcgcagtacagctatactacctgaacagcaacaacagcagcagcaacagcagcagcagcagcagcagcaacagcagcaacagcagcagcagcaacagcaacaataccacatacgacagcaacagcagcaacagatactccgtcagcagcaacagcagcaacagcaacagcaacagcagcagcagcagcagcaacagcagcagcagcaacagcaacagcagcaccagcagcagcagcagcagcaggccgcacccccacagccccagcctcaatctcagccccaattccagcgacaaggtctgcaacagacacagcagcagcaacaaaccgcagctctggtgaggcaacttcaacaacaacttagtaatactcagccacaaccatcaacaaacatattcggcagatatta

SEQ ID NO: 277884 - DNA, 393 bp, Artificial Sequence
  derived and/or modified sequence
tgaaccccgaacaggagacgaaaaaaacagctaaatgctgccttcctgccccaagacgagctgacggccctgaacgtaaagcagggctttaacaaccaacccgcagtgtcaggcgacgaacacgggtcggcgaagaatgttagtttcaatccagccaaaatttcttctaacttttcctctataattgcagaaaagctccggtgtaacaccttaccagacaccggacgtagaaagccgcaggtgaatcagaaagacaacttctggcttgtcacggcacggtcccaatcggcgataaacacttggtttactgacctggctggtaccaagccattgactcaactggccaagaaggtgccgatttttagtaaaaaggaggaagttttcggttactag

SEQ ID NO: 277885 - DNA, 2778 bp, Artificial Sequence
  derived and/or modified sequence
ggtgggagtgggggaagaaggcagggcggacgcaacatatctgttgaaactgccagtttggacgtttacgctaagtacgtgctgagatctatatgccagcaggaatgggtgggcgagaggtgtctaaagagtctgtgcgaggattcaaacgatctacaggacccagtccttagttcagcccaagcccagcggttgatgcagctgatttgttatccacaccgcttactggacaacgaggacggggaaaatccacagcgccagagaatcaagaggatccttcagaatctcgaccagtggacgatgcgacaaagttcccttgaactgcagttgatgattaagcaaactcctaataacgagatgaactctcttctcgagaacatcgccaaggctaccattgaggttttccaacagagcgccgagactggctcaagctctggcagtacagcgtcaaacatgccgtcttcctctaagacaaagcccgtgcttagcagcctggaaaggagcggggtgtggctggttgctcctttaatcgccaagctgcccaccagcgtgcagggtcacgtgctgaaggctgcgggagaggaactggagaaaggacagcatctcggttcttcctctcgcaaagagcgggaccgccagaagcagaagtccatgtcgctgctatcgcaacagccttttctttcattggtgctcacctgcctgaagggccaagatgagcaacgggagggcctgctgacctcactttattcacaagtccatcagattgtcaataattggcgggatgaccagtaccttgacgattgtaagccaaagcagctcatgcacgaggctctgaaactccgactgaatctggtgggaggaatgttcgatactgtccagagatcgacccagcagaccaccgaatgggctatgttgttgctggagattatcatatccggcactgttgatatgcagtccaataatgaactcttcacaaccgtcctcgacatgctgagtgtcttgatcaatggaaccctggctgcagatatgtcttcaatctctcagggctctatggaggaaaataagagagcctatatgaacctggcaaagaaactccaaaaggaactgggggaacgccagagcgactccttggaaaaagtgaggcagttattgccactgcccaagcagacacgtgacgtcattacctgtgaacctcagggtagccttatcgatactaagggaaataaaattgccggtttcgacagtatcttcaagaaagaaggcttgcaggtgagtacaaaacaaaagatctctccatgggatctgttcgagggacttaagccatctgctcccctctcatggggctggttcggcaccgtaagggtagacagaagagtggcaagaggagaagagcagcagcggctgctcttgtaccacacacacctcagacccagaccacgcgcttattatctggagcctcttcctctgccaccagaggatgaagagcctcccgctcctacactactcgaacctgaaaaaaaggccccagaacccccaaagactgacaagcccggagcagccccaccctctaccgaggagaggaagaagaaatccaccaaaggcaagaagcgtagccagcctgcgactaagactgaggattatgggatggggcctggacgatccggcccatatggcgtgacagtgcctcccgacctgctgcatcatcccaaccccggttccatcacccacttaaattaccgacaaggtagcattgggctctatacacaaaatcaacctctgcccgcaggtggaccccgtgtagacccatatagaccagtgagactgcccatgcagaaattgcctactcggccaacttaccctggcgtattgcccacgacaatgaccggagttatgggccttgagccctcatcctacaaaacatcggtgtatcgacaacagcagccagccgtaccgcaagggcaacgcctgcgtcagcagttgcaggcgaagattcagtctcaagggatgctgggccagtcctccgtgcaccagatgacccccagcagctcttacggtcttcaaaccagccaggggtataccccttatgtatcccacgtgggcctgcagcagcacacaggacccgcaggcacgatggtgccaccaagctactccagccagccttaccagtcgactcacccatccacaaaccctactctcgtggatcccacacgacatctccagcagcggcctagcggctacgtgcaccaacaggctccgacttatggtcacggattgacaagtacacagcgattttcccatcaaacgctacagcaaacccctatgatcagcactatgacgccaatgagtgcccaaggggttcaagctggagtgagatcgaccgcgatcttacccgagcagcaacagcagcagcagcagcagcagcagcagcagcagcagcagcagcaacaacagcagcaacagcagcagcagcagtatcacatacgccagcagcaacagcagcagattttgagacaacagcagcagcagcagcaacagcagcagcagcaacagcagcagcagcagcaacagcagcagcagcagcagcaacagcatcagcaacagcagcaacagcaagcagctccgccacagccacagcctcaaagtcagccccagttccagcgccagggcctccaacaaacacaacagcagcaacagacggcagctcttgtgcgtcagctgcagcagcagctctctaatacacagcctcagccttccacaaacatatttggccgatattag

SEQ ID NO: 277886 - DNA, 6543 bp, Artificial Sequence
  derived and/or modified sequence
atggccgccttcggcatcctgagctacgagcacagacccctgaagagacccagactgggcccccccgacgtgtacccccaggaccccaagcagaaggaggacgagctgaccgccctgaacgtgaagcagggcttcaacaaccagcccgccgtgagcggcgacgagcacggcagcgccaagaacgtgagcttcaaccccgccaagatcagcagcaacttcagcagcatcatcgccgagaagctgagatgcaacaccctgcccgacaccggcagaagaaagccccaggtgaaccagaaggacaacttctggctggtgaccgccagaagccagagcgccatcaacacctggttcaccgacctggccggcaccaagcccctgacccagctggccaagaaggtgcccatcttcagcaagaaggaggaggtgttcggctacctggccaagtacaccgtgcccgtgatgagagccgcctggctgatcaagatgacctgcgcctactacgccgccatcagcgagaccaaggtgaagaagagacacgtggaccccttcatggagtggacccagatcatcaccaagtacctgtgggagcagctgcagaagatggccgagtactacagacccggccccgccggcagcggcggctgcggcagcaccatcggccccctgccccacgacgtggaggtggccatcagacagtgggactacaccgagaagctggccatgttcatgttccaggacggcatgctggacagacacgagttcctgacctgggtgctggagtgcttcgagaagatcagacccggcgaggacgagctgctgaagctgctgctgcccctgctgctgagatacagcggcgagttcgtgcagagcgcctacctgagcagaagactggcctacttctgcaccagaagactggccctgcagctggacggcgtgagcagccacagcagccacgtgatcagcgcccagagcaccagcaccctgcccaccacccccgccccccagccccccaccagcagcacccccagcacccccttcagcgacctgctgatgtgcccccagcacagacccctggtgttcggcctgagctgcatcctgcagaccatcctgctgtgctgccccagcgccctggtgtggcactacagcctgaccgacagcagaatcaagaccggcagccccctggaccacctgcccatcgcccccagcaacctgcccatgcccgagggcaacagcgccttcacccagcaggtgagagccaagctgagagagatcgagcagcagatcaaggagagaggccaggccgtggaggtgagatggagcttcgacaagtgccaggaggccaccgccggcttcaccatcggcagagtgctgcacaccctggaggtgctggacagccacagcttcgagagaagcgacttcagcaacagcctggacagcctgtgcaacagaatcttcggcctgggccccagcaaggacggccacgagatcagcagcgacgacgacgccgtggtgagcctgctgtgcgagtgggccgtgagctgcaagagaagcggcagacacagagccatggtggtggccaagctgctggagaagagacaggccgagatcgaggccgagagatgcggcgagagcgaggccgccgacgagaagggcagcatcgccagcggcagcctgagcgcccccagcgcccccatcttccaggacgtgctgctgcagttcctggacacccaggcccccatgctgaccgaccccagaagcgagagcgagagagtggagttcttcaacctggtgctgctgttctgcgagctgatcagacacgacgtgttcagccacaacatgtacacctgcaccctgatcagcagaggcgacctggccttcggcgcccccggccccagaccccccagccccttcgacgaccccgccgacgaccccgagcacaaggaggccgagggcagcagcagcagcaagctggaggaccccggcctgagcgagagcatggacatcgaccccagcagcagcgtgctgttcgaggacatggagaagcccgacttcagcctgttcagccccaccatgccctgcgagggcaagggcagccccagccccgagaagcccgacgtggagaaggaggtgaagcccccccccaaggagaagatcgagggcaccctgggcgtgctgtacgaccagcccagacacgtgcagtacgccacccacttccccatcccccaggaggagagctgcagccacgagtgcaaccagagactggtggtgctgttcggcgtgggcaagcagagagacgacgccagacacgccatcaagaagatcaccaaggacatcctgaaggtgctgaacagaaagggcaccgccgagaccgaccagctggcccccatcgtgcccctgaaccccggcgacctgaccttcctgggcggcgaggacggccagaagagaagaagaaacagacccgaggccttccccaccgccgaggacatcttcgccaagttccagcacctgagccactacgaccagcaccaggtgaccgcccaggtgagcagaaacgtgctggagcagatcaccagcttcgccctgggcatgagctaccacctgcccctggtgcagcacgtgcagttcatcttcgacctgatggagtacagcctgagcatcagcggcctgatcgacttcgccatccagctgctgaacgagctgagcgtggtggaggccgagctgctgctgaagagcagcgacctggtgggcagctacaccaccagcctgtgcctgtgcatcgtggccgtgctgagacactaccacgcctgcctgatcctgaaccaggaccagatggcccaggtgttcgagggcctgtgcggcgtggtgaagcacggcatgaacagaagcgacggcagcagcgccgagagatgcatcctggcctacctgtacgacctgtacaccagctgcagccacctgaagaacaagttcggcgagctgttcagcgacttctgcagcaaggtgaagaacaccatctactgcaacgtggagcccagcgagagcaacatgagatgggcccccgagttcatgatcgacaccctggagaaccccgccgcccacaccttcacctacaccggcctgggcaagagcctgagcgagaaccccgccaacagatacagcttcgtgtgcaacgccctgatgcacgtgtgcgtgggccaccacgaccccgacagagtgaacgacatcgccatcctgtgcgccgagctgaccggctactgcaagagcctgagcgccgagtggctgggcgtgctgaaggccctgtgctgcagcagcaacaacggcacctgcggcttcaacgacctgctgtgcaacgtggacgtgagcgacctgagcttccacgacagcctggccaccttcgtggccatcctgatcgccagacagtgcctgctgctggaggacctgatcagatgcgccgccatccccagcctgctgaacgccgcctgcagcgagcaggacagcgagcccggcgccagactgacctgcagaatcctgctgcacctgttcaagaccccccagctgaacccctgccagagcgacggcaacaagcccaccgtgggcatcagaagcagctgcgacagacacctgctggccgccagccagaacagaatcgtggacggcgccgtgttcgccgtgctgaaggccgtgttcgtgctgggcgacgccgagctgaagggcagcggcttcaccgtgaccggcggcaccgaggagctgcccgaggaggagggcggcggcggcagcggcggcagaagacagggcggcagaaacatcagcgtggagaccgccagcctggacgtgtacgccaagtacgtgctgagaagcatctgccagcaggagtgggtgggcgagagatgcctgaagagcctgtgcgaggacagcaacgacctgcaggaccccgtgctgagcagcgcccaggcccagagactgatgcagctgatctgctacccccacagactgctggacaacgaggacggcgagaacccccagagacagagaatcaagagaatcctgcagaacctggaccagtggaccatgagacagagcagcctggagctgcagctgatgatcaagcagacccccaacaacgagatgaacagcctgctggagaacatcgccaaggccaccatcgaggtgttccagcagagcgccgagaccggcagcagcagcggcagcaccgccagcaacatgcccagcagcagcaagaccaagcccgtgctgagcagcctggagagaagcggcgtgtggctggtggcccccctgatcgccaagctgcccaccagcgtgcagggccacgtgctgaaggccgccggcgaggagctggagaagggccagcacctgggcagcagcagcagaaaggagagagacagacagaagcagaagagcatgagcctgctgagccagcagcccttcctgagcctggtgctgacctgcctgaagggccaggacgagcagagagagggcctgctgaccagcctgtacagccaggtgcaccagatcgtgaacaactggagagacgaccagtacctggacgactgcaagcccaagcagctgatgcacgaggccctgaagctgagactgaacctggtgggcggcatgttcgacaccgtgcagagaagcacccagcagaccaccgagtgggccatgctgctgctggagatcatcatcagcggcaccgtggacatgcagagcaacaacgagctgttcaccaccgtgctggacatgctgagcgtgctgatcaacggcaccctggccgccgacatgagcagcatcagccagggcagcatggaggagaacaagagagcctacatgaacctggccaagaagctgcagaaggagctgggcgagagacagagcgacagcctggagaaggtgagacagctgctgcccctgcccaagcagaccagagacgtgatcacctgcgagccccagggcagcctgatcgacaccaagggcaacaagatcgccggcttcgacagcatcttcaagaaggagggcctgcaggtgagcaccaagcagaagatcagcccctgggacctgttcgagggcctgaagcccagcgcccccctgagctggggctggttcggcaccgtgagagtggacagaagagtggccagaggcgaggagcagcagagactgctgctgtaccacacccacctgagacccagacccagagcctactacctggagcccctgcccctgccccccgaggacgaggagccccccgcccccaccctgctggagcccgagaagaaggcccccgagccccccaagaccgacaagcccggcgccgccccccccagcaccgaggagagaaagaagaagagcaccaagggcaagaagagaagccagcccgccaccaagaccgaggactacggcatgggccccggcagaagcggcccctacggcgtgaccgtgccccccgacctgctgcaccaccccaaccccggcagcatcacccacctgaactacagacagggcagcatcggcctgtacacccagaaccagcccctgcccgccggcggccccagagtggacccctacagacccgtgagactgcccatgcagaagctgcccaccagacccacctaccccggcgtgctgcccaccaccatgaccggcgtgatgggcctggagcccagcagctacaagaccagcgtgtacagacagcagcagcccgccgtgccccagggccagagactgagacagcagctgcaggccaagatccagagccagggcatgctgggccagagcagcgtgcaccagatgacccccagcagcagctacggcctgcagaccagccagggctacaccccctacgtgagccacgtgggcctgcagcagcacaccggccccgccggcaccatggtgccccccagctacagcagccagccctaccagagcacccaccccagcaccaaccccaccctggtggaccccaccagacacctgcagcagagacccagcggctacgtgcaccagcaggcccccacctacggccacggcctgaccagcacccagagattcagccaccagaccctgcagcagacccccatgatcagcaccatgacccccatgagcgcccagggcgtgcaggccggcgtgagaagcaccgccatcctgcccgagcagcagcagcagcagcagcagcagcagcagcagcagcagcagcagcagcagcagcagcagcagcagcagcagcagcagtaccacatcagacagcagcagcagcagcagatcctgagacagcagcagcagcagcagcagcagcagcagcagcagcagcagcagcagcagcagcagcagcagcagcagcagcagcagcaccagcagcagcagcagcagcaggccgcccccccccagccccagccccagagccagccccagttccagagacagggcctgcagcagacccagcagcagcagcagaccgccgccctggtgagacagctgcagcagcagctgagcaacacccagccccagcccagcaccaacatcttcggcagatactag

SEQ ID NO: 277887 - DNA, 393 bp, Artificial Sequence
  derived and/or modified sequence
tgaacccccaacagaagaagaaagaagcagctgaacgccgccttcctgccccaggacgagctgaccgccctgaacgtgaagcagggcttcaacaaccagcccgccgtgagcggcgacgagcacggcagcgccaagaacgtgagcttcaaccccgccaagatcagcagcaacttcagcagcatcatcgccgagaagctgagatgcaacaccctgcccgacaccggcagaagaaagccccaggtgaaccagaaggacaacttctggctggtgaccgccagaagccagagcgccatcaacacctggttcaccgacctggccggcaccaagcccctgacccagctggccaagaaggtgcccatcttcagcaagaaggaggaggtgttcggctactag

SEQ ID NO: 277888 - DNA, 2778 bp, Artificial Sequence
  derived and/or modified sequence
ggcggcagcggcggcagaagacagggcggcagaaacatcagcgtggagaccgccagcctggacgtgtacgccaagtacgtgctgagaagcatctgccagcaggagtgggtgggcgagagatgcctgaagagcctgtgcgaggacagcaacgacctgcaggaccccgtgctgagcagcgcccaggcccagagactgatgcagctgatctgctacccccacagactgctggacaacgaggacggcgagaacccccagagacagagaatcaagagaatcctgcagaacctggaccagtggaccatgagacagagcagcctggagctgcagctgatgatcaagcagacccccaacaacgagatgaacagcctgctggagaacatcgccaaggccaccatcgaggtgttccagcagagcgccgagaccggcagcagcagcggcagcaccgccagcaacatgcccagcagcagcaagaccaagcccgtgctgagcagcctggagagaagcggcgtgtggctggtggcccccctgatcgccaagctgcccaccagcgtgcagggccacgtgctgaaggccgccggcgaggagctggagaagggccagcacctgggcagcagcagcagaaaggagagagacagacagaagcagaagagcatgagcctgctgagccagcagcccttcctgagcctggtgctgacctgcctgaagggccaggacgagcagagagagggcctgctgaccagcctgtacagccaggtgcaccagatcgtgaacaactggagagacgaccagtacctggacgactgcaagcccaagcagctgatgcacgaggccctgaagctgagactgaacctggtgggcggcatgttcgacaccgtgcagagaagcacccagcagaccaccgagtgggccatgctgctgctggagatcatcatcagcggcaccgtggacatgcagagcaacaacgagctgttcaccaccgtgctggacatgctgagcgtgctgatcaacggcaccctggccgccgacatgagcagcatcagccagggcagcatggaggagaacaagagagcctacatgaacctggccaagaagctgcagaaggagctgggcgagagacagagcgacagcctggagaaggtgagacagctgctgcccctgcccaagcagaccagagacgtgatcacctgcgagccccagggcagcctgatcgacaccaagggcaacaagatcgccggcttcgacagcatcttcaagaaggagggcctgcaggtgagcaccaagcagaagatcagcccctgggacctgttcgagggcctgaagcccagcgcccccctgagctggggctggttcggcaccgtgagagtggacagaagagtggccagaggcgaggagcagcagagactgctgctgtaccacacccacctgagacccagacccagagcctactacctggagcccctgcccctgccccccgaggacgaggagccccccgcccccaccctgctggagcccgagaagaaggcccccgagccccccaagaccgacaagcccggcgccgccccccccagcaccgaggagagaaagaagaagagcaccaagggcaagaagagaagccagcccgccaccaagaccgaggactacggcatgggccccggcagaagcggcccctacggcgtgaccgtgccccccgacctgctgcaccaccccaaccccggcagcatcacccacctgaactacagacagggcagcatcggcctgtacacccagaaccagcccctgcccgccggcggccccagagtggacccctacagacccgtgagactgcccatgcagaagctgcccaccagacccacctaccccggcgtgctgcccaccaccatgaccggcgtgatgggcctggagcccagcagctacaagaccagcgtgtacagacagcagcagcccgccgtgccccagggccagagactgagacagcagctgcaggccaagatccagagccagggcatgctgggccagagcagcgtgcaccagatgacccccagcagcagctacggcctgcagaccagccagggctacaccccctacgtgagccacgtgggcctgcagcagcacaccggccccgccggcaccatggtgccccccagctacagcagccagccctaccagagcacccaccccagcaccaaccccaccctggtggaccccaccagacacctgcagcagagacccagcggctacgtgcaccagcaggcccccacctacggccacggcctgaccagcacccagagattcagccaccagaccctgcagcagacccccatgatcagcaccatgacccccatgagcgcccagggcgtgcaggccggcgtgagaagcaccgccatcctgcccgagcagcagcagcagcagcagcagcagcagcagcagcagcagcagcagcagcagcagcagcagcagcagcagcagcagcagtaccacatcagacagcagcagcagcagcagatcctgagacagcagcagcagcagcagcagcagcagcagcagcagcagcagcagcagcagcagcagcagcagcagcagcagcagcagcaccagcagcagcagcagcagcaggccgcccccccccagccccagccccagagccagccccagttccagagacagggcctgcagcagacccagcagcagcagcagaccgccgccctggtgagacagctgcagcagcagctgagcaacacccagccccagcccagcaccaacatcttcggcagatactag

SEQ ID NO: 277889 - protein, 2127 aa, Artificial Sequence
  derived and/or modified sequence
EDELTALNVKQGFNNQPAVSGDEHGSAKNVSFNPAKISSNFSSIIAEKLRCNTLPDTGRRKPQVNQKDNFWLVTARSQSAINTWFTDLAGTKPLTQLAKKVPIFSKKEEVFGYLAKYTVPVMRAAWLIKMTCAYYAAISETKVKKRHVDPFMEWTQIITKYLWEQLQKMAEYYRPGPAGSGGCGSTIGPLPHDVEVAIRQWDYTEKLAMFMFQDGMLDRHEFLTWVLECFEKIRPGEDELLKLLLPLLLRYSGEFVQSAYLSRRLAYFCTRRLALQLDGVSSHSSHVISAQSTSTLPTTPAPQPPTSSTPSTPFSDLLMCPQHRPLVFGLSCILQTILLCCPSALVWHYSLTDSRIKTGSPLDHLPIAPSNLPMPEGNSAFTQQVRAKLREIEQQIKERGQAVEVRWSFDKCQEATAGFTIGRVLHTLEVLDSHSFERSDFSNSLDSLCNRIFGLGPSKDGHEISSDDDAVVSLLCEWAVSCKRSGRHRAMVVAKLLEKRQAEIEAERCGESEAADEKGSIASGSLSAPSAPIFQDVLLQFLDTQAPMLTDPRSESERVEFFNLVLLFCELIRHDVFSHNMYTCTLISRGDLAFGAPGPRPPSPFDDPADDPEHKEAEGSSSSKLEDPGLSESMDIDPSSSVLFEDMEKPDFSLFSPTMPCEGKGSPSPEKPDVEKEVKPPPKEKIEGTLGVLYDQPRHVQYATHFPIPQEESCSHECNQRLVVLFGVGKQRDDARHAIKKITKDILKVLNRKGTAETDQLAPIVPLNPGDLTFLGGEDGQKRRRNRPEAFPTAEDIFAKFQHLSHYDQHQVTAQVSRNVLEQITSFALGMSYHLPLVQHVQFIFDLMEYSLSISGLIDFAIQLLNELSVVEAELLLKSSDLVGSYTTSLCLCIVAVLRHYHACLILNQDQMAQVFEGLCGVVKHGMNRSDGSSAERCILAYLYDLYTSCSHLKNKFGELFSDFCSKVKNTIYCNVEPSESNMRWAPEFMIDTLENPAAHTFTYTGLGKSLSENPANRYSFVCNALMHVCVGHHDPDRVNDIAILCAELTGYCKSLSAEWLGVLKALCCSSNNGTCGFNDLLCNVDVSDLSFHDSLATFVAILIARQCLLLEDLIRCAAIPSLLNAACSEQDSEPGARLTCRILLHLFKTPQLNPCQSDGNKPTVGIRSSCDRHLLAASQNRIVDGAVFAVLKAVFVLGDAELKGSGFTVTGGTEELPEEEGGGGSGGRRQGGRNISVETASLDVYAKYVLRSICQQEWVGERCLKSLCEDSNDLQDPVLSSAQAQRLMQLICYPHRLLDNEDGENPQRQRIKRILQNLDQWTMRQSSLELQLMIKQTPNNEMNSLLENIAKATIEVFQQSAETGSSSGSTASNMPSSSKTKPVLSSLERSGVWLVAPLIAKLPTSVQGHVLKAAGEELEKGQHLGSSSRKERDRQKQKSMSLLSQQPFLSLVLTCLKGQDEQREGLLTSLYSQVHQIVNNWRDDQYLDDCKPKQLMHEALKLRLNLVGGMFDTVQRSTQQTTEWAMLLLEIIISGTVDMQSNNELFTTVLDMLSVLINGTLAADMSSISQGSMEENKRAYMNLAKKLQKELGERQSDSLEKVRQLLPLPKQTRDVITCEPQGSLIDTKGNKIAGFDSIFKKEGLQVSTKQKISPWDLFEGLKPSAPLSWGWFGTVRVDRRVARGEEQQRLLLYHTHLRPRPRAYYLEPLPLPPEDEEPPAPTLLEPEKKAPEPPKTDKPGAAPPSTEERKKKSTKGKKRSQPATKTEDYGMGPGRSGPYGVTVPPDLLHHPNPGSITHLNYRQGSIGLYTQNQPLPAGGPRVDPYRPVRLPMQKLPTRPTYPGVLPTTMTGVMGLEPSSYKTSVYRQQQPAVPQGQRLRQQLQQSQGMLGQSSVHQMTPSSSYGLQTSQLSPSSLQGYTPYVSHVGLQQHTGPADPTRHLQQRPSGYVHQQAPTYGHGLTSTQRFSHQTLQQTPMISTMTPMSAQGVQAGVRSTAILPEQQQQQQQQQQQQQQQQQQQQQQQQQQYHIRQQQQQQILRQQQQQQQQQQQQQQQQQQQQQQQQQQHQQQQQQQAAPPQPQPQSQPQFQRQGLQQTQQQQQTAALVRQLQQQLSNTQPQPSTNIFGRY

SEQ ID NO: 277890 - protein, 251 aa, Artificial Sequence
  derived and/or modified sequence
  misc_feature (1)..(1): Xaa can be any naturally occurring amino acid
XERKKKSTKGKKRSQPATKTEDYGMGPGRSGPYGVTVPPDLLHHPNPGSITHLNYRQGSIGLYTQNQPLPAGGPRVDPYRPVRLPMQKLPTRPTYPGVLPTTMTGVMGLEPSSYKTSVYRQQQPAVPQGQRLRQQLQQSQGMLGQSSVHQMTPSSSYGLQTSQGYTPYVSHVGLQQHTGPADPTRHLQQRPSGYVHQQAPTYGHGLTSTQRFSHQTLQQTPMISTMTPMSAQGVQAGVRSTAILPEQQQQQ

SEQ ID NO: 277891 - protein, 2000 aa, Artificial Sequence
  derived and/or modified sequence
MAAFGILSYEHRPLKRPRLGPPDVYPQDPKQKEDELTALNVKQGFNNQPAVSGDEHGSAKNVSFNPAKISSNFSSIIAEKLRCNTLPDTGRRKPQVNQKDNFWLVTARSQSAINTWFTDLAGTKPLTQLAKKVPIFSKKEEVFGYLAKYTVPVMRAAWLIKMTCAYYAAISETKVKKRHVDPFMEWTQIITKYLWEQLQKMAEYYRPGPAGSGGCGSTIGPLPHDVEVAIRQWDYTEKLAMFMFQDGMLDRHEFLTWVLECFEKIRPGEDELLKLLLPLLLRYSGEFVQSAYLSRRLAYFCTRRLALQLDGVSSHSSHVISAQSTSTLPTTPAPQPPTSSTPSTPFSDLLMCPQHRPLVFGLSCILQTILLCCPSALVWHYSLTDSRIKTGSPLDHLPIAPSNLPMPEGNSAFTQQVRAKLREIEQQIKERGQAVEVRWSFDKCQEATAGFTIGRVLHTLEVLDSHSFERSDFSNSLDSLCNRIFGLGPSKDGHEISSDDDAVVSLLCEWAVSCKRSGRHRAMVVAKLLEKRQAEIEAERCGESEAADEKGSIASGSLSAPSAPIFQDVLLQFLDTQAPMLTDPRSESERVEFFNLVLLFCELIRHDVFSHNMYTCTLISRGDLAFGAPGPRPPSPFDDPADDPEHKEAEGSSSSKLEDPGLSESMDIDPSSSVLFEDMEKPDFSLFSPTMPCEGKGSPSPEKPDVEKEVKPPPKEKIEGTLGVLYDQPRHVQYATHFPIPQEESCSHECNQRLVVLFGVGKQRDDARHAIKKITKDILKVLNRKGTAETDQLAPIVPLNPGDLTFLGGEDGQKRRRNRPEAFPTAEDIFAKFQHLSHYDQHQVTAQVSRNVLEQITSFALGMSYHLPLVQHVQFIFDLMEYSLSISGLIDFAIQLLNELSVVEAELLLKSSDLVGSYTTSLCLCIVAVLRHYHACLILNQDQMAQVFEGLCGVVKHGMNRSDGSSAERCILAYLYDLYTSCSHLKNKFGELFSDFCSKVKNTIYCNVEPSESNMRWAPEFMIDTLENPAAHTFTYTGLGKSLSENPANRYSFVCNALMHVCVGHHDPDRVNDIAILCAELTGYCKSLSAEWLGVLKALCCSSNNGTCGFNDLLCNVDVSDLSFHDSLATFVAILIARQCLLLEDLIRCAAIPSLLNAACSEQDSEPGARLTCRILLHLFKTPQLNPCQSDGNKPTVGIRSSCDRHLLAASQNRIVDGAVFAVLKAVFVLGDAELKGSGFTVTGGTEELPEEEGGGGSGGRRQGGRNISVETASLDVYAKYVLRSICQQEWVGERCLKSLCEDSNDLQDPVLSSAQAQRLMQLICYPHRLLDNEDGENPQRQRIKRILQNLDQWTMRQSSLELQLMIKQTPNNEMNSLLENIAKATIEVFQQSAETGSSSGSTASNMPSSSKTKPVLSSLERSGVWLVAPLIAKLPTSVQGHVLKAAGEELEKGQHLGSSSRKERDRQKQKSMSLLSQQPFLSLVLTCLKGQDEQREGLLTSLYSQVHQIVNNWRDDQYLDDCKPKQLMHEALKLRLNLVGGMFDTVQRSTQQTTEWAMLLLEIIISGTVDMQSNNELFTTVLDMLSVLINGTLAADMSSISQGSMEENKRAYMNLAKKLQKELGERQSDSLEKVRQLLPLPKQTRDVITCEPQGSLIDTKGNKIAGFDSIFKKEGLQVSTKQKISPWDLFEGLKPSAPLSWGWFGTVRVDRRVARGEEQQRLLLYHTHLRPRPRAYYLEPLPLPPEDEEPPAPTLLEPEKKAPEPPKTDKPGAAPPSTEERKKKSTKGKKRSQPATKTEDYGMGPGRSGPYGVTVPPDLLHHPNPGSITHLNYRQGSIGLYTQNQPLPAGGPRVDPYRPVRLPMQKLPTRPTYPGVLPTTMTGVMGLEPSSYKTSVYRQQQPAVPQGQRLRQQLQQSQGMLGQSSVHQMTPSSSYGLQTSQGYTPYVSHVGLQQHTGPADPTRHLQQRPSGYVHQQAPTYGHGLTSTQSFHTRHCSRHP

SEQ ID NO: 277892 - DNA, 6384 bp, Artificial Sequence
  derived and/or modified sequence
gaggacgaactcacagccctaaacgtcaaacagggattcaataaccagccggcggtgtctggagatgaacacggttccgctaagaatgtcagttttaacccagccaagatcagctccaattttagtagcatcatagccgagaaactgcgttgcaataccctaccagacacaggacgccgtaagccacaggtgaatcaaaaggacaacttctggctggtgacagcacgatctcagagcgccatcaacacctggttcaccgacttagcaggcactaagccactcacacagctggcaaagaaagtgcctatcttctccaagaaagaggaggtctttggatatctagccaaatacacagtgcctgtgatgagagctgcatggttaatcaaaatgacttgtgcgtactatgcggcgatatccgaaacaaaggtgaaaaaacgccatgtcgatccgtttatggaatggactcagatcatcacgaagtatctgtgggagcagttgcagaagatggccgagtattacaggccagggcctgccggttcaggcggctgtggaagcactatcgggcccctgccccacgatgttgaggtggccatccggcagtgggattataccgaaaaattagccatgtttatgtttcaggacggcatgcttgacaggcacgagttcctaacctgggtactggagtgctttgagaagattagacccggcgaggatgagctgctgaagcttctgttgccgctgctgctccggtactcaggggaatttgtgcaaagtgcctacttatctcgcagactagcttacttttgcactcgccggcttgctcttcagctagacggtgtttcttctcactcgtctcacgttatctcggctcagagcacttcaacccttcctaccactcctgccccacagccccccacctccagtacgcctagcacccctttctccgatctcctcatgtgtccccagcacaggcctttggtgttcggcctgtcctgtattctgcagaccatattactgtgttgcccctcagcgttagtctggcactactccctgactgacagccgaatcaagactggctcacctttggatcatttgccaatcgccccaagcaacctacccatgccagaggggaatagcgcattcactcagcaggtcagggccaaattgcgagaaatcgaacagcagattaaagaaaggggccaggcagtggaagttaggtggagttttgataagtgtcaggaggcaacggccgggttcacgattgggcgggttctgcacacactggaggtgctggattctcatagtttcgaacgaagcgatttctccaacagtttggactccctctgcaatcgaatatttgggctcggtcccagtaaagacggccacgaaatctcatcagatgacgatgcagtcgttagcctcctctgcgaatgggcagttagctgcaaacgatccggccgccaccgagctatggttgtggcgaaattgctcgagaagaggcaggctgaaatcgaggcagagcgctgcggtgaatccgaagccgcagatgagaagggttcaattgcttcaggaagcctgagcgccccatcagccccaatatttcaggatgtgttgctccagttcctcgatactcaagctcctatgctcacggatcctcgctcagaatcagagagggtggagttttttaacctggtgctcctgttctgtgaacttattcgtcacgacgttttttcacataatatgtacacctgcactctaatttctcggggggaccttgcctttggcgcaccgggaccccggccaccctccccatttgatgatcctgcggatgatcctgagcataaggaggccgagggatcctcctccagcaagttggaggatccaggtctgagcgagtctatggacatcgatccgtcttcctctgttttgttcgaagacatggagaagccagacttttctctcttctcacccacgatgccttgcgagggcaaaggatcgccttcacccgagaagccagatgtggaaaaagaggtgaagccccccccaaaggaaaagatcgaagggaccctaggcgtgctatacgatcagccaaggcatgtgcagtacgccacacacttccccatcccacaagaggaatcttgctctcacgaatgcaaccaacggctagtcgtgctgtttggtgtggggaagcagagggacgatgcacgacacgcgatcaaaaaaataacaaaggatattctgaaggtgttgaatcggaaaggcacagccgagaccgaccagctcgcccccattgtgcccctcaaccctggagacctcactttcctgggtggcgaagacggtcagaagaggaggagaaataggcctgaagcgttcccaacagccgaagatatattcgccaagttccagcatctgtcgcactacgatcagcaccaagtcactgctcaggtctcacggaacgtactggagcagataacaagcttcgccctggggatgagttatcacctgcccttagtacagcatgtgcaatttatcttcgatctcatggagtatagcctgtcaatctctggccttatcgatttcgccatccaactactgaatgagttgtcagtggtcgaagccgagctcctcctcaagagttccgacctggtgggcagttatacgactagcttgtgcttgtgcatcgtggcggtcttaagacattatcacgcctgcctcattctgaaccaagatcaaatggcacaggtctttgagggtctatgtggagtggtgaagcatggaatgaatagatccgacgggtccagcgcagagagatgcattctggcttacttgtacgacctgtacacttcctgctcccatctaaaaaacaaatttggggaactgttctccgacttctgctccaaggtgaaaaacacaatctattgcaacgtggaaccaagcgagtctaatatgcggtgggcccccgaattcatgatagataccttggagaatccagccgcacatactttcacctacacaggattggggaaaagcttatccgagaatcctgccaacaggtactcattcgtatgcaatgccctgatgcacgtgtgcgtcggccaccacgacccggatcgggttaatgacatagcaatcctgtgcgctgagctcaccggttattgtaagagcctatccgccgaatggttaggggttcttaaggctttatgttgcagttctaacaatggaacctgtggcttcaatgacctgctctgtaatgtggatgtgtcggacctgtctttccacgactcactggcaactttcgtggccattctgatcgctagacagtgcctccttctggaggatcttatccgttgcgcggcaattccatccttgctcaacgccgcttgtagtgagcaggactctgaacccggtgcccggcttacgtgtagaattctgctccacttattcaaaaccccccagctaaacccctgtcaatccgatgggaataagcctaccgttgggattagaagcagctgtgacagacacctgcttgccgcgtcacagaatcgtattgtcgatggagcagtgtttgccgtcctcaaggcggtgttcgttctaggcgacgcagagctcaaaggatccgggtttactgtaaccgggggaaccgaagagttgcccgaagaagagggggggggcgggagcggaggccggcggcaggggggccgcaatatttccgtggaaacagccagcctggacgtgtatgccaagtacgtcctgaggagtatatgccagcaggaatgggtgggcgaacggtgcctgaagtcgctgtgtgaggattctaacgatcttcaagaccctgttctgagcagtgctcaggcccaaagattgatgcagttgatctgctacccccatagactactcgacaacgaggacggggaaaatcctcagaggcagaggattaaacggatcttgcagaatttggaccaatggactatgcgccagtcctcattagaacttcagctgatgatcaaacaaacacccaacaatgaaatgaacagcctcctcgagaacatagcaaaggccaccatcgaggtattccaacaaagcgccgaaacaggctcttcaagcggcagcaccgcgtcaaatatgccttcaagtagcaagacaaaacccgtcttgagttcccttgaacggtcgggcgtgtggctggtggcacctctcatcgctaaattaccaacatcagtgcagggccatgtgctcaaggcggccggggaagaactggagaaggggcaacacctcggctcatccagccggaaagagagggaccgccagaaacagaaaagtatgagcctgttgtcacagcagccgtttctctcactggttctaacatgcctgaaggggcaagatgagcaacgcgagggcttattaacaagcctatacagtcaggtacatcagatagtaaacaactggcgggatgatcaatatcttgatgattgtaaacccaagcagttaatgcatgaggctctgaaactccgccttaatcttgtaggaggtatgtttgacacagtccagagatccactcagcagactacagaatgggctatgctgttgctcgagatcatcatctcggggaccgttgacatgcagtcaaataatgagctgtttaccacagtgcttgatatgttatctgtgctgattaacggaacgctcgccgctgatatgtcctcaataagccagggatccatggaggagaataagcgtgcctacatgaatttggcaaagaaactgcagaaagagctgggtgagagacagtccgatagtcttgaaaaggtgcgtcagctgctgccactgcccaaacagactcgggatgtaattacatgcgagccacagggatctctcattgataccaaggggaataagatcgctggtttcgactcaatcttcaagaaagaagggctgcaagtgagtaccaagcagaaaatctcaccttgggatctcttcgaaggcctgaaaccttctgcccctctgagctgggggtggtttgggacagtcagagtggacaggagggttgcgcgtggggaggagcagcagaggctcctgctctaccatacacacctccgcccaagacccagggcttattacttagaaccgctccccctgcctcctgaagacgaggagccaccggctccaacactcctggagcctgagaaaaaggcccccgaacctcctaaaacagacaagcccggtgccgccccgccatctactgaagaacggaagaaaaaaagtactaaaggaaagaagagaagtcagcctgcaactaagacagaggattatgggatggggccaggccgcagcggtccctacggcgtaaccgtaccccccgatttgctacatcatcctaatcccgggtctattacgcatcttaattaccgtcagggctctatcggtctgtacacacagaatcaacccctgcctgccggaggccctagggtggatccctatagaccggtgcggctacctatgcaaaagttgcctacccgtcccacatatcctggggttctcccaacgacgatgacaggggtcatgggcctggagccctcctcatacaaaactagcgtgtaccggcagcaacagccggcggtgccccaaggccagaggctgcgccagcagctgcagcagagccagggtatgctcggacagtctagtgtgcaccagatgacaccaagtagtagctatggactgcagacgagccagctctcacctagctctcttcagggctacaccccctatgtctcccatgtcgggctacaacagcatactggccccgctgacccaacgagacacttgcagcagaggccatctgggtacgtgcaccagcaagcccctacctatggccacggactgacctcaacgcagcgcttctcgcatcaaaccctgcagcagacccccatgattagtacaatgacacctatgtcggcacagggcgtgcaggcaggcgtcaggtctaccgctattctgcccgagcaacagcagcagcagcagcagcagcagcagcaacagcaacagcagcaacagcagcagcagcagcaacaacaacagcagtaccacatcaggcagcaacaacagcagcaaattttgcgccagcagcagcagcagcagcagcagcagcagcaacagcagcagcagcagcagcagcagcagcagcagcagcagcagcagcaccaacagcagcagcagcagcaggcagcacccccccagccacaacctcagtcccaacctcagttccagcggcagggcctgcagcaaacccagcagcagcagcaaactgctgcgcttgttaggcagttgcagcaacaactgtcaaatacgcagccacaaccctccaccaacatatttggcaggtactag

SEQ ID NO: 277893 - DNA, 756 bp, Artificial Sequence
  derived and/or modified sequence
taggagaggaaaaagaaatctacgaagggcaaaaagagatcgcagcctgcaactaagacagaagactacggaatgggccctgggaggtccggcccctacggagtcactgtgccgccagatctgctgcatcaccctaatcctggctccattactcacctgaactaccggcagggcagtataggcttgtatacgcagaaccagcccctacccgctggcggcccaagagttgatccttaccggcctgtgaggttgcctatgcagaagttacccactcgaccgacttatcccggggtgctccccaccacgatgaccggagtgatgggcttggagcctagcagctacaagacatctgtttacaggcagcaacaacccgcagtcccacagggtcagaggctgcggcagcagctccagcaatcccagggtatgcttggccagagcagtgtgcaccagatgaccccgtcatcaagttatggattgcagaccagtcagggttatacgccctacgtatcacatgtgggattgcaacagcatacagggcctgccgatccgacgcgtcacttacagcaacgaccaagtggctatgttcaccagcaggcacccacttacggacatggtctgaccagtacacagcgtttttctcaccagactctccagcagacaccaatgatctcaaccatgacgcccatgtcagcgcagggcgtgcaggccggcgtacgtagtacagcaattctcccggaacagcaacagcagcaatag

SEQ ID NO: 277894 - DNA, 6003 bp, Artificial Sequence
  derived and/or modified sequence
atggcggccttcgggatactgtcctacgagcatcggcctctgaaaaggccccgcttgggaccaccggatgtttacccccaggacccaaagcagaaggaagacgagctaaccgctctcaacgtcaagcagggatttaacaatcagccagcagtgagcggtgacgagcatggctcggccaaaaacgtttctttcaatcctgccaaaatatcatcaaacttcagcagtattatcgcagagaaacttagatgcaacacgcttccggataccggccggagaaagccgcaggtgaaccaaaaagacaacttttggttggtcacagcacgaagccagtctgccattaacacctggttcacggacctggcgggaactaagccacttacacagctggccaagaaagtacctatcttttctaagaaagaagaggtgtttggatatcttgctaagtacacagttcctgtgatgcgcgcagcttggttgatcaaaatgacgtgtgcctactacgccgctataagcgagacaaaggtgaagaagcgacatgttgatccctttatggagtggacccaaatcattacaaaatatttgtgggagcagcttcagaaaatggccgaatactatcgccccggcccagctggaagtggaggatgcggatctacgatcgggcctttgcctcatgacgtggaggtagctatacgtcagtgggattacacagaaaagcttgctatgtttatgttccaggatggcatgctcgacagacacgaatttcttacgtgggttttggaatgctttgaaaaaatccggccaggtgaggacgagctgcttaagctgctccttccactcctgctaaggtatagcggtgaattcgtgcagtcagcttacttaagcaggcggcttgcctatttttgtaccaggcggctggcgttgcagctggacggagttagcagccactcatctcacgtaatttccgctcaatcaacttctaccctgcctaccacccctgcaccccagccccctacatctagcacccccagcacccccttctctgatttgctaatgtgcccccagcatcgcccactcgtgtttggactgtcttgtattctgcaaacgatcctgctgtgttgtcccagcgcccttgtatggcactactcacttaccgactcccgaataaagaccggctcacccttggatcatctccccatcgctccctctaacctcccaatgccagagggaaattccgccttcactcagcaggtgagggcaaaactgcgcgagatagagcagcagataaaagagagggggcaggccgtagaagtccgatggagtttcgataaatgccaggaggcgactgccgggttcacaatcggtcgcgtgttgcacaccctggaggtgctcgacagtcactcattcgaacgaagtgacttctctaatagtcttgattccctgtgtaaccgaatatttgggttgggcccatcaaaggatggccacgagatcagctctgacgacgacgctgtggtttccttattatgcgagtgggcagtctcgtgtaaacgatccgggcgtcacagagcaatggtggtggcaaaacttctggaaaagagacaagctgagatcgaggccgagcgctgcggggaatccgaggctgccgatgaaaaaggtagtattgcctctggatcgctgagcgctcccagcgctcctatctttcaggacgtgctactccagtttctagacacgcaggcacccatgctgaccgacccacgcagtgaatcagaacgagtggagttcttcaatctcgtcctcctgttctgcgaactgattcgccacgacgtcttctcacacaatatgtatacttgtaccctgatttcaagaggcgatctggctttcggggccccggggccaagaccccctagcccattcgatgatccagccgacgatccggagcacaaggaggcggaagggtcaagcagtagcaaactggaggatcccggactgtcggaaagcatggatatcgacccatctagctcagtcttattcgaggacatggaaaagccggatttttcccttttctctccgacaatgccatgcgaaggcaaagggtcgccatctcccgagaagcctgacgtggagaaggaggtcaagcctccacccaaagaaaaaatcgagggtactttgggagtgttgtacgaccagccaagacatgtgcaatacgctacacacttccctattccacaggaagaatcttgtagccatgaatgtaatcaaaggctagtcgttctgtttggagtcggtaagcagcgagatgacgcacgacacgccattaagaagataaccaaagatattctcaaagtgctgaatcggaagggcacagctgagactgatcaattggctccaattgtcccgttgaacccaggcgatctgacctttctgggcggcgaggacgggcagaaacgacggcgaaacaggccagaagcattccccaccgctgaagacatttttgccaagttccagcatctaagccactatgatcaacaccaggtgactgcccaggtcagccgtaacgtgctggaacagatcacctccttcgcgctcgggatgagctaccacctgccattggtgcagcatgtccagtttatctttgacctcatggaatattcattgagcattagcgggctgattgatttcgccatccagctgctgaacgaacttagtgtggttgaggctgaacttcttctcaaatcctcagatctggttggcagttacaccactagtctgtgcctgtgtatcgtcgcggtgctgcgccactatcacgcatgtttaattttgaaccaagaccagatggcccaagtatttgagggcctgtgcggcgtcgtcaaacacgggatgaacaggagtgacggttcttctgctgaacggtgtatcctcgcgtacctgtacgatttgtatacctcatgtagccacctgaaaaataagttcggcgaactgttctccgatttttgtagtaaggtgaagaataccatctactgtaatgtggaaccgtctgaaagcaatatgaggtgggctccagagtttatgattgataccttagagaaccccgccgcccataccttcacctatacaggccttggcaagagtttgtctgagaatcctgccaaccgctattcattcgtctgcaatgcactgatgcacgtctgtgtgggtcatcatgatcccgacagagttaacgacatcgctattttatgtgcggagctgactgggtactgcaagagtctttctgccgaatggctgggtgttttgaaagccctgtgttgcagctccaacaacggcacctgcggctttaatgatctcctgtgtaacgtagacgtaagcgacctcagcttccacgactcgctggcaacttttgttgccattctcatagctagacagtgtcttctgcttgaggacctaatccgttgtgccgctataccctcattgctcaacgctgcctgcagcgagcaagatagcgagcctggagcccggcttacatgtagaatcctcttgcacctattcaagactccacagctgaatccctgccagtccgatggaaacaaaccaacagtgggaataagatcctcatgcgatcgccatttactcgccgctagccaaaacaggatagtggacggcgcagtgtttgccgtgttgaaggctgtgttcgtcctcggtgacgcagaactcaaaggctccgggttcaccgtgaccggaggaaccgaggaactaccagaggaggagggcggcggagggtctgggggccggaggcagggagggagaaatatctctgtcgagactgccagtcttgacgtgtacgcgaaatacgtcctgagaagcatctgccagcaggaatgggtcggagagcgctgcctcaagtccctgtgtgaagacagtaatgacctgcaagacccagtcctctctagcgcacaagcccaacgactcatgcagctgatctgctatccacatagactactcgataatgaagatggggagaatccccagcgacagcgcattaagcggatcctccagaatctggatcagtggactatgcgacaatcctctctggaattacagcttatgatcaagcaaaccccaaataacgagatgaattccctactggagaacatcgctaaggccacaatcgaggtgtttcaacagtcggctgagacgggatcgtcttctgggtcaaccgcatctaatatgcccagtagcagtaagacgaaaccggtgttatctagcctggagcgctctggagtctggctagtggcacccctcatagccaagctgcctacaagcgtgcagggacacgtgctgaaagccgcaggagaggagctcgagaaaggacagcatttgggctccagcagcaggaaagagcgcgatcggcaaaaacagaagtccatgtccttactctcacagcagcctttcctcagcctggtcctgacctgcctgaaagggcaggatgaacagcgcgagggactgttaacttcgctttatagccaagtacatcagatcgtaaacaattggagggatgatcaatacttggatgactgtaagccgaagcaactgatgcacgaggcgttaaagctgcggctgaatctcgttgggggcatgtttgatactgtacagcggtcaactcagcagacaaccgaatgggccatgctgctgctggagatcatcatttccgggaccgtagacatgcagtcaaacaatgagctgttcactacagtgctggacatgctaagcgtcctcatcaatggcactttagctgcagatatgagtagcatttcgcaaggctcaatggaggagaataagcgtgcatacatgaatctagcaaagaagctgcagaaggagctgggagagagacaatcggattcattagagaaggtccgccagctccttcctctgcctaagcagacacgggacgtgatcacgtgcgaacctcaaggtagccttattgatactaagggaaacaagatcgccggttttgactcgatctttaaaaaggagggactgcaggtgtccaccaagcagaaaatttcaccttgggacctatttgagggactgaagccatcggcccccctgagttggggatggttcggcaccgtacgtgtagacagaagggttgctcgcggagaggaacagcagaggctgctgctgtaccacactcacctgcgacctcgaccacgcgcttattacttggagcccctgccactgcctccagaagacgaagaaccacccgccccaaccctgctggagccagaaaagaaggctcccgagcctccaaaaactgataagcctggcgctgcacccccaagcactgaggaaagaaaaaaaaaaagcacgaaaggcaagaaaagaagtcagcccgctacaaagacagaggattacggtatgggtccagggagatccggaccatacggagttactgtcccccctgaccttctacaccatcccaaccctggcagcatcacacatcttaactaccggcagggatccatcggtttgtatacacagaaccagcctctgccagcagggggcccccgcgtcgatccttaccgtccagtcaggcttcccatgcagaagcttcccaccaggcctacctatcctggagtgctgcccacaacaatgacaggggttatgggactagagccaagctcttataagacttccgtctacagacagcaacaacctgctgtgccgcaagggcagaggctacgacaacagctgcagcagtcacagggaatgttgggacaatccagcgtgcatcagatgaccccctcttcatcatatggacttcagacttcacagggatatactccctacgtgagtcacgttggcctgcaacagcatacaggtccggcagatcccactcgacatctgcaacagagaccttccggctacgtgcaccagcaggccccaacctatggccacggcctgacgtctactcaatcttttcatacacgtcactgctcaaggcatccctag

SEQ ID NO: 277895 - DNA, 6384 bp, Artificial Sequence
  derived and/or modified sequence
gaagatgagctgacagccctgaatgtgaagcagggcttcaacaaccagcctgctgtgtctggagatgagcacggcagcgccaagaatgtgtccttcaacccagccaagatcagcagcaacttcagcagcatcatcgccgagaagctgcgctgcaacaccctgcctgacacaggaagaaggaagccccaggtgaaccagaaggacaacttctggctggtgacagcccggagccagagcgccatcaacacctggttcacagacctggccggcaccaagcccctgacccagctggccaagaaggtgcccatcttcagcaagaaggaggaggtgtttggctacctggccaagtacacagtgcctgtgatgagagctgcctggctgatcaagatgacctgtgcctactatgctgccatcagcgagaccaaggtgaagaagagacatgtggaccccttcatggagtggacccagatcatcaccaagtacctgtgggagcagctgcagaagatggccgagtactacagacctggccctgctggcagcggcggctgcggcagcaccatcggccccctgccccatgatgtggaggtggccatccggcagtgggactacacagagaagctggccatgttcatgttccaggacggcatgctggacagacatgagttcctgacctgggtgctggagtgctttgagaagatccggcctggagaagatgagctgctgaagctgctgctgcccctgctgctgcgctacagcggggagtttgtgcagagcgcctacctgagccggcggctggcctacttctgcacccggcggctggccctgcagctggatggagtgagcagccacagcagccacgtgatcagcgcccagagcaccagcaccctgcccaccaccccagccccccagccccccaccagcagcacccccagcacccccttcagtgacctgctgatgtgcccccagcaccggcccctggtgtttggcctgagctgcatcctgcagaccatcctgctgtgctgccccagcgccctggtgtggcactacagcctgacagacagccgcatcaagacaggcagccccctggaccacctgcccatcgcccccagcaacctgcccatgcctgagggcaacagcgccttcacccagcaggtgcgggccaagctgcgggagattgagcagcagatcaaggagcggggccaggccgtggaggtgcgctggagctttgacaagtgccaggaggccacagctggcttcaccatcggccgggtgctgcacaccctggaggtgctggacagccacagctttgagaggagtgacttcagcaacagcctggacagcctgtgcaaccgcatcttcggcctgggccccagcaaggatggccacgagatcagcagtgatgatgatgctgtggtgtccctgctgtgtgagtgggccgtgtcctgcaagaggagcggccgccaccgggccatggtggtggccaagctgctggagaagaggcaggccgagattgaggccgagcgctgtggggagagcgaggccgcagatgagaagggcagcatcgccagcggcagcctgagcgcccccagcgcccccatcttccaggatgtgctgctgcagttcctggacacccaggcccccatgctgacagaccccaggtctgagagcgagcgggtggagttcttcaacctggtgctgctcttctgtgagctgatcagacatgatgtgttcagccacaacatgtacacctgcaccctcatcagcagaggagacctggccttcggggcccctggccccaggcctcccagcccctttgatgatcctgcagatgatcctgagcacaaggaggccgagggcagcagcagcagcaagctggaggaccccggcctgtctgagagcatggacatcgaccccagcagctctgtgctgtttgaggacatggagaagccagacttcagcctcttcagccccaccatgccctgtgagggcaagggcagccccagccctgagaagccagatgtggagaaggaggtgaagcccccacccaaggagaagattgagggcaccctgggcgtgctgtatgaccagcccaggcatgtgcagtatgccacccacttccccatcccccaggaggagagctgcagccatgagtgcaaccagaggctggtggtgctgtttggagtgggcaagcagagagatgatgcccggcatgccatcaagaagatcaccaaggacatcctgaaggtgctgaacagaaaaggaacagctgagacagaccagctggcccccatcgtgcccctgaaccctggggacctgaccttcctgggcggggaggatggccagaagagaagaagaaacagacctgaggccttccccacagctgaggacatctttgccaagttccagcacctgagccactatgaccagcaccaggtgacagcccaggtgtccagaaatgtgctggagcagatcaccagctttgccctgggcatgagctaccacctgcccctggtgcagcacgtgcagttcatctttgacctgatggagtacagcctgagcatcagcggcctgattgactttgccatccagctgctgaatgagctgtctgtggtggaggccgagctgctgctgaagagcagtgacctggtgggcagctacaccaccagcctgtgcctgtgcatcgtggccgtgctgcggcactaccacgcctgcctgatcctgaaccaggaccagatggcccaggtgtttgagggcctgtgtggggtggtgaagcacggcatgaacagaagtgatggcagcagcgctgagcgctgcatcctggcctacctgtatgacctgtacaccagctgcagccacctgaagaacaagtttggagagctgttcagtgacttctgcagcaaggtgaagaacaccatctactgcaatgtggagcccagcgagagcaacatgcgctgggcccctgagttcatgattgacaccctggagaacccagctgcccacaccttcacctacacaggcctgggcaagagcctgtctgaaaatcctgccaaccgctacagctttgtgtgcaatgccctgatgcacgtgtgtgtgggccaccacgaccctgacagagtgaatgacatcgccatcctgtgtgccgagctgaccggctactgcaagagcctgtctgctgagtggctgggcgtgctgaaggccctgtgctgcagcagcaacaacggcacctgtggcttcaatgacctgctgtgcaatgtggatgtgtctgacctgtccttccatgacagcctggccacctttgtggccatcctgattgcccggcagtgcctgctgctggaggacctgatccgctgtgccgccatccccagcctgctgaatgctgcctgcagcgagcaggacagcgagcccggggcccggctgacctgccgcatcctgctgcacctgttcaagaccccccagctgaacccctgccagagtgatggcaacaagcccaccgtgggcatccgcagcagctgtgacagacacctgctggccgccagccagaacagaattgtggatggagctgtgtttgctgtgctgaaggctgtgtttgtgctgggagatgctgagctgaagggcagcggcttcaccgtgactggaggaacagaggagctgcctgaggaggagggcggcggcggcagcggcggccggcggcagggcggcaggaacatctctgtggagacagccagcctggatgtgtatgccaagtatgtgctgcggagcatctgccagcaggagtgggtgggggagcgctgcctgaagagcctgtgtgaggacagcaatgacctgcaggaccctgtgctgagcagcgcccaggcccagaggctgatgcagctgatctgctacccccaccggctgctggacaatgaagatggagagaacccccagaggcagaggatcaagaggatcctgcagaacctggaccagtggaccatgaggcagagcagcctggagctgcagctgatgatcaagcagacccccaacaatgagatgaacagcctgctggagaacatcgccaaggccaccatcgaggtgttccagcagagcgctgagaccggcagcagcagcggcagcacagccagcaacatgcccagcagcagcaagaccaagcctgtgctgagcagcctggagaggtctggagtgtggctggtggcccccctcatcgccaagctgcccacctctgtgcagggccacgtgctgaaggctgctggggaggagctggagaagggccagcacctgggcagcagcagcaggaaggagcgggaccggcagaagcagaagtccatgagcctgctgagccagcagcccttcctgagcctggtgctgacctgcctgaagggccaggatgagcagcgggagggcctgctgaccagcctgtacagccaggtgcaccagatcgtgaacaactggagagatgaccagtacctggatgactgcaagcccaagcagctgatgcatgaggccctgaagctgcggctgaacctggtgggcggcatgtttgacacagtgcagaggagcacccagcagaccacagagtgggccatgctgctgctggagatcatcatctctggaacagtggacatgcagagcaacaatgagctgttcaccaccgtgctggacatgctgtctgtgctgatcaatggcaccctggccgctgacatgagcagcatcagccagggctccatggaggagaacaagagggcctacatgaacctggccaagaagctgcagaaggagctgggggagcggcagagcgacagcctggagaaggtgcggcagctgctgcccctgcccaagcagaccagagatgtgatcacctgtgagccccagggcagcctgattgacaccaagggcaacaagattgctggctttgacagcatcttcaagaaggagggcctgcaggtgtccaccaagcagaagatcagcccctgggacctgtttgagggcctgaagcccagcgcccccctgtcctggggctggtttggaacagtgcgggtggaccggcgggtggcccggggggaggagcagcagaggctgctgctgtaccacacccacctgcggccccggccccgggcctactacctggagcccctgcccctgcccccagaagatgaggagcccccagcccccaccctgctggagcctgagaagaaggcccctgagccccccaagacagacaagccaggggccgccccacccagcacagaggagaggaagaagaagagcaccaagggcaagaagaggagccagcctgccaccaagacagaggactatggcatgggccctggccgcagcggcccctacggcgtgacagtgcccccagacctgctgcaccaccccaaccctggcagcatcacccacctgaactaccggcagggcagcatcggcctgtacacccagaaccagcccctgcctgctgggggcccccgggtggacccctacagacctgtgcggctgcccatgcagaagctgcccacccggcccacctacccaggagtgctgcccaccaccatgactggagtgatgggcctggagcccagcagctacaagacctctgtgtaccggcagcagcagcctgctgtgccccagggccagaggctgcggcagcagctgcagcagagccagggcatgctgggccagagctctgtgcaccagatgacccccagcagcagctatggcctgcagaccagccagctgagccccagcagcctgcagggctacaccccctacgtgagccacgtgggcctgcagcagcacacaggccctgctgaccccaccaggcacctgcagcagaggcccagcggctacgtgcaccagcaggcccccacctacggccacggcctgaccagcacccagcgcttcagccaccagaccctgcagcagacccccatgatcagcaccatgacccccatgtctgcccagggcgtgcaggccggcgtgcgcagcacagccatcctgcctgagcagcagcagcagcagcagcagcagcagcagcagcagcagcagcagcagcagcagcagcagcagcagcagcagcagcagtaccacatccggcagcagcagcagcagcagatcctgcggcagcagcagcagcagcagcagcagcagcagcagcagcagcagcagcagcagcagcagcagcagcagcagcagcagcagcaccagcagcagcagcagcagcaggccgccccaccccagccccagccccagagccagccccagttccagaggcagggcctgcagcagacccagcagcagcagcagacagctgccctggtgcggcagctgcagcagcagctgagcaacacccagccccagcccagcaccaacatcttcggccgctactag

SEQ ID NO: 277896 - DNA, 756 bp, Artificial Sequence
  derived and/or modified sequence
tgagaaaggaagaagaagagcaccaagggcaagaagaggagccagcctgccaccaagacagaagattatggcatgggccctggccgcagcggcccctatggagtgacagtgcccccagacctgctgcaccaccccaaccctggcagcatcacccacctgaactaccggcagggcagcatcggcctgtacacccagaaccagcccctgcctgctgggggcccccgggtggacccctacagacctgtgcggctgcccatgcagaagctgcccacccggcccacctacccaggagtgctgcccaccaccatgactggagtgatgggcctggagcccagcagctacaagacctctgtgtaccggcagcagcagcctgctgtgccccagggccagaggctgcggcagcagctgcagcagagccagggcatgctgggccagagctctgtgcaccagatgacccccagcagcagctatggcctgcagaccagccagggctacaccccctacgtgagccacgtgggcctgcagcagcacacaggccctgctgaccccaccaggcacctgcagcagaggcccagcggctacgtgcaccagcaggcccccacctacggccacggcctgaccagcacccagcgcttcagccaccagaccctgcagcagacccccatgatcagcaccatgacccccatgtctgcccagggcgtgcaggccggcgtgcgcagcacagccatcctgcctgagcagcagcagcagcagtag

SEQ ID NO: 277897 - DNA, 6003 bp, Artificial Sequence
  derived and/or modified sequence
atggccgccttcggcatcctgtcctatgagcaccggcccctgaagaggccccggctgggccccccagatgtgtacccccaggaccccaagcagaaggaggatgagctgacagccctgaatgtgaagcagggcttcaacaaccagcctgctgtgtctggagatgagcacggcagcgccaagaatgtgtccttcaacccagccaagatcagcagcaacttcagcagcatcatcgccgagaagctgcgctgcaacaccctgcctgacacaggaagaaggaagccccaggtgaaccagaaggacaacttctggctggtgacagcccggagccagagcgccatcaacacctggttcacagacctggccggcaccaagcccctgacccagctggccaagaaggtgcccatcttcagcaagaaggaggaggtgtttggctacctggccaagtacacagtgcctgtgatgagagctgcctggctgatcaagatgacctgtgcctactatgctgccatcagcgagaccaaggtgaagaagagacatgtggaccccttcatggagtggacccagatcatcaccaagtacctgtgggagcagctgcagaagatggccgagtactacagacctggccctgctggcagcggcggctgcggcagcaccatcggccccctgccccatgatgtggaggtggccatccggcagtgggactacacagagaagctggccatgttcatgttccaggacggcatgctggacagacatgagttcctgacctgggtgctggagtgctttgagaagatccggcctggagaagatgagctgctgaagctgctgctgcccctgctgctgcgctacagcggggagtttgtgcagagcgcctacctgagccggcggctggcctacttctgcacccggcggctggccctgcagctggatggagtgagcagccacagcagccacgtgatcagcgcccagagcaccagcaccctgcccaccaccccagccccccagccccccaccagcagcacccccagcacccccttcagtgacctgctgatgtgcccccagcaccggcccctggtgtttggcctgagctgcatcctgcagaccatcctgctgtgctgccccagcgccctggtgtggcactacagcctgacagacagccgcatcaagacaggcagccccctggaccacctgcccatcgcccccagcaacctgcccatgcctgagggcaacagcgccttcacccagcaggtgcgggccaagctgcgggagattgagcagcagatcaaggagcggggccaggccgtggaggtgcgctggagctttgacaagtgccaggaggccacagctggcttcaccatcggccgggtgctgcacaccctggaggtgctggacagccacagctttgagaggagtgacttcagcaacagcctggacagcctgtgcaaccgcatcttcggcctgggccccagcaaggatggccacgagatcagcagtgatgatgatgctgtggtgtccctgctgtgtgagtgggccgtgtcctgcaagaggagcggccgccaccgggccatggtggtggccaagctgctggagaagaggcaggccgagattgaggccgagcgctgtggggagagcgaggccgcagatgagaagggcagcatcgccagcggcagcctgagcgcccccagcgcccccatcttccaggatgtgctgctgcagttcctggacacccaggcccccatgctgacagaccccaggtctgagagcgagcgggtggagttcttcaacctggtgctgctcttctgtgagctgatcagacatgatgtgttcagccacaacatgtacacctgcaccctcatcagcagaggagacctggccttcggggcccctggccccaggcctcccagcccctttgatgatcctgcagatgatcctgagcacaaggaggccgagggcagcagcagcagcaagctggaggaccccggcctgtctgagagcatggacatcgaccccagcagctctgtgctgtttgaggacatggagaagccagacttcagcctcttcagccccaccatgccctgtgagggcaagggcagccccagccctgagaagccagatgtggagaaggaggtgaagcccccacccaaggagaagattgagggcaccctgggcgtgctgtatgaccagcccaggcatgtgcagtatgccacccacttccccatcccccaggaggagagctgcagccatgagtgcaaccagaggctggtggtgctgtttggagtgggcaagcagagagatgatgcccggcatgccatcaagaagatcaccaaggacatcctgaaggtgctgaacagaaaaggaacagctgagacagaccagctggcccccatcgtgcccctgaaccctggggacctgaccttcctgggcggggaggatggccagaagagaagaagaaacagacctgaggccttccccacagctgaggacatctttgccaagttccagcacctgagccactatgaccagcaccaggtgacagcccaggtgtccagaaatgtgctggagcagatcaccagctttgccctgggcatgagctaccacctgcccctggtgcagcacgtgcagttcatctttgacctgatggagtacagcctgagcatcagcggcctgattgactttgccatccagctgctgaatgagctgtctgtggtggaggccgagctgctgctgaagagcagtgacctggtgggcagctacaccaccagcctgtgcctgtgcatcgtggccgtgctgcggcactaccacgcctgcctgatcctgaaccaggaccagatggcccaggtgtttgagggcctgtgtggggtggtgaagcacggcatgaacagaagtgatggcagcagcgctgagcgctgcatcctggcctacctgtatgacctgtacaccagctgcagccacctgaagaacaagtttggagagctgttcagtgacttctgcagcaaggtgaagaacaccatctactgcaatgtggagcccagcgagagcaacatgcgctgggcccctgagttcatgattgacaccctggagaacccagctgcccacaccttcacctacacaggcctgggcaagagcctgtctgaaaatcctgccaaccgctacagctttgtgtgcaatgccctgatgcacgtgtgtgtgggccaccacgaccctgacagagtgaatgacatcgccatcctgtgtgccgagctgaccggctactgcaagagcctgtctgctgagtggctgggcgtgctgaaggccctgtgctgcagcagcaacaacggcacctgtggcttcaatgacctgctgtgcaatgtggatgtgtctgacctgtccttccatgacagcctggccacctttgtggccatcctgattgcccggcagtgcctgctgctggaggacctgatccgctgtgccgccatccccagcctgctgaatgctgcctgcagcgagcaggacagcgagcccggggcccggctgacctgccgcatcctgctgcacctgttcaagaccccccagctgaacccctgccagagtgatggcaacaagcccaccgtgggcatccgcagcagctgtgacagacacctgctggccgccagccagaacagaattgtggatggagctgtgtttgctgtgctgaaggctgtgtttgtgctgggagatgctgagctgaagggcagcggcttcaccgtgactggaggaacagaggagctgcctgaggaggagggcggcggcggcagcggcggccggcggcagggcggcaggaacatctctgtggagacagccagcctggatgtgtatgccaagtatgtgctgcggagcatctgccagcaggagtgggtgggggagcgctgcctgaagagcctgtgtgaggacagcaatgacctgcaggaccctgtgctgagcagcgcccaggcccagaggctgatgcagctgatctgctacccccaccggctgctggacaatgaagatggagagaacccccagaggcagaggatcaagaggatcctgcagaacctggaccagtggaccatgaggcagagcagcctggagctgcagctgatgatcaagcagacccccaacaatgagatgaacagcctgctggagaacatcgccaaggccaccatcgaggtgttccagcagagcgctgagaccggcagcagcagcggcagcacagccagcaacatgcccagcagcagcaagaccaagcctgtgctgagcagcctggagaggtctggagtgtggctggtggcccccctcatcgccaagctgcccacctctgtgcagggccacgtgctgaaggctgctggggaggagctggagaagggccagcacctgggcagcagcagcaggaaggagcgggaccggcagaagcagaagtccatgagcctgctgagccagcagcccttcctgagcctggtgctgacctgcctgaagggccaggatgagcagcgggagggcctgctgaccagcctgtacagccaggtgcaccagatcgtgaacaactggagagatgaccagtacctggatgactgcaagcccaagcagctgatgcatgaggccctgaagctgcggctgaacctggtgggcggcatgtttgacacagtgcagaggagcacccagcagaccacagagtgggccatgctgctgctggagatcatcatctctggaacagtggacatgcagagcaacaatgagctgttcaccaccgtgctggacatgctgtctgtgctgatcaatggcaccctggccgctgacatgagcagcatcagccagggctccatggaggagaacaagagggcctacatgaacctggccaagaagctgcagaaggagctgggggagcggcagagcgacagcctggagaaggtgcggcagctgctgcccctgcccaagcagaccagagatgtgatcacctgtgagccccagggcagcctgattgacaccaagggcaacaagattgctggctttgacagcatcttcaagaaggagggcctgcaggtgtccaccaagcagaagatcagcccctgggacctgtttgagggcctgaagcccagcgcccccctgtcctggggctggtttggaacagtgcgggtggaccggcgggtggcccggggggaggagcagcagaggctgctgctgtaccacacccacctgcggccccggccccgggcctactacctggagcccctgcccctgcccccagaagatgaggagcccccagcccccaccctgctggagcctgagaagaaggcccctgagccccccaagacagacaagccaggggccgccccacccagcacagaggagaggaagaagaagagcaccaagggcaagaagaggagccagcctgccaccaagacagaggactatggcatgggccctggccgcagcggcccctacggcgtgacagtgcccccagacctgctgcaccaccccaaccctggcagcatcacccacctgaactaccggcagggcagcatcggcctgtacacccagaaccagcccctgcctgctgggggcccccgggtggacccctacagacctgtgcggctgcccatgcagaagctgcccacccggcccacctacccaggagtgctgcccaccaccatgactggagtgatgggcctggagcccagcagctacaagacctctgtgtaccggcagcagcagcctgctgtgccccagggccagaggctgcggcagcagctgcagcagagccagggcatgctgggccagagctctgtgcaccagatgacccccagcagcagctatggcctgcagaccagccagggctacaccccctacgtgagccacgtgggcctgcagcagcacactggacctgctgaccccaccaggcacctgcagcagaggccttctggctacgtgcaccagcaggcccccacctacggccacggcctgaccagcacccagagcttccacaccaggcactgcagccgccacccctag

SEQ ID NO: 277898 - DNA, 6422 bp, Artificial Sequence
  derived and/or modified sequence
gaggatgaactgacggccttgaatgtaaaacaaggtttcaataaccagcctgctgtctctggggatgagcatggcagtgccaagaacgtcagcttcaatcctgccaagatcagttccaacttcagcagcattattgcagagaaattacgttgtaatacccttcctgacactggtcgcaggaagccccaagtgaaccagaaggataacttctggctggtgactgcacgatcccagagtgccattaacacttggttcactgacttggctggcaccaagccactcacgcaactagccaaaaaggtccccattttcagtaagaaggaagaggtgtttgggtacttagccaaatacacagtgcctgtgatgcgggctgcctggctcattaagatgacctgtgcctactatgcagcaatctctgagaccaaggttaagaagagacatgttgaccctttcatggaatggactcagatcatcaccaagtacttatgggagcagttacagaagatggctgaatactaccggccagggcctgcaggaagtgggggctgtggttccacgatagggcccttgccccatgatgtagaggtggcaatccggcagtgggattacaccgagaagctggccatgttcatgtttcaggatggaatgctggacagacatgagttcctgacctgggtgcttgagtgttttgagaagatccgccctggagaggatgaattgcttaaactgctgctgcctctgcttctccgatactctggggaatttgttcagtctgcatacctgtcccgccggcttgcctacttctgtacacggagactggccctgcagctggatggtgtgagcagtcactcatctcatgttatatctgctcagtcaacaagcacgctacccaccacccctgctcctcagcccccaactagcagcacaccctcgactccctttagtgacctgcttatgtgccctcagcaccggcccctggtttttggcctcagctgtatcctacagaccatcctcctgtgctgtcctagtgccttggtttggcactactcactgactgatagcagaattaagaccggctcaccacttgaccacttgcctattgccccgtccaacctgcccatgccagagggtaacagtgccttcactcagcaggtccgtgcaaagttgcgggagatcgagcagcagatcaaggagcggggacaggcagttgaagttcgctggtctttcgataaatgccaggaagctactgcaggcttcaccattggacgggtacttcatactttggaagtgctggacagccatagttttgaacgctctgacttcagcaactctcttgactccctttgtaaccgaatctttggattgggacctagcaaggatgggcatgagatctcctcagatgatgatgctgtggtgtcattgctatgtgaatgggctgtcagctgcaagcgttctggtcggcatcgtgctatggtggtagccaagctcctggagaagagacaggcggagattgaggctgagcgttgtggagaatcagaagccgcagatgagaagggttccatcgcctctggctccctttctgctcccagtgctcccattttccaggatgtcctcctgcagtttctggatacacaggctcccatgctgacggaccctcgaagtgagagtgagcgggtggaattctttaacttagtactgctgttctgtgaactgattcgacatgatgttttctcccacaacatgtatacttgcactctcatctcccgaggggaccttgcctttggagcccctggtccccggcctccctctccctttgatgatcctgccgatgacccagagcacaaggaggctgaaggcagcagcagcagcaagctggaagatccagggctctcagaatctatggacattgaccctagttccagtgttctctttgaggacatggagaagcctgatttctcattgttctcccctactatgccctgtgaggggaagggcagtccatcccctgagaagccagatgtcgagaaggaggtgaagcccccacccaaggagaagattgaagggacccttggggttctttacgaccagccacgacacgtgcagtacgccacccattttcccatcccccaggaggagtcatgcagccatgagtgcaaccagcggttggtcgtactgtttggggtgggaaagcagcgagatgatgcccgccatgccatcaagaaaatcaccaaggatatcttgaaggttctgaaccgcaaagggacagcagaaactgaccagcttgctcctattgtgcctctgaatcctggagacctgacattcttaggtggggaggatgggcagaagcggcgacgcaaccggcctgaagccttccccactgctgaagatatctttgctaagttccagcacctttcacattatgaccaacaccaggtcacggctcaggtctcccggaatgttctggagcagatcacgagctttgcccttggcatgtcataccacttgcctctggtgcagcatgtgcagttcatcttcgacctcatggaatattcactcagcatcagtggcctcatcgactttgccattcagctgctgaatgaactgagtgtagttgaggctgagctgcttctcaaatcctcggatctggtgggcagctacactactagcctgtgcctgtgcatcgtggctgtcctgcggcactatcatgcctgcctcatcctcaaccaggaccagatggcacaggtctttgaggggctgtgtggcgtcgtgaagcatgggatgaaccggtccgatggctcctctgcagagcgctgtatccttgcttatctctatgatctgtacacctcctgtagccatttaaagaacaaatttggggagctcttcagcgacttttgctcaaaggtgaagaacaccatctactgcaacgtggagccatcggaatcaaatatgcgctgggcacctgagttcatgatcgacactctagagaaccctgcagctcacaccttcacctacacggggctaggcaagagtcttagtgagaaccctgctaaccgctacagctttgtctgcaatgcccttatgcacgtctgtgtggggcaccatgatcccgatagggtgaatgacatcgcaatcctgtgtgcagagctgaccggctattgcaagtcactgagtgcagaatggctaggagtgcttaaggccttgtgctgctcctctaacaatggcacttgtggtttcaacgatctcctctgcaatgttgatgtcagtgacctatcttttcatgactcgctggctacttttgttgccatcctcatcgctcggcagtgtttgctcctggaagatctgattcgctgtgctgccatcccttcactccttaatgctgcttgtagtgaacaggactctgagccaggggcccggcttacctgccgcatcctccttcaccttttcaagacaccgcagctcaatccttgccagtctgatggaaacaagcctacagtaggaatccgctcctcctgcgaccgccacctgctggctgcctcccagaaccgcatcgtggatggagccgtgtttgctgttctcaaggctgtgtttgtacttggggatgcggaactgaaaggttcaggcttcactgtgacaggaggaacagaagaacttccagaggaggagggaggaggtggcagtggtggtcggaggcagggtggccgcaacatctctgtggagacagccagtctggatgtctatgccaagtacgtgctgcgcagcatctgccaacaggaatgggtaggagaacgttgccttaagtctctgtgtgaggacagcaatgacctgcaagacccagtgttgagtagtgcccaggcgcagcgcctcatgcagctcatttgctatccacatcgactgctggacaatgaggatggggaaaacccccagcggcagcgcataaagcgcattctccagaacttggaccagtggaccatgcgccagtcttccttggagctgcagctcatgatcaagcagacccctaacaatgagatgaactccctcttggagaacatcgccaaggccacaatcgaggttttccaacagtcagcagagacagggtcatcttctggaagtactgcaagcaacatgcccagcagcagcaagaccaagcctgtgctcagctctctagagcgctctggtgtatggctggtggcccccctcattgctaaactgcccacctcagtccagggacatgtgttaaaggctgctggggaagaattggagaagggtcagcacctgggttcctcttcacgcaaagaacgtgatcgacaaaagcagaagagcatgtccctattgagccagcagcccttcttatcgctggtgctaacatgtctgaaagggcaggatgaacaacgcgagggactccttacctccctctacagccaggtgcaccagattgtgaataattggcgagatgaccagtacttagatgattgcaaaccaaagcagcttatgcatgaggcactcaaactgcggctcaacctggtggggggcatgtttgacacggtgcagcgcagcacccagcagaccacggagtgggccatgctcctcctggagatcatcatcagcggcactgtcgacatgcagtccaacaatgagctcttcactactgtgttggacatgctgagcgtgctcatcaatgggacattggctgcagacatgtctagcatctcgcaaggtagcatggaggaaaacaagcgtgcatacatgaacctggcgaagaagttgcagaaggagttgggggagcgccagtcagacagtctggaaaaggttcgccagctgctgccactgcccaagcagacccgagatgtcatcacgtgtgagccacagggctcccttatcgataccaagggcaacaagattgctggcttcgattccatcttcaagaaggagggtctacaggtttccaccaaacagaagatctcgccctgggatctttttgaggggttgaagccgtcagcaccactctcttggggctggtttggaacagtccgagtggaccggcgagtggctcgaggagaggagcagcagcggttgctgctctaccacacacacctgaggccccggccccgcgcctattacctggagccactgccactgcccccagaagatgaggagccgcctgctcctaccctgctagagcctgagaaaaaggctccagagccccccaaaactgacaaaccgggggctgctccacccagtactgaggaacgcaagaagaagtccaccaagggcaagaaacgcagccagccagctaccaagacagaggactatggaatgggcccgggtcggagcggcccttatggtgtgacagtgcctccggacctcctgcaccacccaaaccctggttctataacacaccttaactacaggcaaggctccataggcctgtacacccagaaccagccactacctgcaggtggccctcgtgtggacccataccgtcctgtgcgcttaccaatgcagaagctgcccacccgaccaacttaccctggagtgctgcccacaaccatgactggcgtcatgggtttagaaccctcctcttataagacctctgtgtaccggcagcagcaacctgcggtgccccaaggacagcgccttcgccaacagctccagcagagtcagggcatgttgggacagtcatctgtccatcagatgactcccagctcttcctacggtttgcagacttcccagctctctccttcttccctccagggctatactccttatgtttctcatgtgggattgcagcaacacacaggccctgcagatcctacccgccacctgcaacagcggcccagtggctatgtgcaccagcaggcccccacctatggacatggactgacctccactcaaaggttttcacaccagacactgcagcagacacccatgataagtaccatgactccaatgagtgcccagggcgtccaggcaggcgtccgttcaacagccatcctacctgagcagcagcagcagcagcaacagcagcaacagcaacagcagcagcagcagcaacagcaacagcagcagcagcagcagcagtaccacatccggcagcagcagcagcagcagatcctgcggcagcagcagcaacagcaacagcagcagcagcagcagcagcaacagcaacagcagcagcagcaacagcaacaacagcaacaccagcagcaacagcagcaacaggcggctcctccccaaccccagccccagtcccagccccagttccagcgccaggggcttcagcagacccagcagcagcaacagacagcagctttggtccggcaacttcaacaacagctctctaatacccagccacagcccagtaccaacatatttggacgctactgagccacctggaggaactgcttgtgcactggatgtggccc

SEQ ID NO: 277899 - DNA, 752 bp, Artificial Sequence
  derived and/or modified sequence
aggaacgcaagaagaagtccaccaagggcaagaaacgcagccagccagctaccaagacagaggactatggaatgggcccgggtcggagcggcccttatggtgtgacagtgcctccggacctcctgcaccacccaaaccctggttctataacacaccttaactacaggcaaggctccataggcctgtacacccagaaccagccactacctgcaggtggccctcgtgtggacccataccgtcctgtgcgcttaccaatgcagaagctgcccacccgaccaacttaccctggagtgctgcccacaaccatgactggcgtcatgggtttagaaccctcctcttataagacctctgtgtaccggcagcagcaacctgcggtgccccaaggacagcgccttcgccaacagctccagcagagtcagggcatgttgggacagtcatctgtccatcagatgactcccagctcttcctacggtttgcagacttcccagggctatactccttatgtttctcatgtgggattgcagcaacacacaggccctgcagatcctacccgccacctgcaacagcggcccagtggctatgtgcaccagcaggcccccacctatggacatggactgacctccactcaaaggttttcacaccagacactgcagcagacacccatgataagtaccatgactccaatgagtgcccagggcgtccaggcaggcgtccgttcaacagccatcctacctgagcagcagcagcagcag

SEQ ID NO: 277900 - DNA, 6763 bp, Artificial Sequence
  derived and/or modified sequence
attgtccgatggttcccggcgtacctcggcttccctcggtagtttccggcaatggtcgagagtttctaacgtgcccccttgttgtctctcggccgccgtcctctcaaccaccgccccccttttcggctccctctcccccttcccgttcccccagtcagcctggccctgctggtgcctccggcgctacgggctgggcaagatggcggccttcgggatcttgagctacgaacaccggcccctgaagcggccgcggctggggcctcccgatgtttaccctcaggaccccaaacagaaggaggatgaactgacggccttgaatgtaaaacaaggtttcaataaccagcctgctgtctctggggatgagcatggcagtgccaagaacgtcagcttcaatcctgccaagatcagttccaacttcagcagcattattgcagagaaattacgttgtaatacccttcctgacactggtcgcaggaagccccaagtgaaccagaaggataacttctggctggtgactgcacgatcccagagtgccattaacacttggttcactgacttggctggcaccaagccactcacgcaactagccaaaaaggtccccattttcagtaagaaggaagaggtgtttgggtacttagccaaatacacagtgcctgtgatgcgggctgcctggctcattaagatgacctgtgcctactatgcagcaatctctgagaccaaggttaagaagagacatgttgaccctttcatggaatggactcagatcatcaccaagtacttatgggagcagttacagaagatggctgaatactaccggccagggcctgcaggaagtgggggctgtggttccacgatagggcccttgccccatgatgtagaggtggcaatccggcagtgggattacaccgagaagctggccatgttcatgtttcaggatggaatgctggacagacatgagttcctgacctgggtgcttgagtgttttgagaagatccgccctggagaggatgaattgcttaaactgctgctgcctctgcttctccgatactctggggaatttgttcagtctgcatacctgtcccgccggcttgcctacttctgtacacggagactggccctgcagctggatggtgtgagcagtcactcatctcatgttatatctgctcagtcaacaagcacgctacccaccacccctgctcctcagcccccaactagcagcacaccctcgactccctttagtgacctgcttatgtgccctcagcaccggcccctggtttttggcctcagctgtatcctacagaccatcctcctgtgctgtcctagtgccttggtttggcactactcactgactgatagcagaattaagaccggctcaccacttgaccacttgcctattgccccgtccaacctgcccatgccagagggtaacagtgccttcactcagcaggtccgtgcaaagttgcgggagatcgagcagcagatcaaggagcggggacaggcagttgaagttcgctggtctttcgataaatgccaggaagctactgcaggcttcaccattggacgggtacttcatactttggaagtgctggacagccatagttttgaacgctctgacttcagcaactctcttgactccctttgtaaccgaatctttggattgggacctagcaaggatgggcatgagatctcctcagatgatgatgctgtggtgtcattgctatgtgaatgggctgtcagctgcaagcgttctggtcggcatcgtgctatggtggtagccaagctcctggagaagagacaggcggagattgaggctgagcgttgtggagaatcagaagccgcagatgagaagggttccatcgcctctggctccctttctgctcccagtgctcccattttccaggatgtcctcctgcagtttctggatacacaggctcccatgctgacggaccctcgaagtgagagtgagcgggtggaattctttaacttagtactgctgttctgtgaactgattcgacatgatgttttctcccacaacatgtatacttgcactctcatctcccgaggggaccttgcctttggagcccctggtccccggcctccctctccctttgatgatcctgccgatgacccagagcacaaggaggctgaaggcagcagcagcagcaagctggaagatccagggctctcagaatctatggacattgaccctagttccagtgttctctttgaggacatggagaagcctgatttctcattgttctcccctactatgccctgtgaggggaagggcagtccatcccctgagaagccagatgtcgagaaggaggtgaagcccccacccaaggagaagattgaagggacccttggggttctttacgaccagccacgacacgtgcagtacgccacccattttcccatcccccaggaggagtcatgcagccatgagtgcaaccagcggttggtcgtactgtttggggtgggaaagcagcgagatgatgcccgccatgccatcaagaaaatcaccaaggatatcttgaaggttctgaaccgcaaagggacagcagaaactgaccagcttgctcctattgtgcctctgaatcctggagacctgacattcttaggtggggaggatgggcagaagcggcgacgcaaccggcctgaagccttccccactgctgaagatatctttgctaagttccagcacctttcacattatgaccaacaccaggtcacggctcaggtctcccggaatgttctggagcagatcacgagctttgcccttggcatgtcataccacttgcctctggtgcagcatgtgcagttcatcttcgacctcatggaatattcactcagcatcagtggcctcatcgactttgccattcagctgctgaatgaactgagtgtagttgaggctgagctgcttctcaaatcctcggatctggtgggcagctacactactagcctgtgcctgtgcatcgtggctgtcctgcggcactatcatgcctgcctcatcctcaaccaggaccagatggcacaggtctttgaggggctgtgtggcgtcgtgaagcatgggatgaaccggtccgatggctcctctgcagagcgctgtatccttgcttatctctatgatctgtacacctcctgtagccatttaaagaacaaatttggggagctcttcagcgacttttgctcaaaggtgaagaacaccatctactgcaacgtggagccatcggaatcaaatatgcgctgggcacctgagttcatgatcgacactctagagaaccctgcagctcacaccttcacctacacggggctaggcaagagtcttagtgagaaccctgctaaccgctacagctttgtctgcaatgcccttatgcacgtctgtgtggggcaccatgatcccgatagggtgaatgacatcgcaatcctgtgtgcagagctgaccggctattgcaagtcactgagtgcagaatggctaggagtgcttaaggccttgtgctgctcctctaacaatggcacttgtggtttcaacgatctcctctgcaatgttgatgtcagtgacctatcttttcatgactcgctggctacttttgttgccatcctcatcgctcggcagtgtttgctcctggaagatctgattcgctgtgctgccatcccttcactccttaatgctgcttgtagtgaacaggactctgagccaggggcccggcttacctgccgcatcctccttcaccttttcaagacaccgcagctcaatccttgccagtctgatggaaacaagcctacagtaggaatccgctcctcctgcgaccgccacctgctggctgcctcccagaaccgcatcgtggatggagccgtgtttgctgttctcaaggctgtgtttgtacttggggatgcggaactgaaaggttcaggcttcactgtgacaggaggaacagaagaacttccagaggaggagggaggaggtggcagtggtggtcggaggcagggtggccgcaacatctctgtggagacagccagtctggatgtctatgccaagtacgtgctgcgcagcatctgccaacaggaatgggtaggagaacgttgccttaagtctctgtgtgaggacagcaatgacctgcaagacccagtgttgagtagtgcccaggcgcagcgcctcatgcagctcatttgctatccacatcgactgctggacaatgaggatggggaaaacccccagcggcagcgcataaagcgcattctccagaacttggaccagtggaccatgcgccagtcttccttggagctgcagctcatgatcaagcagacccctaacaatgagatgaactccctcttggagaacatcgccaaggccacaatcgaggttttccaacagtcagcagagacagggtcatcttctggaagtactgcaagcaacatgcccagcagcagcaagaccaagcctgtgctcagctctctagagcgctctggtgtatggctggtggcccccctcattgctaaactgcccacctcagtccagggacatgtgttaaaggctgctggggaagaattggagaagggtcagcacctgggttcctcttcacgcaaagaacgtgatcgacaaaagcagaagagcatgtccctattgagccagcagcccttcttatcgctggtgctaacatgtctgaaagggcaggatgaacaacgcgagggactccttacctccctctacagccaggtgcaccagattgtgaataattggcgagatgaccagtacttagatgattgcaaaccaaagcagcttatgcatgaggcactcaaactgcggctcaacctggtggggggcatgtttgacacggtgcagcgcagcacccagcagaccacggagtgggccatgctcctcctggagatcatcatcagcggcactgtcgacatgcagtccaacaatgagctcttcactactgtgttggacatgctgagcgtgctcatcaatgggacattggctgcagacatgtctagcatctcgcaaggtagcatggaggaaaacaagcgtgcatacatgaacctggcgaagaagttgcagaaggagttgggggagcgccagtcagacagtctggaaaaggttcgccagctgctgccactgcccaagcagacccgagatgtcatcacgtgtgagccacagggctcccttatcgataccaagggcaacaagattgctggcttcgattccatcttcaagaaggagggtctacaggtttccaccaaacagaagatctcgccctgggatctttttgaggggttgaagccgtcagcaccactctcttggggctggtttggaacagtccgagtggaccggcgagtggctcgaggagaggagcagcagcggttgctgctctaccacacacacctgaggccccggccccgcgcctattacctggagccactgccactgcccccagaagatgaggagccgcctgctcctaccctgctagagcctgagaaaaaggctccagagccccccaaaactgacaaaccgggggctgctccacccagtactgaggaacgcaagaagaagtccaccaagggcaagaaacgcagccagccagctaccaagacagaggactatggaatgggcccgggtcggagcggcccttatggtgtgacagtgcctccggacctcctgcaccacccaaaccctggttctataacacaccttaactacaggcaaggctccataggcctgtacacccagaaccagccactacctgcaggtggccctcgtgtggacccataccgtcctgtgcgcttaccaatgcagaagctgcccacccgaccaacttaccctggagtgctgcccacaaccatgactggcgtcatgggtttagaaccctcctcttataagacctctgtgtaccggcagcagcaacctgcggtgccccaaggacagcgccttcgccaacagctccagcagagtcagggcatgttgggacagtcatctgtccatcagatgactcccagctcttcctacggtttgcagacttcccagggctatactccttatgtttctcatgtgggattgcagcaacacacaggccctgcagatcctacccgccacctgcaacagcggcccagtggctatgtgcaccagcaggcccccacctatggacatggactgacctccactcaaagttttcacaccagacactgcagcagacacccatgataagtaccatgactccaatgagtgcccagggcgtccaggcaggcgtccgttcaacagccatcctacctgagcagcagcagcagcagcaacagcagcaacagcaacagcagcagcagcagcaacagcaacagcagcagcagcagcagcagtaccacatccggcagcagcagcagcagcagatcctgcggcagcagcagcaacagcaacagcagcagcagcagcagcagcaacagcaacagcagcagcagcaacagcaacaacagcaacaccagcagcaacagcagcaacaggcggctcctccccaaccccagccccagtcccagccccagttccagcgccaggggcttcagcagacccagcagcagcaacagacagcagctttggtccggcaacttcaacaacagctctctaatacccagccacagcccagtaccaacatatttggacgctactgagccacctggaggaactgcttgtgcactggatgtggccccaccctttcctcttaattcccaatcccattcctgggctagcaccagtagtggttggggccctcccctc

SEQ ID NO: 277901 - DNA, 6384 bp, Artificial Sequence
  derived and/or modified sequence
gaggacgagctgaccgccctgaacgtgaagcagggcttcaacaaccaaccagctgtctctggagatgagcatggttcggctaagaatgtaagcttcaaccctgccaagattagtagcaatttttctagtatcatcgccgaaaaactccggtgcaatacattgcctgacactggccgcaggaagcctcaggttaatcagaaggataacttctggcttgtgaccgctcggtcgcagtccgccatcaatacatggtttacagacctggccggcaccaaaccgcttacccagctcgcaaaaaaagtccctattttctcaaagaaggaggaggtgtttgggtacctagctaaatacacagtcccggtcatgcgagcggcttggctgattaagatgacttgtgcttattacgcagccatttctgagactaaagtcaagaaacggcacgtagatccatttatggaatggacgcagataatcacaaagtatctctgggagcagctccaaaaaatggccgagtattacaggccagggcctgccgggagtggaggctgtggcagcaccatcggacccctgccacacgacgtggaagtggccattcgccagtgggattatacggagaaactggccatgttcatgttccaggacgggatgctggatcgccacgagtttctgacctgggtgttggaatgtttcgaaaagattcgtcctggtgaggatgaacttcttaagttgctcctccccctgctcctgcgctacagcggggagttcgtccagagtgcataccttagccgtcggttggcctacttttgcaccaggaggctggccctgcaactggatggtgtgtcgtctcacagctcacatgtgatttcagctcagtcgacctctacactaccgactactcccgcgcctcagccccctacatcgagtacaccctctactcccttttccgatctcttgatgtgtccacaacatcgcccccttgtgttcggcctctcctgtattttgcagacaatcctgctgtgctgtccttcagcacttgtgtggcattatagtctgactgattccagaattaaaaccggctcacccctcgaccatcttcccattgcccctagtaatctgccaatgccagagggtaactctgctttcacccagcaagtgagagccaaactgagggaaatagaacagcagataaaagaaaggggccaagccgttgaagttcggtggtctttcgataagtgccaagaggcgaccgctggattcaccataggccgtgtgttgcatactctggaggtgctggactcacattcctttgagcggtctgactttagcaactctctggactccctatgcaaccggatctttggacttggtccatccaaagacggtcacgagatcagctccgacgatgatgccgtcgtttcactgctgtgcgaatgggccgtgagctgtaagcgctcgggccggcacagagctatggtcgttgccaagttactggagaaaaggcaggcagagattgaggctgaaaggtgcggggagagcgaggcggccgatgaaaaggggagcattgcatctggaagtctgagcgccccatccgccccaattttccaagatgtcctgctgcagttcctggatacacaggcaccaatgcttacagaccctcgtagcgagtcagaacgggtggaattcttcaacctcgtcctgctgttttgcgagttaattaggcatgacgtcttttcccacaacatgtatacatgtaccctgatctcccggggggacctggcctttggcgctcccggcccccgaccaccatcacctttcgacgaccctgctgatgacccggaacataaagaggccgaagggtccagcagctccaaactggaggatcctggactgtccgaaagtatggacattgacccctcttcttcagtgctgtttgaggatatggagaagccagacttttccttgttttcccccaccatgccctgcgaagggaaaggatcaccctcacctgaaaagccggatgtcgaaaaagaggtgaagccgccaccaaaggagaaaatcgagggcacactgggtgtgctgtatgaccagccccggcatgttcaatacgccactcactttcctattccgcaggaagaaagctgttctcacgagtgcaaccagagactcgtagttctgttcggcgtgggcaaacagagggacgatgcacgccatgctatcaagaaaattaccaaagatattctgaaagtcttgaatcgcaaggggacagcggagaccgatcagcttgcccccatagtaccgttgaatccgggcgaccttaccttcttggggggcgaggacggtcagaagcgcagacggaaccgacctgaggcctttccaaccgctgaagatattttcgcaaaattccagcacctctcccactacgatcagcaccaggtgacggcccaggtatctcggaacgtgcttgaacagatcacctccttcgccctgggcatgtcttaccacctaccacttgttcagcatgtccaattcatttttgatttaatggagtattctttgagcatctccggacttattgacttcgccattcagctgcttaatgagctgagcgttgtagaagccgaattacttctgaagtctagtgacttggttggctcctacaccacttctctgtgcctgtgcattgttgcggtgctgagacactaccacgcatgcctgatccttaatcaggaccagatggctcaagtcttcgaaggcctctgcggggtggtgaagcatggaatgaacagatcggatggaagtagcgccgagcggtgtattctcgcttatctttatgacctctatacaagttgctcccacttgaaaaacaaattcggggagctcttcagtgacttctgctcaaaagtgaagaacactatttattgcaatgttgaaccctccgagagcaacatgaggtgggctccagaattcatgattgacacactggaaaatcctgcggcacatactttcacatatactggcctcggaaagtcattgagcgagaaccctgccaatcgctattccttcgtctgcaacgcgctgatgcatgtgtgtgtgggccaccatgacccagacagagtaaatgacatcgccattctgtgtgcggagcttactgggtactgtaagtccctatcggccgagtggttgggcgtattaaaagccctctgctgctcctctaacaacggcacttgtggcttcaacgatctgctatgtaatgtggatgtctcggatctctcctttcacgacagcttagccacatttgttgcaattctaatagcccggcagtgcttattacttgaagacttaattagatgcgcagctatccctagcctgctgaatgcagcctgctccgagcaagatagcgaacccggggcccgattgacatgtcgtattctcttacaccttttcaagacaccccaactaaatccctgtcagagtgacggaaacaaacctacagtgggcattaggtcatcttgtgaccgacacctgctcgccgcgagccagaaccgcatagtggacggcgccgtattcgccgtccttaaggctgtgttcgtgctgggcgatgccgaactcaagggaagcggattcactgtaaccggcggaactgaagagcttccggaagaggagggcggggggggtagcggcgggcgacggcaggggggccgtaatatctcagtggagacagctagcttagatgtctacgcaaaatacgtcctgaggtctatctgtcaacaggaatgggtgggcgagcgatgtctgaagagcttgtgtgaggattctaatgacttacaagatcccgtgctgtctagtgctcaggcccagagattgatgcagctcatttgctatcctcacaggctcttggataacgaagacggtgaaaacccccagaggcaacggatcaaaagaatactccagaacttggaccaatggacaatgcgccagtcctcactcgaactccagcttatgatcaagcagacacctaataatgagatgaactctttgttagaaaacatcgccaaggctacgattgaagtgtttcagcagagtgccgaaactggctccagctcaggctctacagcgagcaacatgcccagttcgtccaaaaccaaacccgtcttaagcagcctggagcgatccggcgtatggctagtggcacctctgatcgcgaagctgcctactagcgtccagggtcacgtgctcaaggcggctggtgaagaactggaaaaggggcagcatttgggatccagctccaggaaggagagggataggcagaaacagaagtccatgagtctcctctcccagcaacctttcttgagtctggtattaacctgcttaaagggacaagatgagcaaagagaggggctgctgacgtcgctctactcacaggtgcaccagatagtcaacaattggagggacgatcaatatctggatgattgtaagccaaagcagcttatgcacgaggcgctgaaactccgcctcaacctggtgggtggcatgttcgatacagtgcagcggtcaacacaacagaccaccgagtgggctatgctgttgctggagatcattattagtggcacagtcgatatgcaaagtaacaacgaactgttcaccacagtactggatatgctctcagttctgatcaatggaactctcgccgcggatatgtctagcatatcacagggctctatggaagagaacaagagagcttatatgaatttggctaagaaactacagaaagaactcggggaacgccagagcgattctttggagaaagtacggcagctactgccgctaccaaagcagacccgggatgtcattacctgtgagccacaggggtccctgattgacacgaagggcaacaaaatcgcgggattcgattcaatctttaaaaaggagggccttcaggtgagcaccaagcagaaaattagtccttgggaccttttcgaggggcttaagccctcagctcccctttcctggggctggtttggaaccgttagagtggaccggcgagtcgctcgaggagaggagcagcaaagactgctcttatatcatacgcatcttaggccacgcccccgcgcgtactatctggagcccctcccactgccacccgaagacgaggaaccacccgcccccacgctcttggagcccgagaaaaaagcaccagaacccccaaaaacagataaacccggagctgcccccccctccacagaggagcgcaagaagaagtctaccaaagggaaaaaaaggagccaaccagctactaaaactgaggattacggcatgggacccggccggtcggggccttatggcgtgacagttccaccagacctgctgcaccacccgaaccccggatcaatcacccatctgaactatagacagggttcaatcggtctgtatacccagaatcagccactccccgccggtggtcctcgtgtggacccttatagaccggtacgtttgccgatgcagaagctgcctacccggcccacctaccccggggtactgccaacaaccatgacgggagtgatgggcttggagccgagctcgtataagacatctgtctaccgccaacagcaaccagccgtacctcaaggccagagactgaggcagcagctgcagcagtcacaaggtatgttaggccagtccagcgtgcaccaaatgacacccagctctagctacgggcttcagacttcacagctctccccaagcagtctgcagggatacaccccctacgtgagtcatgttgggctgcagcaacatacaggcccagctgaccctacgcgccacctgcaacagagaccatccgggtatgtccatcagcaggcacccacttatggccatggtttaacttccactcagcgcttcagccaccagacgttgcaacaaacaccaatgattagtacgatgaccccgatgtctgcccaaggagtacaggccggggttcgaagcaccgcaatactgcccgaacaacagcagcagcaacagcaacagcagcagcagcagcagcagcagcaacagcagcagcagcagcagcaacagcaacaataccatattcggcagcagcagcagcagcaaatcctgcgtcagcagcagcaacagcagcaacagcaacagcagcagcagcaacaacagcagcagcaacagcagcagcagcaacagcagcatcaacagcagcagcaacagcaggcagccccaccccagccacagccacagtcccagccccagttccaacgccaggggttgcagcaaacacagcagcagcagcagaccgccgctctggttcgccagctccaacaacagctgtccaacacgcagccacaacccagtacaaacatttttggaaggtactag

SEQ ID NO: 277902 - DNA, 756 bp, Artificial Sequence
  derived and/or modified sequence
tgagagcggaagaagaagagcaccaagggcaagaagcggagccagcccgcaacaaagacagaggattacggtatgggcccaggcagatcaggcccctacggcgtcaccgtaccccctgatctcttacatcatcccaacccaggaagcataacccacctgaattatcgccagggctcaatcggactgtatacacagaatcagccgctgccagcaggcggccctcgggtggatccttataggcccgttcgcctgcccatgcagaagctcccaacgagacctacatatccaggggttttacccaccaccatgacaggggtaatgggcctcgagccttcatcatataagaccagtgtctaccgccagcagcagccagccgtaccacagggccagagactaaggcaacaactccagcagtctcagggcatgcttggtcagtcgtccgttcaccagatgaccccttcatcgagttacggtcttcagacaagtcaaggctacacaccctatgtgtctcatgttggactacagcagcacaccggcccagccgatcccacacggcatctgcagcagaggccatcaggatacgtccatcaacaggcacctacctatgggcacggtcttacatcaactcagcgatttagtcatcagactctgcaacaaacccccatgataagcacgatgaccccgatgtcggcgcaaggcgtacaggccggtgttcggagtacagcaatactgcccgagcagcagcaacagcagtag

SEQ ID NO: 277903 - DNA, 6003 bp, Artificial Sequence
  derived and/or modified sequence
atggccgccttcggcatcctgagctacgagcaccggcccctgaagaggccccggttaggtcctccagacgtgtacccacaagaccccaagcaaaaggaggatgagctgaccgctttaaatgtgaaacagggcttcaataaccagcctgccgtgtcaggcgacgagcatggtagtgcaaaaaatgtgtcttttaacccagccaaaattagtagtaacttttctagcattattgccgagaaactgcgttgtaacacattgcctgacacgggcaggcgcaagcctcaggtgaaccagaaggacaatttttggctggtgacggcaaggtcccagtctgcaatcaatacttggtttaccgacctggctggcacaaagcccctgacgcagctggccaagaaagtgcccatctttagtaaaaaggaggaggtgttcggatacttggccaagtacactgtgccagtcatgagagctgcctggctgatcaaaatgacgtgtgcttactatgccgctatctctgagactaaagtcaagaaaaggcacgtcgatcccttcatggagtggacccagatcatcactaaatatctgtgggagcagctgcagaagatggccgagtactaccgcccagggccggccggctctggcggatgcgggagcacaatcggtcccctccctcatgacgttgaggtggccattcggcagtgggactatacggaaaaacttgccatgttcatgtttcaagacgggatgcttgaccgccatgaattcctgacttgggtgctcgaatgttttgagaaaattagacccggagaagacgaactactgaaactgctcctccctctccttctgcgctattccggggagttcgtgcagtcggcctacctgtctaggagactcgcctatttttgcacaagaaggttggccctgcagctcgacggcgtgagctcacacagtagtcacgtcatttctgcccagagtacgtcaacacttcccactactcctgcaccccagccaccaacgtcgtcgacaccaagtactcccttctcagatctactcatgtgccctcagcaccggccccttgtctttggactgtcctgcatcttgcaaactatcctcctctgttgtcccagcgcgctcgtctggcattacagcctaacagactccaggatcaagaccggaagccccttggatcacctgccaatcgcacccagcaatctgcctatgcccgaagggaattctgctttcacccagcaggtgagagctaaactgagagaaattgagcagcaaataaaggaacgcggtcaagctgtagaagttagatggtcatttgataaatgccaggaggccactgccgggtttacaatcggtagggtactgcacaccctggaagtgcttgattcccattctttcgaacgtagcgatttttccaatagtctcgattccctgtgcaaccggattttcggacttgggccgagcaaggatggacacgagatatcaagtgacgacgacgccgtagtgtcactgctatgtgaatgggccgtgtcctgcaagaggtccggtcgacacagggccatggttgtggctaaactgctcgagaagcgtcaggcagagatcgaggctgagcgctgtggtgagagcgaagcggcagacgagaagggaagtattgcctcaggctccttatctgccccctcagcacccatcttccaggatgtgcttctccagtttcttgacactcaggccccaatgctgactgatccccgcagcgaatccgaaagagttgagttttttaacctcgttcttctgttttgtgagctcatccgtcacgacgtttttagccacaacatgtatacctgcaccctcatatccaggggggatctcgcctttggcgctcctggacctcgaccaccctctccattcgatgatcctgccgatgaccctgagcataaagaggcagaggggagtagctcctctaagctggaagatcctggactgagcgaaagcatggatattgacccgagtagttccgtacttttcgaggacatggaaaaacctgacttttctctgttcagtcccaccatgccatgtgaggggaagggatccccaagccccgaaaagccagatgttgaaaaagaagtcaaacctcctccaaaagaaaaaatcgaaggcactcttggggttttgtacgatcaaccacgccacgtccaatacgccacgcacttccccattccgcaggaggagtcatgttcccatgagtgcaatcaaagactggtggtcctgttcggggttgggaagcaacgggacgatgctcgccatgccattaagaagattactaaggatattctgaaggtgttaaaccgtaaggggacagccgagaccgatcagcttgctcccatagtaccgctgaacccgggggacctgaccttcctgggcggcgaggatggacagaaacgacgaaggaatagaccagaagcattccccactgcagaggatatctttgctaaattccagcatctcagccactatgaccagcatcaggttacagcccaggtctcaaggaacgtcctggagcagatcacatccttcgcacttggcatgagctatcatctcccactggtgcaacacgtgcagtttatctttgatcttatggaatatagtctttctatcagcggcctgatcgattttgccatccagctgctcaatgaactgtctgtggtggaggctgagctgctgctcaagtcaagcgaccttgtgggatcctacacgacaagtttgtgcctgtgtatcgtcgctgttctaagacactatcacgcatgtctgattctgaaccaggatcagatggctcaggttttcgagggcctgtgcggcgtggtgaaacatggcatgaatagatctgacggatctagcgccgagcgatgcattcttgcttatctgtacgacctgtacaccagctgctctcacttgaagaataagtttggggaactgttctccgacttctgctccaaagtcaagaataccatctattgcaacgtcgaacctagtgaatccaacatgcgttgggcgccagagttcatgatcgacaccctcgaaaatccagctgcccatacttttacctacactggcctggggaagtctctgtccgaaaacccagccaatcgttacagctttgtatgtaacgctctaatgcacgtttgcgtgggacatcatgatcctgaccgtgtcaatgatattgcgatactatgcgccgagctcacgggttactgcaagagtctctcagccgagtggctgggcgtcctaaaagctctgtgctgttcctctaacaatggcacttgtggatttaatgaccttctgtgcaacgtcgacgtttctgatctctcattccatgactccctggctacctttgtagctattctgattgcaaggcagtgcctgctgctggaggacttgattcgttgcgccgctattcctagcctgctaaacgccgcgtgctccgaacaggactccgaaccaggagctaggctcacttgtcgtatcctgctgcatcttttcaaaacccctcaactgaacccctgccagagcgacggtaacaaacccaccgtggggattaggtcatcatgtgacaggcatttattagccgcctcccagaaccgaatcgtggacggcgctgttttcgccgtgttaaaggccgtcttcgtgttgggggatgcagagctgaaaggtagtggattcacggtgacgggtggcacagaagaactccctgaagaggagggaggggggggctctgggggccggcgacagggtggcagaaatatatctgtagagacggcaagtctcgatgtgtatgctaaatacgtcctgcgcagcatttgccagcaggaatgggtgggcgagagatgcctcaaatccctgtgtgaagactcaaacgacctgcaggaccctgtgctctcttcagcccaggcacaacggttgatgcagttgatctgctacccccaccgcctgttagacaacgaggacggtgaaaatccacaacgccaaagaatcaagaggattctgcagaacctcgatcaatggaccatgcgccagtcttctctggagttgcagctcatgattaagcagacgccgaacaatgagatgaactccctcctagagaatatcgcaaaagctaccattgaggtatttcaacagagtgcagagaccggtagcagctctggcagtaccgcaagtaacatgccatcatcatccaaaaccaagccagtgctgtcatccctggaacgaagcggcgtgtggctggtggcacccctgatcgctaaattgcctacatccgtacagggtcacgtcttaaaggcagcaggggaggagctggagaagggccagcatctgggcagttcatctagaaaggaacgggacagacagaaacagaagtcaatgagcttactgtcccagcagccctttctcagtctggtgctgacctgcctaaaaggccaggacgagcagagagagggtctgcttacttctctttactcgcaggtgcaccagatcgttaataactggcgggacgaccaatacctcgacgactgtaaacctaaacagctcatgcacgaagcactgaagctgcggctgaatttggtcggcggaatgttcgatactgtgcagcggtcgactcagcagaccactgaatgggccatgctcttactggagataataatatccggcactgttgacatgcagtctaacaatgaactgttcactaccgtactggacatgctatcagtgctcatcaatgggacattagccgcggacatgtcatcgatcagccagggaagcatggaggaaaataaacgggcatacatgaatctcgctaaaaaactgcagaaagagctgggcgaacgccaaagcgacagcttggagaaagtgcgccaacttctgccactccccaagcaaactcgcgatgttatcacttgtgagccccagggcagtctgatcgacacaaaaggcaacaagatcgctgggtttgattctatctttaagaaagaaggactgcaggtttctaccaaacaaaagatctccccctgggacctctttgagggtttgaagccatccgctcccctatcttggggatggttcgggactgtccgagtggacaggagagtggccaggggggaggagcagcaacggctccttctgtaccacactcacttgaggcctaggccgagggcctattacctcgaaccccttccactgccccctgaagatgaggagccacccgctcccaccctcctggaacctgagaaaaaggctcctgagcctcctaaaaccgacaaacctggagctgcaccaccatccacggaagaacgaaagaaaaaatccacgaagggcaaaaaaaggtctcagcccgctactaagaccgaagattatggaatgggccccggcagatctggcccgtatggagtgaccgtccctccagatctcctgcaccatcccaatccgggctcaatcacccacctcaactaccggcaggggtcaataggattatacacgcaaaatcagccgcttccagccgggggtcctagagtagatccttaccggccagtgagattgccaatgcagaagttgcccactcggccgacctatccaggggttctccccacaacaatgaccggagtgatggggctggaaccttcttcctacaaaactagtgtgtatcggcaacagcagccagctgtaccccagggtcagagactgaggcagcagcttcaacagtcacagggcatgctggggcagtcaagcgtgcaccagatgacccccagttcttcctatggtttgcagacatctcaggggtacacaccttacgtgtcacatgttggcttacaacagcatacaggtcctgcagaccccactaggcacctccagcagcgcccttccggatatgtccatcaacaagccccgacatatggtcatggtctgacctctacccaaagtttccacacccgccactgttcaagacacccatag

SEQ ID NO: 277904 - DNA, 6383 bp, Artificial Sequence
  derived and/or modified sequence
gaagacgaattgactgccctgaatgttaaacagggcttcaacaatcagcccgcagttagtggcgacgagcacggttctgctaaaaatgtttctttcaatcccgcaaaaatcagcagcaacttttctagcattattgctgaaaaactgcgatgtaacacactgccagacactgggaggcgcaaaccccaggttaatcagaaggacaatttttggttggtcactgctcggtcccagtctgccattaatacgtggttcactgacctggcaggtacaaaaccattaacgcagcttgcgaaaaaggtgcctatttttagtaagaaagaggaggttttcggctacctagcaaaatataccgtccctgtgatgcgagctgcatggttgatcaaaatgacctgcgcctactatgccgcaatctcagaaactaaagtaaagaagcggcacgttgatccctttatggaatggacgcagattatcactaaatatctgtgggaacagctgcagaagatggctgaatactacaggccaggccctgccggtagtggagggtgcggctcgaccatcgggcctctcccccatgatgtggaagtcgcaatccgacagtgggactatactgaaaagctggccatgtttatgtttcaggacggcatgttggacaggcacgaatttcttacttgggttctggagtgcttcgagaaaattaggccaggggaagatgaactgctgaagctattgctgccattgctgctccgttactccggggaatttgttcagagtgcctacctctcaagacgcctggcgtatttctgcacacgcagattggctctccagctagacggcgtgtcatctcactcctcccacgtgatttcggctcagagcacttctacccttcccaccacacccgcaccacaaccccctacatcttccaccccgtcgacaccatttagcgatctgctgatgtgtcctcagcatcggcctctggtgtttggcctcagctgcatccttcaaacgatcttgttgtgttgcccctccgccctggtatggcattactctttaactgattcccggataaagaccggtagtcctcttgaccacctccctattgcccctagcaatctcccaatgcctgagggcaatagcgcctttacacagcaggttcgggcaaagcttagagaaatcgaacaacaaattaaggagagaggccaggcagttgaagttcggtggagctttgataagtgccaggaggcaacggccggattcaccattggtagagtcctgcacacactcgaggtcttggactctcattctttcgagaggagcgacttttccaattcactcgacagtctttgcaacagaatattcggtctcggaccgtctaaggatggccatgagatttcaagtgacgatgacgccgtggtttcacttctctgcgagtgggcagtgtcctgcaaacggtctggtcgccaccgggctatggtggtggcgaagctcctcgagaagcgccaagctgagattgaagctgaacggtgcggcgagtctgaagctgcagacgagaaaggcagcattgcctccgggtccctgagcgcaccttctgctcctattttccaggatgtcctgctccagtttttggatacccaggcacccatgttaacagatccacgctcggagtccgagagagtggaattttttaatctggtgcttttattttgtgaattgatccggcatgacgtgttcagtcacaacatgtacacttgtacacttattagcagaggagacctcgcttttggagcacccggtcccaggcccccttccccttttgacgaccccgctgatgaccctgagcacaaagaagccgaaggatcctcctccagcaagctggaggatccaggtctgtccgagagcatggacatcgatccctctagcagcgtgcttttcgaagatatggaaaagccagacttttccctgttcagtcctacaatgccctgtgagggaaagggcagcccctccccagaaaaacccgacgtggaaaaggaggtgaaaccaccccctaaagaaaagattgagggaacgctgggggtattgtatgaccaaccccgtcacgtacaatatgccacacactttccgatcccccaagaggagtcatgctcccacgagtgcaatcaacgcctggtagtactttttggtgttggtaagcagagagacgacgcacgtcacgccataaagaagataacgaaagacattctcaaagtgctgaaccggaagggaaccgccgagaccgatcagctggccccaatagtgccgttgaacccaggagatctgacctttttagggggtgaggatggacagaagcggcgtcggaatagaccagaagcattccccacagctgaagacatcttcgccaaatttcaacatctgagccactatgaccaacaccaggtgacggcgcaagtgtctcgcaatgttcttgaacagattacaagcttcgcactggggatgtcataccatcttcctctggttcagcatgttcagtttatcttcgatcttatggagtatagcctctcaatttctgggctgattgacttcgccatccagctacttaatgagctctccgtcgttgaggccgagcttctgcttaagagttccgacctcgtgggttcttacaccacatccctgtgcctatgcatcgtagcagtgctgaggcattaccacgcatgcttgattctgaatcaggaccagatggcccaagtttttgagggactctgcggagtggtcaaacacggaatgaacagatctgacggaagcagtgccgaaaggtgcatcctagcatacctgtatgacctgtacacctcctgcagtcatcttaagaacaaattcggtgagttgttttccgacttctgctccaaagtgaagaacactatttactgcaacgtcgagcccagtgaatctaacatgcggtgggccccagagttcatgatcgacacattggaaaatcctgcggctcatacctttacctacacgggcctgggtaagtcgctatcagagaatcccgcaaacaggtactcgtttgtgtgtaatgccctcatgcatgtttgcgttggacatcacgatcctgatcgggtcaatgacattgccattctgtgcgcagagctcaccgggtactgcaagagtctctcagccgagtggttaggcgtgcttaaagctttgtgctgttcttccaacaatggtacctgcggttttaatgatttgctgtgcaacgtggacgtgagcgatttgagctttcacgacagtcttgccacctttgtggctatcctgatcgcgagacagtgccttttgctggaggacttgatccggtgtgcagcgataccgtccttgttaaatgcagcgtgttcagaacaggactccgagcccggagctcgactgacctgtcgcattctgctgcacctgtttaagactccacaattgaatccatgccaatcggacggtaacaaaccaaccgtagggatcaggagcagctgcgaccgccacctcctggctgcatcacagaatagaattgtggacggcgcagtctttgccgtgctgaaggcagtatttgtcttgggagacgcggagttaaaaggaagtgggtttacagttacagggggtactgaggaactgcccgaggaagagggcggtggtggatcaggaggcagaaggcagggcggaagaaatataagcgtcgagactgcttcccttgacgtttacgctaaatatgtgctccgatcaatctgtcagcaggaatgggtgggggagaggtgtctgaaaagcctgtgcgaagattcaaatgatctccaggacccggtactgtcttccgcccaagctcagcggctgatgcaattaatctgctaccctcaccgactgctggacaatgaggacggagaaaatccacagcgccagaggattaaaagaatactacagaacctggaccagtggaccatgaggcagagctccctcgagctgcagctgatgattaagcagacccccaataacgagatgaatagtctgctggaaaacatcgcaaaagccaccattgaagtcttccagcagagtgctgagacaggaagctcatccggcagtactgccagtaacatgccctcctcttcaaaaacgaagcccgtcctctcatctctagagcgttcgggagtgtggttggtagctcccctgattgccaaactgcccacctctgtgcagggccacgtcctcaaggccgcaggggaggagctcgaaaaaggccagcacctggggtccagctcccggaaagagagggataggcagaagcagaaatcaatgtctttactctcccagcagccttttctcagcctggtgctgacatgtctgaaggggcaagacgagcaaagagagggccttctcacttctctctactctcaggtgcaccagatcgtcaacaattggcgcgatgaccagtacctggacgattgcaagccgaagcaacttatgcacgaagccttaaaacttcggctaaacctcgtgggaggtatgtttgacaccgtgcagcgctccacacaacagacgactgaatgggccatgctcctgctggaaattattatatccggcactgtggatatgcagtctaataatgaactctttaccactgttctggatatgttgtcagtgcttatcaacggtactcttgcggcagacatgagtagtatttcccagggaagcatggaagaaaacaaacgggcatatatgaatctggcgaagaagcttcagaaggagctcggggagcgccagtctgatagcctggaaaaggtgcggcagctgttgccattaccaaagcaaacacgggatgtcatcacctgtgagcctcagggttccttgatcgacactaaaggtaataaaatagcgggatttgattcaatttttaagaaagagggtctgcaggtctcgacaaagcagaagatcagtccatgggatctgtttgaaggcttgaagccatcagcccctttaagttgggggtggtttggtactgtccgagtagatcggcgagtcgccaggggggaagaacaacagcgactgctcttataccatacgcacttgcgccctcggcctcgcgcttactacctggagcctctgccactgccacctgaagatgaggagcccccagccccaacactgctcgaaccagagaaaaaggcgccagagcctcctaagacagataagccaggagccgctcctcccagcaccgaggaacgcaaaaagaagtccacgaaagggaagaagcgcagtcaaccagcaaccaagaccgaagattatggaatgggacctgggagatccgggccttatggcgtgactgttccgcctgatttacttcaccacccaaaccccggaagcataactcatctcaactaccgacagggaagcattggcttgtacacccagaaccagcccctgcctgctgggggtcctagggtggatccataccgtccagttcgccttcctatgcagaagctgcctacccggcctacatatcccggtgtgttgccgaccacaatgaccggcgtaatgggactggaaccttcttcctacaagacgtccgtgtatcgccagcagcaacccgctgtaccacagggacagcgcctacgccagcagctgcaacaaagtcagggaatgttagggcaatcctctgtgcaccagatgacaccctcgtctagctacgggctgcaaacttctcagctgtcccccagctccctgcagggctacacaccttatgtttcacacgtgggattgcagcagcataccggaccagcagatcctacccggcatctgcagcaacgcccttcgggttatgtacatcagcaggctccaacgtatggccacggactgacatcgacacaaaggttttcacatcagaccctgcaacaaacacccatgatctctacaatgacacctatgtcagcccagggggtgcaggccggtgtgcgatctactgctatcctgcccgagcagcagcagcagcagcagcagcagcaacagcaacagcagcaacagcaacagcaacaacagcagcagcagcagcaacagtatcacattcgacagcaacagcagcagcaaattctccgccagcagcaacagcagcagcagcagcagcagcagcagcagcaacagcagcagcagcagcagcaacagcagcagcaacagcaccagcagcagcaacaacagcaggctgcgccaccacagccccaacctcaatcccaaccgcagttccagagacagggcctgcaacagacacagcagcagcagcagaccgcagcattagttaggcagctgcagcagcagctctcaaatactcagccccaaccttcgacaaacatttttggccgatacta

SEQ ID NO: 277905 - DNA, 756 bp, Artificial Sequence
  derived and/or modified sequence
taggaaagaaaaaagaaaagtacaaagggtaagaaacgtagccagccggcaactaaaactgaggattacggcatgggcccaggcagatctggtccttatggagtcaccgtgcccccagacttattgcaccatccaaatccaggatcaatcacccatctgaactatcgccagggcagtatcggcttgtacactcagaatcagcccctgcctgcaggtggccctcgggtggatccctaccgaccggtgaggttacccatgcagaaacttcctaccaggcctacctacccaggggtcctgcctactacaatgacaggagtcatgggcctggaaccgtcgtcttataagactagcgtctataggcaacaacaaccggctgtccctcagggacagagattgcgccaacagctacagcagagccaggggatgctggggcagagcagcgtacatcagatgacaccgtccagctcgtatggactgcagacgagtcagggctatactccctacgttagccatgtagggcttcagcagcacaccggaccagccgatcccacccggcacctccagcagaggccttctgggtatgtccatcagcaggcgcctacatatggacatggactgacaagtacccagcgcttttctcaccagacactgcagcaaaccccaatgattagtaccatgaccccgatgtccgcccagggcgtgcaagccggagtgcgatccacggccatcctgccagaacaacagcagcaacagtag

SEQ ID NO: 277906 - DNA, 6002 bp, Artificial Sequence
  derived and/or modified sequence
atggctgcattcggcatcctgagctacgaacataggcccctgaaacgccctaggcttggcccacccgatgtatacccacaggaccccaaacagaaggaggacgaactgacagccctcaatgtgaagcagggatttaacaatcaacccgcagtgagtggtgatgagcacggctctgcaaaaaatgtctcgttcaatcctgcaaagatctcatccaatttttcttctattatagcggaaaagctgaggtgcaacaccctgcctgacacaggacggagaaaacctcaggttaatcagaaggacaacttctggctggtaaccgcacgctcacagtccgccatcaatacatggttcaccgacctggcaggaaccaagcccctaacccaacttgccaaaaaagttccgatattcagtaagaaggaggaggtcttcggctatctggccaagtatactgtacctgtcatgagagcggcttggctaatcaagatgacatgtgcttactatgccgcaataagtgagactaaggtaaagaagcggcacgttgaccctttcatggaatggacccagattattaccaaatatctctgggagcagctgcagaaaatggccgagtattaccgccctggcccagcgggaagcggaggttgcggcagcacaataggacctctcccacatgacgtggaggttgcaatcagacagtgggattatacagaaaagttggcgatgtttatgttccaagacggaatgctggatcgtcacgaatttttgacctgggtcctcgagtgcttcgagaagatcagacccggtgaggacgagctcctgaagttactgctccctctgcttttgagatactctggcgagtttgttcagtccgcatatttgagcaggaggctggcttacttctgcacgcgcagactcgctctgcagctggatggcgtatcctcccactcatcacacgttatctccgcccagtcaacctcaactctccccacgacaccagcccctcagcctcccacgtcctcaacccctagcacaccttttagcgacctccttatgtgtccacagcatagacctctcgtgtttggtttatcttgcattctgcagaccatcctgctatgctgtccttcggccctggtatggcactacagcctcactgattctagaatcaagaccggtagtcctctggatcacctccctatcgctccgagcaacttgccaatgccagaaggcaatagcgcgtttacacagcaggtgagggcaaagttacgcgagatcgagcagcagatcaaagaacggggtcaagccgtggaggtgcgttggtcgtttgacaaatgccaggaggccacagctggtttcacaattgggagggtgctccacacactggaggtcttggactcacattcctttgagagaagtgacttctcaaattccttggattccttatgcaatcgtatctttgggcttggcccatccaaggacggccatgaaattagttctgacgacgacgccgtggtctccctgctctgtgagtgggctgtttcttgtaagcgaagtggcaggcacagggccatggtggtggctaagcttctcgaaaagcgtcaagccgaaatcgaggctgaaagatgtggagagtcagaagccgcagacgaaaaggggagtatagctagcggctccctgtctgccccatccgcaccaatctttcaggatgtcctgctgcagtttctggatacacaggcaccaatgcttacagatcctagatctgaatccgagagggtggaattcttcaacttggtgctcctcttctgtgagttgataaggcacgacgtttttagccacaatatgtatacttgtactctcatctctagaggcgatctcgctttcggcgcaccaggcccacgccctccctctccctttgatgacccggctgatgatcccgaacataaggaggcggaaggatcatcatccagcaaacttgaggatccaggtctctctgaaagtatggatattgacccaagcagcagcgttctgtttgaagatatggagaaacccgacttttctctttttagcccaactatgccttgtgaagggaaaggtagtccatcccccgaaaagccggacgtggagaaagaagtgaagcctcctcccaaagaaaagattgaaggtacccttggagtgctgtacgatcagccaaggcacgtgcaatacgcgacccacttcccaataccgcaggaagagtcttgttctcacgaatgtaatcagcgcctcgtggtgttattcggagtaggtaaacagagagacgatgcccgacatgctatcaaaaagataacaaaggatattctaaaggtgctgaacaggaagggcaccgccgaaactgaccagctggcaccgatcgtgccgttgaatcctggcgacctcacgttccttgggggagaagatgggcagaagcggagaagaaatcggccagaagccttcccaaccgccgaggatatatttgccaagttccagcacctgtctcactacgaccagcaccaggtgacagctcaggtgtccaggaatgtgctggaacagatcacatctttcgctctcggcatgtcttatcatctaccactggtgcaacacgtacagtttattttcgaccttatggagtatagtctatctatctccggcttgatagactttgctatccagctgcttaacgagctgagcgtggttgaggcagagctcctcctcaaaagctcagatctggttgggtcctatactaccagtttgtgtctgtgcatcgtggcagtgctcagacactaccatgcctgtctgatattaaatcaggaccagatggctcaggtctttgagggcctgtgcggggttgtgaagcacggaatgaacagaagtgacgggtcctccgccgaaagatgtatactagcttacttatacgacctctatacaagttgttctcacttgaagaacaaatttggcgaactcttctcagatttctgttccaaggttaagaatacgatatattgtaacgtggagcctagtgaatcgaatatgagatgggctccggagttcatgattgatacattggaaaacccagccgctcacaccttcacatatacaggcctcggcaaatcactttctgagaatccagccaataggtattcctttgtctgcaacgctctaatgcacgtctgcgtagggcaccacgatcctgaccgcgtgaacgacatcgcaatattatgcgccgaactgactgggtactgtaagagcctctctgccgagtggctaggggtcttgaaagccctatgctgtagctctaacaacggtacttgcggatttaatgacctcctttgtaatgttgatgtaagcgatttgtcattccatgatagtctggcaacctttgttgcgatcctgattgctagacaatgtctgctgctcgaagatctgatcagatgtgcggctataccgagcctgttgaacgccgcttgttcagagcaagattccgaacccggagcaagactgacctgtcgcatactgttacatcttttcaagaccccgcagttaaatccttgccagagtgacggaaacaaacccactgtgggaatcaggtcctcctgtgaccgacaccttctcgcggcaagccagaacaggatcgtggatggcgcagtattcgcagtgctaaaggctgtcttcgttctgggggacgcagagctgaagggctctggctttacagtgaccggaggcacggaggagttgcccgaagaagagggcggaggtggctcaggaggacgcaggcaggggggtagaaacatttccgtagagaccgccagtttggacgtctatgcaaaatatgtgttaagaagcatttgtcagcaagaatgggtaggggagaggtgccttaagtctctatgcgaagatagcaatgacttgcaggaccccgtgctatcttccgcccaagcacagcggctgatgcagctgatctgctatccccatagattgttggacaatgaggacggggaaaacccccaacggcagcgtattaaacgaatcctgcagaacctggaccagtggaccatgagacagtcttctctggaactgcagctgatgatcaagcagactcctaataacgagatgaattccttactcgaaaatatagcaaaggccaccatcgaggtgttccagcaatccgctgaaactggcagcagcagcggatccacggcaagcaacatgccttcatctagcaagaccaagcccgttctgagcagcctcgagcggtctggtgtctggctggtggctcctctgatagcgaagctgcccacaagcgtccaaggccacgtgcttaaggccgctggggaggaactggagaagggccagcaccttggatcctcaagtcggaaagaaagggaccggcaaaaacagaagtcaatgagccttttgagccagcagcccttcctgagcctcgtgctgacttgcctcaaggggcaggacgaacagagagaagggctgctgacatcactatacagtcaggtgcaccagatagttaataattggcgggatgatcagtatctggacgattgcaaacctaaacagctgatgcacgaagccctcaagttacgtctcaatttagtcggaggaatgttcgacactgtgcaacgcagcacccagcaaacgaccgaatgggctatgctccttcttgaaatcattatctctggcactgtggatatgcagtcaaataacgaactgttcaccaccgtgttggatatgctgagtgtcctgatcaatggcactctcgccgctgacatgtcctctatctctcagggatctatggaagaaaacaagcgcgcatacatgaacctggcaaaaaagctgcagaaggaactcggcgagcggcagtccgattctctggaaaaagtgcgacaactcctgccactacctaaacaaacaagggatgtgatcacttgcgagccccagggatccctcatcgacactaagggtaataaaatagcgggattcgattctatttttaagaaggaaggcctacaggtgagcaccaaacagaaaattagcccatgggacttatttgagggccttaagcctagcgccccactgtcatgggggtggtttggcacggtcagggttgataggcgtgtcgcacggggtgaggagcagcagaggttactgctataccacacccatcttaggccacggccacgcgcttattatctggagcccctgccccttcctcccgaggacgaagagccccctgccccaacactgctggagcctgagaaaaaggccccagagcccccaaaaacagacaaaccaggtgccgctcctcccagcaccgaagaaaggaaaaaaaagagcacaaaggggaagaagaggagccagcctgccactaagacagaggactacggaatgggtcccggacgttctggcccatacggagtgacagtccctccagacttactgcatcatccaaatcctgggagcattacgcacttaaactatagacaaggaagcatcgggttgtacacccagaatcaaccacttccggctggcggtccacgtgtggacccttaccggcctgttcgtctgccgatgcagaaattgcccactcgacccacttatccaggggtcctgcctacaaccatgactggtgtcatgggacttgaaccatcttcctacaagacaagcgtctacagacaacagcaacctgctgttccccaagggcagcgcctgcggcaacagttacagcagtctcagggaatgctgggtcaaagctccgtgcatcagatgacgccctcctcatcttacgggcttcaaacctcccagggatacaccccatacgtgagccacgttggtctgcagcagcacaccggcccagctgatcctacgcgccacctgcagcagcggccaagcggttatgtgcaccagcaggctccaacctatggtcacggcctcacaagcactcagtctttccacacccgccattgtagcagacaccccta

SEQ ID NO: 277907 - DNA, 6384 bp, Artificial Sequence
  derived and/or modified sequence
gaggacgagctgaccgccctgaacgtgaagcagggcttcaacaaccagcccgccgtgagcggcgacgagcacggcagcgccaagaacgtgagcttcaaccccgccaagatcagcagcaacttcagcagcatcatcgccgagaagctgagatgcaacaccctgcccgacaccggcagaagaaagccccaggtgaaccagaaggacaacttctggctggtgaccgccagaagccagagcgccatcaacacctggttcaccgacctggccggcaccaagcccctgacccagctggccaagaaggtgcccatcttcagcaagaaggaggaggtgttcggctacctggccaagtacaccgtgcccgtgatgagagccgcctggctgatcaagatgacctgcgcctactacgccgccatcagcgagaccaaggtgaagaagagacacgtggaccccttcatggagtggacccagatcatcaccaagtacctgtgggagcagctgcagaagatggccgagtactacagacccggccccgccggcagcggcggctgcggcagcaccatcggccccctgccccacgacgtggaggtggccatcagacagtgggactacaccgagaagctggccatgttcatgttccaggacggcatgctggacagacacgagttcctgacctgggtgctggagtgcttcgagaagatcagacccggcgaggacgagctgctgaagctgctgctgcccctgctgctgagatacagcggcgagttcgtgcagagcgcctacctgagcagaagactggcctacttctgcaccagaagactggccctgcagctggacggcgtgagcagccacagcagccacgtgatcagcgcccagagcaccagcaccctgcccaccacccccgccccccagccccccaccagcagcacccccagcacccccttcagcgacctgctgatgtgcccccagcacagacccctggtgttcggcctgagctgcatcctgcagaccatcctgctgtgctgccccagcgccctggtgtggcactacagcctgaccgacagcagaatcaagaccggcagccccctggaccacctgcccatcgcccccagcaacctgcccatgcccgagggcaacagcgccttcacccagcaggtgagagccaagctgagagagatcgagcagcagatcaaggagagaggccaggccgtggaggtgagatggagcttcgacaagtgccaggaggccaccgccggcttcaccatcggcagagtgctgcacaccctggaggtgctggacagccacagcttcgagagaagcgacttcagcaacagcctggacagcctgtgcaacagaatcttcggcctgggccccagcaaggacggccacgagatcagcagcgacgacgacgccgtggtgagcctgctgtgcgagtgggccgtgagctgcaagagaagcggcagacacagagccatggtggtggccaagctgctggagaagagacaggccgagatcgaggccgagagatgcggcgagagcgaggccgccgacgagaagggcagcatcgccagcggcagcctgagcgcccccagcgcccccatcttccaggacgtgctgctgcagttcctggacacccaggcccccatgctgaccgaccccagaagcgagagcgagagagtggagttcttcaacctggtgctgctgttctgcgagctgatcagacacgacgtgttcagccacaacatgtacacctgcaccctgatcagcagaggcgacctggccttcggcgcccccggccccagaccccccagccccttcgacgaccccgccgacgaccccgagcacaaggaggccgagggcagcagcagcagcaagctggaggaccccggcctgagcgagagcatggacatcgaccccagcagcagcgtgctgttcgaggacatggagaagcccgacttcagcctgttcagccccaccatgccctgcgagggcaagggcagccccagccccgagaagcccgacgtggagaaggaggtgaagcccccccccaaggagaagatcgagggcaccctgggcgtgctgtacgaccagcccagacacgtgcagtacgccacccacttccccatcccccaggaggagagctgcagccacgagtgcaaccagagactggtggtgctgttcggcgtgggcaagcagagagacgacgccagacacgccatcaagaagatcaccaaggacatcctgaaggtgctgaacagaaagggcaccgccgagaccgaccagctggcccccatcgtgcccctgaaccccggcgacctgaccttcctgggcggcgaggacggccagaagagaagaagaaacagacccgaggccttccccaccgccgaggacatcttcgccaagttccagcacctgagccactacgaccagcaccaggtgaccgcccaggtgagcagaaacgtgctggagcagatcaccagcttcgccctgggcatgagctaccacctgcccctggtgcagcacgtgcagttcatcttcgacctgatggagtacagcctgagcatcagcggcctgatcgacttcgccatccagctgctgaacgagctgagcgtggtggaggccgagctgctgctgaagagcagcgacctggtgggcagctacaccaccagcctgtgcctgtgcatcgtggccgtgctgagacactaccacgcctgcctgatcctgaaccaggaccagatggcccaggtgttcgagggcctgtgcggcgtggtgaagcacggcatgaacagaagcgacggcagcagcgccgagagatgcatcctggcctacctgtacgacctgtacaccagctgcagccacctgaagaacaagttcggcgagctgttcagcgacttctgcagcaaggtgaagaacaccatctactgcaacgtggagcccagcgagagcaacatgagatgggcccccgagttcatgatcgacaccctggagaaccccgccgcccacaccttcacctacaccggcctgggcaagagcctgagcgagaaccccgccaacagatacagcttcgtgtgcaacgccctgatgcacgtgtgcgtgggccaccacgaccccgacagagtgaacgacatcgccatcctgtgcgccgagctgaccggctactgcaagagcctgagcgccgagtggctgggcgtgctgaaggccctgtgctgcagcagcaacaacggcacctgcggcttcaacgacctgctgtgcaacgtggacgtgagcgacctgagcttccacgacagcctggccaccttcgtggccatcctgatcgccagacagtgcctgctgctggaggacctgatcagatgcgccgccatccccagcctgctgaacgccgcctgcagcgagcaggacagcgagcccggcgccagactgacctgcagaatcctgctgcacctgttcaagaccccccagctgaacccctgccagagcgacggcaacaagcccaccgtgggcatcagaagcagctgcgacagacacctgctggccgccagccagaacagaatcgtggacggcgccgtgttcgccgtgctgaaggccgtgttcgtgctgggcgacgccgagctgaagggcagcggcttcaccgtgaccggcggcaccgaggagctgcccgaggaggagggcggcggcggcagcggcggcagaagacagggcggcagaaacatcagcgtggagaccgccagcctggacgtgtacgccaagtacgtgctgagaagcatctgccagcaggagtgggtgggcgagagatgcctgaagagcctgtgcgaggacagcaacgacctgcaggaccccgtgctgagcagcgcccaggcccagagactgatgcagctgatctgctacccccacagactgctggacaacgaggacggcgagaacccccagagacagagaatcaagagaatcctgcagaacctggaccagtggaccatgagacagagcagcctggagctgcagctgatgatcaagcagacccccaacaacgagatgaacagcctgctggagaacatcgccaaggccaccatcgaggtgttccagcagagcgccgagaccggcagcagcagcggcagcaccgccagcaacatgcccagcagcagcaagaccaagcccgtgctgagcagcctggagagaagcggcgtgtggctggtggcccccctgatcgccaagctgcccaccagcgtgcagggccacgtgctgaaggccgccggcgaggagctggagaagggccagcacctgggcagcagcagcagaaaggagagagacagacagaagcagaagagcatgagcctgctgagccagcagcccttcctgagcctggtgctgacctgcctgaagggccaggacgagcagagagagggcctgctgaccagcctgtacagccaggtgcaccagatcgtgaacaactggagagacgaccagtacctggacgactgcaagcccaagcagctgatgcacgaggccctgaagctgagactgaacctggtgggcggcatgttcgacaccgtgcagagaagcacccagcagaccaccgagtgggccatgctgctgctggagatcatcatcagcggcaccgtggacatgcagagcaacaacgagctgttcaccaccgtgctggacatgctgagcgtgctgatcaacggcaccctggccgccgacatgagcagcatcagccagggcagcatggaggagaacaagagagcctacatgaacctggccaagaagctgcagaaggagctgggcgagagacagagcgacagcctggagaaggtgagacagctgctgcccctgcccaagcagaccagagacgtgatcacctgcgagccccagggcagcctgatcgacaccaagggcaacaagatcgccggcttcgacagcatcttcaagaaggagggcctgcaggtgagcaccaagcagaagatcagcccctgggacctgttcgagggcctgaagcccagcgcccccctgagctggggctggttcggcaccgtgagagtggacagaagagtggccagaggcgaggagcagcagagactgctgctgtaccacacccacctgagacccagacccagagcctactacctggagcccctgcccctgccccccgaggacgaggagccccccgcccccaccctgctggagcccgagaagaaggcccccgagccccccaagaccgacaagcccggcgccgccccccccagcaccgaggagagaaagaagaagagcaccaagggcaagaagagaagccagcccgccaccaagaccgaggactacggcatgggccccggcagaagcggcccctacggcgtgaccgtgccccccgacctgctgcaccaccccaaccccggcagcatcacccacctgaactacagacagggcagcatcggcctgtacacccagaaccagcccctgcccgccggcggccccagagtggacccctacagacccgtgagactgcccatgcagaagctgcccaccagacccacctaccccggcgtgctgcccaccaccatgaccggcgtgatgggcctggagcccagcagctacaagaccagcgtgtacagacagcagcagcccgccgtgccccagggccagagactgagacagcagctgcagcagagccagggcatgctgggccagagcagcgtgcaccagatgacccccagcagcagctacggcctgcagaccagccagctgagccccagcagcctgcagggctacaccccctacgtgagccacgtgggcctgcagcagcacaccggccccgccgaccccaccagacacctgcagcagagacccagcggctacgtgcaccagcaggcccccacctacggccacggcctgaccagcacccagagattcagccaccagaccctgcagcagacccccatgatcagcaccatgacccccatgagcgcccagggcgtgcaggccggcgtgagaagcaccgccatcctgcccgagcagcagcagcagcagcagcagcagcagcagcagcagcagcagcagcagcagcagcagcagcagcagcagcagcagcagtaccacatcagacagcagcagcagcagcagatcctgagacagcagcagcagcagcagcagcagcagcagcagcagcagcagcagcagcagcagcagcagcagcagcagcagcagcagcaccagcagcagcagcagcagcaggccgcccccccccagccccagccccagagccagccccagttccagagacagggcctgcagcagacccagcagcagcagcagaccgccgccctggtgagacagctgcagcagcagctgagcaacacccagccccagcccagcaccaacatcttcggcagatactag

SEQ ID NO: 277908 - DNA, 756 bp, Artificial Sequence
  derived and/or modified sequence
tgagagagaaagaagaagagcaccaagggcaagaagagaagccagcccgccaccaagaccgaggactacggcatgggccccggcagaagcggcccctacggcgtgaccgtgccccccgacctgctgcaccaccccaaccccggcagcatcacccacctgaactacagacagggcagcatcggcctgtacacccagaaccagcccctgcccgccggcggccccagagtggacccctacagacccgtgagactgcccatgcagaagctgcccaccagacccacctaccccggcgtgctgcccaccaccatgaccggcgtgatgggcctggagcccagcagctacaagaccagcgtgtacagacagcagcagcccgccgtgccccagggccagagactgagacagcagctgcagcagagccagggcatgctgggccagagcagcgtgcaccagatgacccccagcagcagctacggcctgcagaccagccagggctacaccccctacgtgagccacgtgggcctgcagcagcacaccggccccgccgaccccaccagacacctgcagcagagacccagcggctacgtgcaccagcaggcccccacctacggccacggcctgaccagcacccagagattcagccaccagaccctgcagcagacccccatgatcagcaccatgacccccatgagcgcccagggcgtgcaggccggcgtgagaagcaccgccatcctgcccgagcagcagcagcagcagtag

SEQ ID NO: 277909 - DNA, 6003 bp, Artificial Sequence
  derived and/or modified sequence
atggccgccttcggcatcctgagctacgagcacagacccctgaagagacccagactgggcccccccgacgtgtacccccaggaccccaagcagaaggaggacgagctgaccgccctgaacgtgaagcagggcttcaacaaccagcccgccgtgagcggcgacgagcacggcagcgccaagaacgtgagcttcaaccccgccaagatcagcagcaacttcagcagcatcatcgccgagaagctgagatgcaacaccctgcccgacaccggcagaagaaagccccaggtgaaccagaaggacaacttctggctggtgaccgccagaagccagagcgccatcaacacctggttcaccgacctggccggcaccaagcccctgacccagctggccaagaaggtgcccatcttcagcaagaaggaggaggtgttcggctacctggccaagtacaccgtgcccgtgatgagagccgcctggctgatcaagatgacctgcgcctactacgccgccatcagcgagaccaaggtgaagaagagacacgtggaccccttcatggagtggacccagatcatcaccaagtacctgtgggagcagctgcagaagatggccgagtactacagacccggccccgccggcagcggcggctgcggcagcaccatcggccccctgccccacgacgtggaggtggccatcagacagtgggactacaccgagaagctggccatgttcatgttccaggacggcatgctggacagacacgagttcctgacctgggtgctggagtgcttcgagaagatcagacccggcgaggacgagctgctgaagctgctgctgcccctgctgctgagatacagcggcgagttcgtgcagagcgcctacctgagcagaagactggcctacttctgcaccagaagactggccctgcagctggacggcgtgagcagccacagcagccacgtgatcagcgcccagagcaccagcaccctgcccaccacccccgccccccagccccccaccagcagcacccccagcacccccttcagcgacctgctgatgtgcccccagcacagacccctggtgttcggcctgagctgcatcctgcagaccatcctgctgtgctgccccagcgccctggtgtggcactacagcctgaccgacagcagaatcaagaccggcagccccctggaccacctgcccatcgcccccagcaacctgcccatgcccgagggcaacagcgccttcacccagcaggtgagagccaagctgagagagatcgagcagcagatcaaggagagaggccaggccgtggaggtgagatggagcttcgacaagtgccaggaggccaccgccggcttcaccatcggcagagtgctgcacaccctggaggtgctggacagccacagcttcgagagaagcgacttcagcaacagcctggacagcctgtgcaacagaatcttcggcctgggccccagcaaggacggccacgagatcagcagcgacgacgacgccgtggtgagcctgctgtgcgagtgggccgtgagctgcaagagaagcggcagacacagagccatggtggtggccaagctgctggagaagagacaggccgagatcgaggccgagagatgcggcgagagcgaggccgccgacgagaagggcagcatcgccagcggcagcctgagcgcccccagcgcccccatcttccaggacgtgctgctgcagttcctggacacccaggcccccatgctgaccgaccccagaagcgagagcgagagagtggagttcttcaacctggtgctgctgttctgcgagctgatcagacacgacgtgttcagccacaacatgtacacctgcaccctgatcagcagaggcgacctggccttcggcgcccccggccccagaccccccagccccttcgacgaccccgccgacgaccccgagcacaaggaggccgagggcagcagcagcagcaagctggaggaccccggcctgagcgagagcatggacatcgaccccagcagcagcgtgctgttcgaggacatggagaagcccgacttcagcctgttcagccccaccatgccctgcgagggcaagggcagccccagccccgagaagcccgacgtggagaaggaggtgaagcccccccccaaggagaagatcgagggcaccctgggcgtgctgtacgaccagcccagacacgtgcagtacgccacccacttccccatcccccaggaggagagctgcagccacgagtgcaaccagagactggtggtgctgttcggcgtgggcaagcagagagacgacgccagacacgccatcaagaagatcaccaaggacatcctgaaggtgctgaacagaaagggcaccgccgagaccgaccagctggcccccatcgtgcccctgaaccccggcgacctgaccttcctgggcggcgaggacggccagaagagaagaagaaacagacccgaggccttccccaccgccgaggacatcttcgccaagttccagcacctgagccactacgaccagcaccaggtgaccgcccaggtgagcagaaacgtgctggagcagatcaccagcttcgccctgggcatgagctaccacctgcccctggtgcagcacgtgcagttcatcttcgacctgatggagtacagcctgagcatcagcggcctgatcgacttcgccatccagctgctgaacgagctgagcgtggtggaggccgagctgctgctgaagagcagcgacctggtgggcagctacaccaccagcctgtgcctgtgcatcgtggccgtgctgagacactaccacgcctgcctgatcctgaaccaggaccagatggcccaggtgttcgagggcctgtgcggcgtggtgaagcacggcatgaacagaagcgacggcagcagcgccgagagatgcatcctggcctacctgtacgacctgtacaccagctgcagccacctgaagaacaagttcggcgagctgttcagcgacttctgcagcaaggtgaagaacaccatctactgcaacgtggagcccagcgagagcaacatgagatgggcccccgagttcatgatcgacaccctggagaaccccgccgcccacaccttcacctacaccggcctgggcaagagcctgagcgagaaccccgccaacagatacagcttcgtgtgcaacgccctgatgcacgtgtgcgtgggccaccacgaccccgacagagtgaacgacatcgccatcctgtgcgccgagctgaccggctactgcaagagcctgagcgccgagtggctgggcgtgctgaaggccctgtgctgcagcagcaacaacggcacctgcggcttcaacgacctgctgtgcaacgtggacgtgagcgacctgagcttccacgacagcctggccaccttcgtggccatcctgatcgccagacagtgcctgctgctggaggacctgatcagatgcgccgccatccccagcctgctgaacgccgcctgcagcgagcaggacagcgagcccggcgccagactgacctgcagaatcctgctgcacctgttcaagaccccccagctgaacccctgccagagcgacggcaacaagcccaccgtgggcatcagaagcagctgcgacagacacctgctggccgccagccagaacagaatcgtggacggcgccgtgttcgccgtgctgaaggccgtgttcgtgctgggcgacgccgagctgaagggcagcggcttcaccgtgaccggcggcaccgaggagctgcccgaggaggagggcggcggcggcagcggcggcagaagacagggcggcagaaacatcagcgtggagaccgccagcctggacgtgtacgccaagtacgtgctgagaagcatctgccagcaggagtgggtgggcgagagatgcctgaagagcctgtgcgaggacagcaacgacctgcaggaccccgtgctgagcagcgcccaggcccagagactgatgcagctgatctgctacccccacagactgctggacaacgaggacggcgagaacccccagagacagagaatcaagagaatcctgcagaacctggaccagtggaccatgagacagagcagcctggagctgcagctgatgatcaagcagacccccaacaacgagatgaacagcctgctggagaacatcgccaaggccaccatcgaggtgttccagcagagcgccgagaccggcagcagcagcggcagcaccgccagcaacatgcccagcagcagcaagaccaagcccgtgctgagcagcctggagagaagcggcgtgtggctggtggcccccctgatcgccaagctgcccaccagcgtgcagggccacgtgctgaaggccgccggcgaggagctggagaagggccagcacctgggcagcagcagcagaaaggagagagacagacagaagcagaagagcatgagcctgctgagccagcagcccttcctgagcctggtgctgacctgcctgaagggccaggacgagcagagagagggcctgctgaccagcctgtacagccaggtgcaccagatcgtgaacaactggagagacgaccagtacctggacgactgcaagcccaagcagctgatgcacgaggccctgaagctgagactgaacctggtgggcggcatgttcgacaccgtgcagagaagcacccagcagaccaccgagtgggccatgctgctgctggagatcatcatcagcggcaccgtggacatgcagagcaacaacgagctgttcaccaccgtgctggacatgctgagcgtgctgatcaacggcaccctggccgccgacatgagcagcatcagccagggcagcatggaggagaacaagagagcctacatgaacctggccaagaagctgcagaaggagctgggcgagagacagagcgacagcctggagaaggtgagacagctgctgcccctgcccaagcagaccagagacgtgatcacctgcgagccccagggcagcctgatcgacaccaagggcaacaagatcgccggcttcgacagcatcttcaagaaggagggcctgcaggtgagcaccaagcagaagatcagcccctgggacctgttcgagggcctgaagcccagcgcccccctgagctggggctggttcggcaccgtgagagtggacagaagagtggccagaggcgaggagcagcagagactgctgctgtaccacacccacctgagacccagacccagagcctactacctggagcccctgcccctgccccccgaggacgaggagccccccgcccccaccctgctggagcccgagaagaaggcccccgagccccccaagaccgacaagcccggcgccgccccccccagcaccgaggagagaaagaagaagagcaccaagggcaagaagagaagccagcccgccaccaagaccgaggactacggcatgggccccggcagaagcggcccctacggcgtgaccgtgccccccgacctgctgcaccaccccaaccccggcagcatcacccacctgaactacagacagggcagcatcggcctgtacacccagaaccagcccctgcccgccggcggccccagagtggacccctacagacccgtgagactgcccatgcagaagctgcccaccagacccacctaccccggcgtgctgcccaccaccatgaccggcgtgatgggcctggagcccagcagctacaagaccagcgtgtacagacagcagcagcccgccgtgccccagggccagagactgagacagcagctgcagcagagccagggcatgctgggccagagcagcgtgcaccagatgacccccagcagcagctacggcctgcagaccagccagggctacaccccctacgtgagccacgtgggcctgcagcagcacaccggccccgccgaccccaccagacacctgcagcagagacccagcggctacgtgcaccagcaggcccccacctacggccacggcctgaccagcacccagagcttccacaccagacactgcagcagacacccctag

SEQ ID NO: 277910 - protein, 663 aa, Artificial Sequence
  derived and/or modified sequence
MAITLQPSDLIFEFASNGMDDDIHQLEDPSVFPAVIVEQVPYPDLLHLYSGLELDDVHNGIITDGTLCMTQDQILEGSFLLTDDNEATSHTMSTAEVLLNMESPSDILDEKQIFSTSEMLPDSDPAPAVTLPNYLFPASEPDALNRAGDTSDQEGHSLEEKASREESAKKTGKSKKRIRKTKGNRSTSPVTDPSIPIRKKSKDGKGSTIYLWEFLLALLQDRNTCPKYIKWTQREKGIFKLVDSKAVSKLWGKQKNKPDMNYETMGRALRYYYQRGILAKVEGQRLVYQFKEMPKDLVVIEDEDESSEATAAPPQASTASVASASTTRRTSSRVSSRSAPQGKGSSSWEKPKIQHVGLQPSASLELGPSLDEEIPTTSTMLVSPAEGQVKLTKAVSASSVPSNIHLGVAPVGSGSALTLQTIPLTTVLTNGPPASTTAPTQLVLQSVPAASTFKDTFTLQASFPLNASFQDSQVAAPGAPLILSGLPQLLAGANRPTNPAPPTVTGAGPAGPSSQPPGTVIAAFIRTSGTTAAPRVKEGPLRSSSYVQGMVTGAPMEGLLVPEETLRELLRDQAHLQPLPTQVVSRGSHNPSLLGNQTLSPPSRPTVGLTPVAELELSSGSGSLLMAEPSVTTSGSLLTRSPTPAPFSPFNPTSLIKMEPHDI

SEQ ID NO: 277911 - protein, 77 aa, Artificial Sequence
  derived and/or modified sequence
MDDDIHQLEDPSVFPAVIVEQVPYPDLLHLYSGLELDDVHNGIITDGTLCMTQDQILEGSFLLTDDNEATSHTMSTA

SEQ ID NO: 277912 - DNA, 4195 bp, Artificial Sequence
  derived and/or modified sequence
tccacttctcctttcgccggcgccgagttcctggcgccgctcgcccggcccggcttccgaggggagaggacgggctggcggggctggggacccgcgtctcggcccccggagcggggaccacggagacagaccccggcccggcgaccgagctgggcccgtgagccactcggcctcaggtcgctcctgtggttggtccagcccagaatgcagccttgagcctggcttaggccaccacctactccagctctctccaccccctattttactgcagctcagggggtaggctctaggctccaaagtacctgggtattgtcccttcatcaagaaagccccacagctctggagggctctgataatcccgttgtcagctctctgaaaagacagcatggctattaccctacagcccagtgacctgatctttgagttcgcaagcaacgggatggatgatgatatccaccagctggaagacccctctgtgttcccagctgtgatcgtggagcaggtaccctaccctgatttactgcatctgtactcgggactggagttggacgacgttcacaatggcatcataacagacgggaccttgtgcatgacgcaggatcagatcctggaaggcagttttttgctgacagatgacaatgaggccacctcgcacaccatgtcaaccgcggaagtcttactcaatatggagtctcccagcgatatcctggatgagaagcagatcttcagtacctccgaaatgcttccagactcggaccctgcaccagctgtcactctgcccaactacctgtttcctgcctctgagcccgatgccctgaacagggcgggtgacactagtgaccaggaggggcattctctggaggagaaggcctccagagaggaaagtgccaagaagactgggaaatcaaagaagagaatccggaagaccaagggcaaccgaagtacctcacctgtcactgaccccagcatccccattaggaagaaatcaaaggatggcaaaggcagcaccatctatctgtgggagttcctcctggctcttctgcaagacagaaacacctgtcccaagtacatcaagtggacccagcgagagaaaggcatcttcaaactggtggactccaaagctgtgtccaagctgtgggggaagcagaaaaacaagcctgacatgaactatgagacaatggggcgggcactaagatactactaccaaagaggcatactggccaaagtggaagggcagaggctggtgtaccagtttaaggagatgcccaaggacctggtggtcattgaagatgaggatgagagcagcgaagccacagcagccccacctcaggcctccacggcctctgtggcctctgccagtaccacccggcgaaccagctccagggtctcatccagatctgccccccagggcaagggcagctcttcttgggagaagccaaaaattcagcatgtcggtctccagccatctgcgagtctggaattgggaccgtcgctagacgaggagatccccactacctccaccatgctcgtctctccagcagagggccaggtcaagctcaccaaagctgtgagtgcatcttcagtgcccagcaacatccacctaggagtggcccccgtggggtcgggctcggccctgaccctgcagacgatcccactgaccacggtgctgaccaatgggcctcctgccagtactactgctcccactcagctcgttctccagagtgttccagcggcctctactttcaaggacaccttcactttgcaggcctctttccccctgaacgccagtttccaagacagccaggtggcagccccaggggctccactgattctcagtggcctcccccaacttctggctggggccaaccgtccgaccaacccggcgccacccacggtcacaggggctggaccagcagggcccagctctcagccccctgggactgtcattgctgccttcatcaggacttctggcactacagcagcccctagggtcaaggaggggccactgaggtcctcctcctatgttcagggtatggtgacgggggcccccatggaggggctgctggttcctgaagagaccctgagggagctcctgagagatcaggctcatcttcagccacttccaacccaggtggtttccaggggttcccacaatccgagccttctgggcaaccagactttgtctcctcccagccgccccactgttgggctgaccccagtggctgaacttgagctctcctcaggctcagggtccctgctgatggctgagcctagtgtgaccacatctgggagccttctgacaagatcccccaccccagcccctttctccccattcaaccctacttccctcattaagatggagccccatgacatataagcaaaggggtcagggcaagtgtgacccaccaggcaaaattgagcagcattttcatagggaccgacttcagtagcacacctgcccctgcatttcagtgggatgtcaatacacttgaccccaagtcccccggccctgcctggtgtcactgtggccaaacagtgcccagcttaagcatccctggcatcagactatggccttcaagagcactagggcatatgcttttggcagcataacgggctgacttggtgatggagggaaaaagccttgagccaggcagaagtttgtggccagggtttgtgcagcagctttgtgagaagagcccttctacctggctctatctcactggctgcattccctacacagggaatttactaccctatatgtgaatatccctgtatgtacttgtgtgtacttgttggtctgtatcttagtttctttggggaggacagggctgtagctgtgaggtcttgtctccaagggtgtgtgtatgtctccgtggatcagccacagggatagggattttgtttttaagggaaagcattctctaattccctttgttcatgccgagattcagttgctctgagactatggggtacaagtttgatcctccgaatctggagatgttgtagagctggaacgagtgcagagtaggaacgctttgatgcgcatgcacattggggaagatgcgctcctcagggacacaaaggccgagtggggtaaaaccacgaagggagggaagggaagtcagctctgggagcagccctcactggctggaccaaggtactcttcctggagtttgccgtgttagcaaccacagtcaccttgcagtcaggctggaatcttgggccaccccaaagtgctttgctgaaggatttagacggggatgaagtgccctccagcctcagagctagccacaaagcccccagagctgaattcattgagtatttgtgcctagggcttgggctgtttgtgtgataccggccccccgccagacaatagcctttgctgacaccccagcctacttccccgatcctgggctccctcttgattactttttgacattttccagctgtcaggcatcactgcggctagtccggcagcgacctagatggggtccacccccattcctgctcaagcatgggcacctaccacatggtttctgctgctcagcctgcctgcaactcacctcgaaggcggaccagcctgcctctgtgatgactgcagcagacctccttgggtgtaccaatgcccctcatctcccactttcacacctaaccctgactccttcaccaagaagacgggagtcggcagccaggagttcccgtggcacctctctctcttcgtggctccctgcttcccccttccctctttccgaggaagggtcaacctattctctctcaaagccaacccctaggccaattgcctggatctcctcccctctcccttctttaaacgagcttgcctccctcctgccaagtttgagggcaaggctaagaaatgtcagccacggaaacaactctattatctggtgactttgggtaatgtgaatcagtgcctgaggacctttgctgtgtccttggtacagaaccatccacttgacctaactacctcccctggccgcgctctcgctcttctcttctttgttaagccaacaactatcaccctctcctactcttcttctccctgccccctggagggcactgtgtttggttgtgcaaatgtatttactatgcgtgtttccagcagttggcattaaagtgcctttttctaataaaatcagtttattatgacagtttcctgaaaaaaaaaaaaaaaaaa

SEQ ID NO: 277913 - DNA, 1992 bp, Artificial Sequence
  derived and/or modified sequence
atggctattacgctgcaacccagtgacctgattttcgaatttgcatccaatggaatggatgacgacatccatcaattggaggacccatccgtattcccggcggtgattgtcgagcaagtgccttatcctgatttgctacatctgtatagcggcctcgagctagatgatgtgcataatgggattattactgatggtactctgtgcatgacccaagatcaaattctggagggtagctttttgcttaccgacgacaacgaagccacttcccacaccatgagcacagcagaagtccttttgaacatggagtctcccagtgacattttggatgagaaacaaattttctcaacatccgagatgctgccagacagtgacccagctcccgccgtaaccttgcccaattatctttttcccgcatccgagcccgacgccctgaatcgggctggcgacacctctgaccaggagggacactcactggaggagaaagcctccagagaggagagcgcaaagaaaactgggaaaagtaagaaacggatcaggaagaccaaaggaaatagatccacttctcccgtcacagatccctcgatcccaattcgaaagaaaagcaaggacggaaaggggtccaccatttacctttgggaatttctcctggccctgctgcaagatcgcaacacatgtccaaaatatattaagtggactcagcgggaaaagggtatcttcaagctggtggacagtaaggctgtgagcaagctgtggggaaaacaaaaaaataagcccgatatgaactacgaaacaatggggcgcgccctgaggtactactaccagcggggaatcctggctaaagttgaaggacaaaggctggtgtaccagttcaaggagatgcccaaagatctggtggtgattgaggacgaggatgagtctagtgaggctacagcggccccgcctcaggcctcgacggccagtgtggccagcgcatcgacaacccgacgcactagttccagagtttcctcaaggtctgccccccagggcaaaggaagctcatcctgggagaaaccaaaaattcagcacgtaggccttcagccttcagcttccttggagttgggaccatctttagacgaagagataccaactacctccaccatgctcgtcagtcccgccgaggggcaagtgaagctgacaaaggctgtttctgccagttctgtgccctccaacattcacctcggcgtcgcccctgtgggatccggatctgctctgacattacaaacaatcccactcactaccgttctaaccaacggccccccagcatctacaacggcccccacacagttggtgttacaatcagtaccggccgctagcacatttaaggacacctttactctgcaggctagttttccactgaatgccagttttcaggactcccaggtcgccgccccgggtgcccccctgatattaagcgggctccctcagctcctggctggcgcaaatcggcctacaaaccctgccccaccgacggtaaccggcgccggaccagccggacctagctcccaacccccaggaaccgtaatcgctgcgttcattcgcacgagcgggaccactgctgctccgagagtgaaagaggggcctctcagatcctcctcttacgtgcagggcatggttactggagcccccatggaggggctgctcgtaccagaggaaacattgcgagagcttctgagagatcaagcccatctgcagccattacccacccaggtggtctcaagggggtcccataacccaagtctgctcgggaaccagaccttatcaccccccagtaggccgaccgttggcttaacccccgtggcagaacttgaactgtccagcggcagtggatcgttgcttatggctgagccatccgtgacgaccagcggatccctgctgaccaggtcgcctacccccgcacctttttctcctttcaatcccacaagcctcatcaagatggagccacatgacatttag

SEQ ID NO: 277914 - DNA, 1992 bp, Artificial Sequence
  derived and/or modified sequence
atggcaattaccttacagcctagcgatctcatcttcgaattcgctagcaacggcatggacgatgatatacaccagctcgaagatcccagcgtgttcccagctgtgattgtcgaacaggtgccgtacccggatcttctccatctttactccggactggaactggacgatgttcataacggcattatcacagacggcactctatgcatgacgcaagatcaaatactagagggcagctttcttctaaccgatgacaatgaagcaaccagccatactatgagcacggcagaggtgttgttgaatatggagtccccttctgatatcttagatgaaaaacagatcttctctacgagtgaaatgttaccagattcagaccctgcaccagcggtgacacttcccaactatcttttcccagccagcgagcccgacgcactgaatcgcgccggggacacatccgaccaggaaggccattccctggaagagaaggcctctagggaggagtcggccaagaaaacaggcaaatcaaaaaaacgcattaggaaaactaagggtaataggtccacaagtccagtcaccgacccctccatccctatcagaaagaagagcaaagacggtaaaggcagcacaatatatctatgggaatttttactggctttgctgcaggaccgcaatacctgtcccaaatacattaagtggacacagagagaaaaggggatttttaagctggtggatagcaaggctgtcagtaaactgtgggggaaacagaaaaataagccagatatgaactatgagactatgggcagggccctgcgctactactatcagcgcggcattctcgctaaagtagaggggcagcgacttgtataccagtttaaagaaatgcccaaggatctggtcgtcatagaagacgaggacgaatcatcagaggccactgccgcccctcctcaggcttctacggcttctgtagccagtgcatctaccacgcgcaggacgtcctctagagtctcctccaggagtgcccctcaaggtaaaggaagctcctcctgggaaaagccgaagatacagcatgtgggcctccagccttcggctagtctcgagctgggaccttcactggacgaagagattcctaccacgtcaaccatgctggtctcccccgccgaaggtcaggtaaaactgacaaaagctgtttcagcttcatccgttccatctaacattcacctgggggtggcccctgtggggagtggttctgcactgacacttcagacaatcccgcttaccacagtgctcacaaacggacctccagcctcaaccaccgctccgacccagctggtactccaaagcgtgcccgccgcgagcacgttcaaggataccttcaccttgcaagcctcgttccccctcaacgcctcatttcaggactcacaggtggccgctccgggcgcccccctcattctctcggggcttcctcaacttctggccggtgcaaacagaccaacaaaccccgccccccccaccgttacaggagccggccctgcaggtccctcaagccagcccccaggcacggtgattgcagcgtttatcagaacttcagggaccacagccgcacccagagttaaagaagggcctctccgtagctcaagctatgtccaggggatggtgacgggagctcccatggaaggcctgttggtgcccgaagagaccctgagggagctgctgcgcgaccaggcccacctgcagcccctgccgacccaagtggtgagccgtggctcccataatccatccctattgggcaaccagactctctcccctccatctagacccaccgtcggtctgacccccgtggcagagttggaactaagttcgggatcagggtccctgcttatggcggaaccgtccgtgaccacaagcggcagccttctcacccgcagcccaacgcccgccccgttttcaccgtttaaccccacgagtctgatcaaaatggagccacatgacatttag

SEQ ID NO: 277915 - DNA, 234 bp, Artificial Sequence
  derived and/or modified sequence
atggacgatgacatacatcagctcgaggatcccagtgtctttccagcagtgatagtggaacaggtgccttacccagatctgctccatctgtacagcgggctcgaattagatgatgttcacaacggaataattacagacggaacattgtgcatgacacaggatcagatcctggagggctcattcctcttaacggacgacaatgaggccaccagtcatacaatgtcaaccgcatag

SEQ ID NO: 277916 - DNA, 1992 bp, Artificial Sequence
  derived and/or modified sequence
atggccatcaccctgcagcccagcgacctgatctttgaatttgccagcaatggcatggatgatgacatccaccagctggaggaccccagcgtcttccctgctgtgattgtggagcaggtgccctacccagacctgctgcacctgtacagcggcctggagctggatgatgtgcacaacggcatcatcacagatggcaccctgtgcatgacccaggaccagatcctggagggcagcttcctgctgacagatgacaatgaggccaccagccacaccatgagcacagctgaggtgctgctgaacatggagagccccagcgacatcctggatgagaagcagatcttcagcaccagcgagatgctgcctgacagcgaccctgccccagctgtgaccctgcccaactacctgtttcctgccagcgagccagatgccctgaacagagctggggacaccagtgaccaggagggccacagcctggaggagaaggccagccgggaggagagcgccaagaagacaggcaagagcaagaagaggatcaggaagaccaagggcaacagaagcaccagccctgtgacagaccccagcatccccatcaggaagaagagcaaggatggcaagggcagcaccatctacctgtgggagttcctgctggccctgctgcaggacaggaacacctgccccaagtacatcaagtggacccagcgggagaagggcatcttcaagctggtggacagcaaggctgtgtccaagctgtggggcaagcagaagaacaagccagacatgaactatgagaccatgggccgggccctgcgctactactaccagaggggcatcctggccaaggtggagggccagaggctggtgtaccagttcaaggagatgcccaaggacctggtggtgattgaagatgaagatgagagcagcgaggccacagctgccccaccccaggccagcacagcctctgtggccagcgccagcaccaccaggaggaccagcagccgggtgagcagccgcagcgccccccagggcaagggcagcagctcctgggagaagcccaagatccagcacgtgggcctgcagcccagcgccagcctggagctgggccccagcctggatgaggagatccccaccaccagcaccatgctggtgtccccagctgagggccaggtgaagctgaccaaggctgtgtctgccagctctgtgcccagcaacatccacctgggcgtggcccctgtgggcagcggcagcgccctgaccctgcagaccatccccctgaccaccgtgctgaccaacggccccccagccagcaccacagcccccacccagctggtgctgcagagcgtgcctgctgccagcaccttcaaggacaccttcaccctgcaggccagcttccccctgaatgccagcttccaggacagccaggtggccgcccctggggcccccctcatcctgagcggcctgccccagctgctggccggggccaaccggcccaccaacccagcccccccaacagtgactggagctggccctgctggccccagcagccagcccccaggcaccgtgattgctgccttcatccgcaccagcggcaccacagctgccccccgggtgaaggagggccccctgcggagcagcagctatgtgcagggcatggtgactggagcccccatggagggcctgctggtgcctgaggagaccctgcgggagctgctgcgggaccaggcccacctgcagcccctgcccacccaggtggtgtcccggggcagccacaaccccagcctgctgggcaaccagaccctgagcccccccagccggcccaccgtgggcctgacccctgtggccgagctggagctgagcagcggcagcggcagcctgctgatggccgagcccagcgtgaccaccagcggcagcctgctgaccaggagccccaccccagcccccttcagccccttcaaccccaccagcctcatcaagatggagccccatgacatctag

SEQ ID NO: 277917 - DNA, 234 bp, Artificial Sequence
  derived and/or modified sequence
atggatgatgacatccaccagctggaggaccccagcgtcttccctgctgtgattgtggagcaggtgccctacccagacctgctgcacctgtacagcggcctggagctggatgatgtgcacaacggcatcatcacagatggcaccctgtgcatgacccaggaccagatcctggagggcagcttcctgctgacagatgacaatgaggccaccagccacaccatgagcacagcctag

SEQ ID NO: 277918 - DNA, 1992 bp, Artificial Sequence
  derived and/or modified sequence
atggccatcaccctgcagcccagcgacctgatcttcgagttcgcctcaaacgggatggatgacgatattcatcagctggaggacccatccgtgtttcctgctgtcattgtagaacaagtcccctaccccgatctcttgcatctttatagtggattggaactggatgatgtacacaatggaataattacagacggcactctctgtatgacgcaggaccagattctggagggctcctttttacttactgatgacaatgaggcaacgagtcacactatgtctaccgccgaggtgctcctgaacatggagtccccgtcggatattctggacgaaaagcagatcttctctaccagtgagatgctcccagattccgacccggcccccgccgtcacccttcctaattatctgtttcctgcaagtgagcccgatgccctgaatcgggccggcgatacctcagaccaggagggccattcgttggaggagaaagcctcacgcgaggagtccgccaagaaaaccgggaaaagtaagaagcgaatccgtaagaccaaaggaaaccggtccacatcacccgtcactgacccctccattcccataaggaaaaagtcaaaagacggaaaaggaagcacgatctacctgtgggagtttctgttggcactccttcaggacaggaatacctgccctaaatacattaaatggacacaacgcgagaaaggaatttttaagcttgtggactccaaggcggtgtccaagctttggggcaaacagaagaacaagcccgatatgaactatgagactatggggagagccttgaggtattactatcagcggggaatcctcgccaaggtggagggacaaagacttgtttatcagtttaaagaaatgccgaaggacttagtggtgatagaagatgaagacgagtctagtgaggccaccgctgctcctccacaggctagtactgctagcgtagcgagcgcgagtacaacccgacgcaccagttcacgggtaagttccagatcggcacctcaaggcaagggcagctcttcctgggaaaagcctaaaattcagcatgtcggcctacagccatccgcttcgttagagctgggtccatccttggacgaggagattccgacaacaagcacaatgctggtaagtccagctgaaggacaggtgaagctcaccaaggctgtgagtgcatcatctgtaccgtcgaatattcacctgggagtggccccagtggggtcaggttccgctctcacccttcagaccatacccctcaccacagtgcttaccaacggtcctccggcctcaacgaccgccccaacccagctcgtgttacagtcagtgccagctgccagtaccttcaaggatacgttcaccttacaggccagcttccctctaaatgcctctttccaggacagtcaggtggccgctcctggtgccccacttatcctgtcaggactgccacagctcctggccggagcaaataggcctaccaatcccgcccctcctaccgtgactggggcaggccccgcaggtccgtcatcccagccaccgggcacggtgattgccgcttttatccgtacgtctggcacaaccgccgctccacgtgttaaggaaggtcctttgaggtccagcagttacgtgcagggcatggtaacaggcgcgcccatggaaggcctgctggtcccggaagagaccttacgggaactgctgagagatcaggcccatctccagccactgcctacacaggttgtatccaggggtagtcacaatccatccctgcttggtaatcagacacttagcccgccctcgcggcctaccgtggggctaactccagttgctgagctggagctttcatctggttccggttctctgctcatggcagaacccagcgtaactacgtccggcagtttgctgacacgttccccaacccccgcacccttctcacccttcaacccaaccagcttgatcaaaatggagccgcacgacatttag

SEQ ID NO: 277919 - DNA, 1992 bp, Artificial Sequence
  derived and/or modified sequence
atggccatcaccctgcagcccagcgacctgatcttcgagttcgccagcaacgggatggacgatgatatccaccaattggaagatccttccgtttttcccgcagtaatcgtggagcaagttccttaccccgatctcttacacctgtactctggcttggaacttgatgacgtgcacaacggaattataacagatggtaccctctgcatgacacaggaccagattctcgagggatccttcctattaacagatgacaatgaagccacctcacacacaatgagcaccgcagaggtgctgctcaacatggagagcccaagtgatattctggacgaaaagcagattttttcaacttccgagatgctgccggactccgaccccgctccagctgtgacccttccaaattacctcttcccagccagtgaaccagacgcccttaatagagctggggatacatccgaccaggaggggcatagcctggaagagaaggcatcccgcgaagagtccgctaagaaaacggggaaatccaaaaagagaattcgcaagaccaagggaaatagatcaacatccccagtcacagatcccagtatacccattcgtaaaaagagtaaggacgggaaggggagcactatatatctttgggaattcctcctcgcactgcttcaggatcggaacacttgtcccaagtacatcaagtggacccagcgggagaaggggatctttaagctggtagacagtaaggccgtttctaagctgtgggggaagcagaagaataagccagatatgaattatgagacaatgggacgggccctcagatattattaccagcgaggcattctggcaaaagttgaagggcagcgtctggtttaccagttcaaggaaatgcctaaagacctggttgtgattgaggacgaggacgaaagcagtgaggccacagccgcacccccacaggcctctacagctagcgtcgcgagcgcttctactaccaggcggacctcaagcagagtgtccagccgcagtgcccctcagggcaagggaagctcctcctgggagaagcccaagatccaacatgtcggactgcagccgtcggcttctttagaactgggtccttcattagacgaggagattcctactacaagcacgatgctggtgtcacctgcagaaggccaggtcaagcttaccaaagccgtctcagcttctagtgtgccttccaacattcacctgggggtcgcgcctgtcggcagcggctcagctctgaccctacagactatccccctcaccactgtcttgacgaatgggccgcccgcatccacaacagcccccacacaactggtcttgcagtcagtaccagcggcaagcacattcaaggacacattcacactccaggccagctttcctctaaacgctagcttccaggattcccaagtcgcagcccctggagcacccctgatactgagtggtctaccacagctccttgccggcgcaaatcgtcccaccaaccctgctcctccaaccgtcaccggggccgggcccgctggcccatcaagtcagccacctggcactgtgattgccgccttcatcaggacttctgggaccaccgcggcccctagagtgaaagaaggccccctgaggagttcgagctatgtacaaggtatggtgacaggggcccccatggaaggccttctcgtacctgaggagaccctgcgggagctgctccgggaccaagctcacctgcagcccttgccgacgcaggtggttagcagaggaagccacaacccgtccctgttaggcaaccagaccctctctccaccgagtcgcccaaccgtagggttaactcctgtggcagagcttgagctcagcagtgggtcagggagcctgttgatggccgagcctagcgtgacaacctctggctccctgctgaccaggtcccctacgccagcaccatttagccctttcaacccaactagccttattaaaatggagccacatgacatatag

SEQ ID NO: 277920 - DNA, 234 bp, Artificial Sequence
  derived and/or modified sequence
atggacgacgacatccaccagctggaggaccccagcgtgttccccgccgttatagtagagcaggtcccataccccgacctgctgcacctctactctgggctggaactcgacgacgtgcataacggcatcattactgacggtaccctgtgcatgacacaggaccagatcctcgagggaagttttctgttgactgacgacaacgaggcaacatcccatactatgtcgaccgcctag

SEQ ID NO: 277921 - DNA, 1992 bp, Artificial Sequence
  derived and/or modified sequence
atggccatcactctacagcccagtgatttaattttcgagttcgcctccaatggcatggacgacgatattcaccagctagaggaccccagcgtttttcccgcagtcattgtggagcaggttccttaccctgacctgttgcacctctactctggccttgaattggatgacgtgcataacgggataatcaccgatggaaccctttgcatgactcaggaccaaatccttgagggtagcttcttgctgacggatgataatgaggccacttcccatacaatgtcgaccgctgaggtgctgttgaacatggagagtccatcagacatactggacgaaaagcagatctttagtacctccgaaatgctcccagattccgatcctgcgcctgcagtgaccttacctaattacctgttccctgcatccgagcctgatgccttaaacagggctggcgatactagcgaccaggagggccacagcttggaagaaaaggctagtcgagaggaatcggccaaaaaaactgggaagtctaaaaaaagaataagaaagacgaaaggaaatcgaagcaccagcccagtcaccgatccctcaatacccatccgtaaaaaatctaaagatggcaaaggttccaccatatatctctgggaattcctgctggctctactacaggatcggaacacatgtccgaagtacatcaagtggacccaacgggaaaagggtattttcaagctggtggactcaaaagccgtctcgaagctttggggcaaacaaaagaataaacccgatatgaactacgaaactatgggcagagctctcaggtattattatcaacgtggtatcctggccaaggtcgaaggacagagattggtgtaccagttcaaagagatgcctaaagatttggttgtgatcgaggacgaagacgagtcctctgaggccaccgccgctccccctcaagccagtacagcctctgtcgcctcagctagcacaacccgacggacttcttcccgagtgtcctccaggtctgctcctcagggcaaaggatcctccagctgggagaaaccaaaaattcagcacgtgggactgcagcccagcgccagtctggagctgggaccatccttggacgaggagataccaaccactagcacaatgctggtctcccctgctgaggggcaggtgaagctcacaaaggcggtttccgcttcgagcgttccctctaacatacatttgggagtcgcgccagttgggagtgggtctgctctgaccctgcagacaattccacttaccactgtgctgaccaacggcccacccgcttctacaactgcgcctacacagctcgtgctgcagtcagtgcctgcagcgagcacctttaaggacactttcaccctgcaggcctcattcccattaaatgcgtccttccaggacagccaggttgcggctcctggagccccactgattttgtcgggcctgccacagctcttggcaggtgccaatcgtcccactaaccctgcaccgcctaccgtgaccggcgcagggcctgctggaccaagtagccagccacccggtactgtgattgccgctttcatccggacatccggtactacagcagctccacgcgtaaaagaaggtccgcttcgaagcagttcttacgttcagggcatggtgacgggagctcccatggaaggacttttggttccagaggaaacgttgagagagttgctccgagatcaagcacatctgcagccactacccacacaggttgtaagccggggaagccacaatccctctttgctcggaaatcagaccctgagtcccccaagcagaccaaccgtcgggctaacacccgtggctgaattggaactgtccagcgggtcagggtcattactcatggcggagccctccgtaaccacttctggcagtctgctgacaaggtccccaacccccgctcctttctcgccatttaatccaacgtctctgatcaagatggaaccccatgatatatag

SEQ ID NO: 277922 - DNA, 1992 bp, Artificial Sequence
  derived and/or modified sequence
atggcaatcactctgcaacccagcgaccttattttcgagtttgcttcaaacgggatggacgacgacatccatcaacttgaagatccttcagtttttcctgctgtcatagtggagcaggtgccatatcccgatctgttgcatctgtattcagggttggagctagacgatgtccataatggcattatcactgatggtaccctgtgcatgacccaagaccaaattctggaaggaagtttcctgctgactgacgacaacgaagctacaagccacacgatgtcaacagccgaggtgcttcttaatatggagtccccctcggacatactggatgaaaagcaaatttttagcaccagtgagatgctgcctgatagtgatcctgcacctgcggtcaccctgccaaattacttgtttcctgcctcagaacctgatgccctcaatcgggctggggacacgtctgaccaggaaggccactccttggaggaaaaagcaagcagagaagagtccgccaagaaaacaggaaagagtaaaaaacgtattcgcaagaccaagggcaacagatccacatcacctgtcacagatccttcaatccccatacggaagaagtctaaggatggtaagggatctacaatttacctctgggagtttttgctggcccttctgcaggatcgtaacacgtgtccgaaatacataaaatggacccagagagagaaggggatctttaagcttgtggactctaaagccgtctccaagctatggggcaagcaaaagaataaaccagacatgaattatgaaaccatggggagggccttgcgctattactaccagaggggaatcttggccaaagttgaggggcaacgactggtgtatcaatttaaggagatgccgaaggatttggtcgttatcgaggatgaagatgaaagttcagaagccaccgcggctccacctcaagcatccaccgcatctgtcgcctctgcttccacaacccgcaggacctctagccgggtgagtagtaggtccgcccctcagggaaaaggctcctcaagttgggaaaagccaaaaatacagcacgtggggcttcaacccagcgcctcactggagctgggcccaagtctcgatgaagaaattccaaccacatctaccatgctggtgagcccagcagagggacaagtcaagctaaccaaggcagtctccgccagctctgtgccttctaacatccatcttggagtagcgcctgtcggatctgggagcgccttgaccctacagactattcccctgaccactgtactaacgaacgggcctccagcctctacaaccgcaccaacacaattggtgctacagtcagtgccagctgctagcacttttaaggataccttcactctgcaggctagcttccctctcaacgcctcattccaagactctcaggtcgccgctcccggagctccactgattctgtcagggctcccccagctactggcaggtgccaaccgtcctaccaaccccgctcctcccaccgtcacaggagccggacccgctgggccatcatcacagccccctggcacagtcatcgccgcattcatcaggacttccgggactacagctgctcctcgggtaaaggagggcccactgcgcagcagtagctatgtccagggaatggtaaccggagcacccatggagggcctgctcgtgcctgaggaaacgttgcgcgagctgctaagagatcaggcccatttgcagccactgccaacccaggtggtgagcaggggaagccataacccgtccctgctgggcaaccagaccttgtcacccccaagtcggcctactgtgggactaacaccggtggcggagctggaactctccagtggatccgggtcactgctgatggcagaacctagtgtgaccacctcagggagcctgctgacacggagtccgactccagccccttttagtcccttcaatcccacgagcctgataaaaatggagccacatgatatctag

SEQ ID NO: 277923 - DNA, 234 bp, Artificial Sequence
  derived and/or modified sequence
atggacgatgatattcatcagctggaagaccccagcgtcttcccagccgtcattgttgaacaagtcccctaccctgaccttctacatctgtactcaggtctggaattagacgacgtgcataacggcattattaccgacggaaccctgtgcatgacacaggaccagattctagagggcagtttcctcctgacggacgacaacgaagccacttctcacacaatgagtacggcatag

SEQ ID NO: 277924 - DNA, 1992 bp, Artificial Sequence
  derived and/or modified sequence
atggccatcaccctgcagcccagcgacctgatcttcgagttcgccagcaacggcatggacgacgacatccaccagctggaggaccccagcgtgttccccgccgtgatcgtggagcaggtgccctaccccgacctgctgcacctgtacagcggcctggagctggacgacgtgcacaacggcatcatcaccgacggcaccctgtgcatgacccaggaccagatcctggagggcagcttcctgctgaccgacgacaacgaggccaccagccacaccatgagcaccgccgaggtgctgctgaacatggagagccccagcgacatcctggacgagaagcagatcttcagcaccagcgagatgctgcccgacagcgaccccgcccccgccgtgaccctgcccaactacctgttccccgccagcgagcccgacgccctgaacagagccggcgacaccagcgaccaggagggccacagcctggaggagaaggccagcagagaggagagcgccaagaagaccggcaagagcaagaagagaatcagaaagaccaagggcaacagaagcaccagccccgtgaccgaccccagcatccccatcagaaagaagagcaaggacggcaagggcagcaccatctacctgtgggagttcctgctggccctgctgcaggacagaaacacctgccccaagtacatcaagtggacccagagagagaagggcatcttcaagctggtggacagcaaggccgtgagcaagctgtggggcaagcagaagaacaagcccgacatgaactacgagaccatgggcagagccctgagatactactaccagagaggcatcctggccaaggtggagggccagagactggtgtaccagttcaaggagatgcccaaggacctggtggtgatcgaggacgaggacgagagcagcgaggccaccgccgcccccccccaggccagcaccgccagcgtggccagcgccagcaccaccagaagaaccagcagcagagtgagcagcagaagcgccccccagggcaagggcagcagcagctgggagaagcccaagatccagcacgtgggcctgcagcccagcgccagcctggagctgggccccagcctggacgaggagatccccaccaccagcaccatgctggtgagccccgccgagggccaggtgaagctgaccaaggccgtgagcgccagcagcgtgcccagcaacatccacctgggcgtggcccccgtgggcagcggcagcgccctgaccctgcagaccatccccctgaccaccgtgctgaccaacggcccccccgccagcaccaccgcccccacccagctggtgctgcagagcgtgcccgccgccagcaccttcaaggacaccttcaccctgcaggccagcttccccctgaacgccagcttccaggacagccaggtggccgcccccggcgcccccctgatcctgagcggcctgccccagctgctggccggcgccaacagacccaccaaccccgccccccccaccgtgaccggcgccggccccgccggccccagcagccagccccccggcaccgtgatcgccgccttcatcagaaccagcggcaccaccgccgcccccagagtgaaggagggccccctgagaagcagcagctacgtgcagggcatggtgaccggcgcccccatggagggcctgctggtgcccgaggagaccctgagagagctgctgagagaccaggcccacctgcagcccctgcccacccaggtggtgagcagaggcagccacaaccccagcctgctgggcaaccagaccctgagcccccccagcagacccaccgtgggcctgacccccgtggccgagctggagctgagcagcggcagcggcagcctgctgatggccgagcccagcgtgaccaccagcggcagcctgctgaccagaagccccacccccgcccccttcagccccttcaaccccaccagcctgatcaagatggagccccacgacatctag

SEQ ID NO: 277925 - DNA, 234 bp, Artificial Sequence
  derived and/or modified sequence
atggacgacgacatccaccagctggaggaccccagcgtgttccccgccgtgatcgtggagcaggtgccctaccccgacctgctgcacctgtacagcggcctggagctggacgacgtgcacaacggcatcatcaccgacggcaccctgtgcatgacccaggaccagatcctggagggcagcttcctgctgaccgacgacaacgaggccaccagccacaccatgagcaccgcctag

SEQ ID NO: 277926 - DNA, 4165 bp, Artificial Sequence
  derived and/or modified sequence
ttctcctttcgccggcgccgagttcctggcgccgctcgcccggcccggcttccgaggggagaggacgggctggcggggctggggacccgcgtctcggcccccggagcggggaccacggagacagaccccggcccggcgaccgagctgggcccgtgagccactcggcctcaggtcgctcctgtggttggtccagcccagaatgcagccttgagcctggcttaggccaccacctactccagctctctccaccccctattttactgcagctcagggggtaggctctaggctccaaagtacctgggtattgtcccttcatcaagaaagccccacagctctggagggctctgataatcccgttgtcagctctctgaaaagacagcatggctattaccctacagcccagtgacctgatctttgagttcgcaagcaacgggatggatgatgatatccaccagctggaagacccctctgtgttcccagctgtgatcgtggagcaggtaccctaccctgatttactgcatctgtactcgggactggagttggacgacgttcacaatggcatcataacagacgggaccttgtgcatgacgcaggatcagatcctggaaggcagttttttgctgacagatgacaatgaggccacctcgcacaccatgtcaaccgcggaagtcttactcaatatggagtctcccagcgatatcctggatgagaagcagatcttcagtacctccgaaatgcttccagactcggaccctgcaccagctgtcactctgcccaactacctgtttcctgcctctgagcccgatgccctgaacagggcgggtgacactagtgaccaggaggggcattctctggaggagaaggcctccagagaggaaagtgccaagaagactgggaaatcaaagaagagaatccggaagaccaagggcaaccgaagtacctcacctgtcactgaccccagcatccccattaggaagaaatcaaaggatggcaaaggcagcaccatctatctgtgggagttcctcctggctcttctgcaagacagaaacacctgtcccaagtacatcaagtggacccagcgagagaaaggcatcttcaaactggtggactccaaagctgtgtccaagctgtgggggaagcagaaaaacaagcctgacatgaactatgagacaatggggcgggcactaagatactactaccaaagaggcatactggccaaagtggaagggcagaggctggtgtaccagtttaaggagatgcccaaggacctggtggtcattgaagatgaggatgagagcagcgaagccacagcagccccacctcaggcctccacggcctctgtggcctctgccagtaccacccggcgaaccagctccagggtctcatccagatctgccccccagggcaagggcagctcttcttgggagaagccaaaaattcagcatgtcggtctccagccatctgcgagtctggaattgggaccgtcgctagacgaggagatccccactacctccaccatgctcgtctctccagcagagggccaggtcaagctcaccaaagctgtgagtgcatcttcagtgcccagcaacatccacctaggagtggcccccgtggggtcgggctcggccctgaccctgcagacgatcccactgaccacggtgctgaccaatgggcctcctgccagtactactgctcccactcagctcgttctccagagtgttccagcggcctctactttcaaggacaccttcactttgcaggcctctttccccctgaacgccagtttccaagacagccaggtggcagccccaggggctccactgattctcagtggcctcccccaacttctggctggggccaaccgtccgaccaacccggcgccacccacggtcacaggggctggaccagcagggcccagctctcagccccctgggactgtcattgctgccttcatcaggacttctggcactacagcagcccctagggtcaaggaggggccactgaggtcctcctcctatgttcagggtatggtgacgggggcccccatggaggggctgctggttcctgaagagaccctgagggagctcctgagagatcaggctcatcttcagccacttccaacccaggtggtttccaggggttcccacaatccgagccttctgggcaaccagactttgtctcctcccagccgccccactgttgggctgaccccagtggctgaacttgagctctcctcaggctcagggtccctgctgatggctgagcctagtgtgaccacatctgggagccttctgacaagatcccccaccccagcccctttctccccattcaaccctacttccctcattaagatggagccccatgacatataagcaaaggggtcagggcaagtgtgacccaccaggcaaaattgagcagcattttcatagggaccgacttcagtagcacacctgcccctgcatttcagtgggatgtcaatacacttgaccccaagtcccccggccctgcctggtgtcactgtggccaaacagtgcccagcttaagcatccctggcatcagactatggccttcaagagcactagggcatatgcttttggcagcataacgggctgacttggtgatggagggaaaaagccttgagccaggcagaagtttgtggccagggtttgtgcagcagctttgtgagaagagcccttctacctggctctatctcactggctgcattccctacacagggaatttactaccctatatgtgaatatccctgtatgtacttgtgtgtacttgttggtctgtatcttagtttctttggggaggacagggctgtagctgtgaggtcttgtctccaagggtgtgtgtatgtctccgtggatcagccacagggatagggattttgtttttaagggaaagcattctctaattccctttgttcatgccgagattcagttgctctgagactatggggtacaagtttgatcctccgaatctggagatgttgtagagctggaacgagtgcagagtaggaacgctttgatgcgcatgcacattggggaagatgcgctcctcagggacacaaaggccgagtggggtaaaaccacgaagggagggaagggaagtcagctctgggagcagccctcactggctggaccaaggtactcttcctggagtttgccgtgttagcaaccacagtcaccttgcagtcaggctggaatcttgggccaccccaaagtgctttgctgaaggatttagacggggatgaagtgccctccagcctcagagctagccacaaagcccccagagctgaattcattgagtatttgtgcctagggcttgggctgtttgtgtgataccggccccccgccagacaatagcctttgctgacaccccagcctacttccccgatcctgggctccctcttgattactttttgacattttccagctgtcaggcatcactgcggctagtccggcagcgacctagatggggtccacccccattcctgctcaagcatgggcacctaccacatggtttctgctgctcagcctgcctgcaactcacctcgaaggcggaccagcctgcctctgtgatgactgcagcagacctccttgggtgtaccaatgcccctcatctcccactttcacacctaaccctgactccttcaccaagaagacgggagtcggcagccaggagttcccgtggcacctctctctcttcgtggctccctgcttcccccttccctctttccgaggaagggtcaacctattctctctcaaagccaacccctaggccaattgcctggatctcctcccctctcccttctttaaacgagcttgcctccctcctgccaagtttgagggcaaggctaagaaatgtcagccacggaaacaactctattatctggtgactttgggtaatgtgaatcagtgcctgaggacctttgctgtgtccttggtacagaaccatccacttgacctaactacctcccctggccgcgctctcgctcttctcttctttgttaagccaacaactatcaccctctcctactcttcttctccctgccccctggagggcactgtgtttggttgtgcaaatgtatttactatgcgtgtttccagcagttggcattaaagtgcctttttctaataaaatcagtttattatgacag

SEQ ID NO: 277927 - DNA, 4145 bp, Artificial Sequence
  derived and/or modified sequence
ggtatttgcatctctccctccaacttgccattggcggcgcgaagtgtgggagagccctgcgcctcgcccgcccggaccagcctgccccggcgccgaggtcgctcctgtggttggtccagcccagaatgcagccttgagcctggcttaggccaccacctactccagctctctccaccccctattttactgcagctcagggggtaggctctaggctccaaagtacctgggtattgtcccttcatcaagaaagccccacagctctggagggctctgataatcccgttgtcagctctctgaaaagacagcatggctattaccctacagcccagtgacctgatctttgagttcgcaagcaacgggatggatgatgatatccaccagctggaagacccctctgtgttcccagctgtgatcgtggagcaggtaccctaccctgatttactgcatctgtactcgggactggagttggacgacgttcacaatggcatcataacagacgggaccttgtgcatgacgcaggatcagatcctggaaggcagttttttgctgacagatgacaatgaggccacctcgcacaccatgtcaaccgcggaagtcttactcaatatggagtctcccagcgatatcctggatgagaagcagatcttcagtacctccgaaatgcttccagactcggaccctgcaccagctgtcactctgcccaactacctgtttcctgcctctgagcccgatgccctgaacagggcgggtgacactagtgaccaggaggggcattctctggaggagaaggcctccagagaggaaagtgccaagaagactgggaaatcaaagaagagaatccggaagaccaagggcaaccgaagtacctcacctgtcactgaccccagcatccccattaggaagaaatcaaaggatggcaaaggcagcaccatctatctgtgggagttcctcctggctcttctgcaagacagaaacacctgtcccaagtacatcaagtggacccagcgagagaaaggcatcttcaaactggtggactccaaagctgtgtccaagctgtgggggaagcagaaaaacaagcctgacatgaactatgagacaatggggcgggcactaagatactactaccaaagaggcatactggccaaagtggaagggcagaggctggtgtaccagtttaaggagatgcccaaggacctggtggtcattgaagatgaggatgagagcagcgaagccacagcagccccacctcaggcctccacggcctctgtggcctctgccagtaccacccggcgaaccagctccagggtctcatccagatctgccccccagggcaagggcagctcttcttgggagaagccaaaaattcagcatgtcggtctccagccatctgcgagtctggaattgggaccgtcgctagacgaggagatccccactacctccaccatgctcgtctctccagcagagggccaggtcaagctcaccaaagctgtgagtgcatcttcagtgcccagcaacatccacctaggagtggcccccgtggggtcgggctcggccctgaccctgcagacgatcccactgaccacggtgctgaccaatgggcctcctgccagtactactgctcccactcagctcgttctccagagtgttccagcggcctctactttcaaggacaccttcactttgcaggcctctttccccctgaacgccagtttccaagacagccaggtggcagccccaggggctccactgattctcagtggcctcccccaacttctggctggggccaaccgtccgaccaacccggcgccacccacggtcacaggggctggaccagcagggcccagctctcagccccctgggactgtcattgctgccttcatcaggacttctggcactacagcagcccctagggtcaaggaggggccactgaggtcctcctcctatgttcagggtatggtgacgggggcccccatggaggggctgctggttcctgaagagaccctgagggagctcctgagagatcaggctcatcttcagccacttccaacccaggtggtttccaggggttcccacaatccgagccttctgggcaaccagactttgtctcctcccagccgccccactgttgggctgaccccagtggctgaacttgagctctcctcaggctcagggtccctgctgatggctgagcctagtgtgaccacatctgggagccttctgacaagatcccccaccccagcccctttctccccattcaaccctacttccctcattaagatggagccccatgacatataagcaaaggggtcagggcaagtgtgacccaccaggcaaaattgagcagcattttcatagggaccgacttcagtagcacacctgcccctgcatttcagtgggatgtcaatacacttgaccccaagtcccccggccctgcctggtgtcactgtggccaaacagtgcccagcttaagcatccctggcatcagactatggccttcaagagcactagggcatatgcttttggcagcataacgggctgacttggtgatggagggaaaaagccttgagccaggcagaagtttgtggccagggtttgtgcagcagctttgtgagaagagcccttctacctggctctatctcactggctgcattccctacacagggaatttactaccctatatgtgaatatccctgtatgtacttgtgtgtacttgttggtctgtatcttagtttctttggggaggacagggctgtagctgtgaggtcttgtctccaagggtgtgtgtatgtctccgtggatcagccacagggatagggattttgtttttaagggaaagcattctctaattccctttgttcatgccgagattcagttgctctgagactatggggtacaagtttgatcctccgaatctggagatgttgtagagctggaacgagtgcagagtaggaacgctttgatgcgcatgcacattggggaagatgcgctcctcagggacacaaaggccgagtggggtaaaaccacgaagggagggaagggaagtcagctctgggagcagccctcactggctggaccaaggtactcttcctggagtttgccgtgttagcaaccacagtcaccttgcagtcaggctggaatcttgggccaccccaaagtgctttgctgaaggatttagacggggatgaagtgccctccagcctcagagctagccacaaagcccccagagctgaattcattgagtatttgtgcctagggcttgggctgtttgtgtgataccggccccccgccagacaatagcctttgctgacaccccagcctacttccccgatcctgggctccctcttgattactttttgacattttccagctgtcaggcatcactgcggctagtccggcagcgacctagatggggtccacccccattcctgctcaagcatgggcacctaccacatggtttctgctgctcagcctgcctgcaactcacctcgaaggcggaccagcctgcctctgtgatgactgcagcagacctccttgggtgtaccaatgcccctcatctcccactttcacacctaaccctgactccttcaccaagaagacgggagtcggcagccaggagttcccgtggcacctctctctcttcgtggctccctgcttcccccttccctctttccgaggaagggtcaacctattctctctcaaagccaacccctaggccaattgcctggatctcctcccctctcccttctttaaacgagcttgcctccctcctgccaagtttgagggcaaggctaagaaatgtcagccacggaaacaactctattatctggtgactttgggtaatgtgaatcagtgcctgaggacctttgctgtgtccttggtacagaaccatccacttgacctaactacctcccctggccgcgctctcgctcttctcttctttgttaagccaacaactatcaccctctcctactcttcttctccctgccccctggagggcactgtgtttggttgtgcaaatgtatttactatgcgtgtttccagcagttggcattaaagtgcctttttctaataaaatcagtttattatgacagtttcctgatggttgaaagtaagcatcttgataaagggtcaccattaaaaaaaaa

SEQ ID NO: 277928 - DNA, 406 bp, Artificial Sequence
  derived and/or modified sequence
ggcgaccgagctgggcccgtgagccactcggcctcaggtcgctcctgtggttggtccagcccagaatgcagccttgagcctggcttaggccaccacctactccagctctctccaccccctattttactgcagctcaggggcccagtgacctgatctttgagttcgcaagcaacgggatggatgatgatatccaccagctggaagacccctctgtgttcccagctgtgatcgtggagcaggtaccctaccctgatttactgcatctgtactcgggactggagttggacgacgttcacaatggcatcataacagacgggaccttgtgcatgacgcaggatcagatcctggaaggcagttttttgctgacagatgacaatgaggccacctcgcacaccatgtcaaccgc

SEQ ID NO: 277929 - protein, 46 aa, Artificial Sequence
  derived and/or modified sequence
MQRVNMIMAESPSLITICLLGYLLSAECTVFLDHENANKILNRPKR

SEQ ID NO: 277930 - protein, 255 aa, Artificial Sequence
  derived and/or modified sequence
MSGKVTKPKEEKDASKVLDDAPPGTQEYIMLRQDSIQSAELKKKESPFRAKCHEIFCCPLKQVHHKENTEPEEPQLKGIVTKLYSRQGYHLQLQADGTIDGTKDEDSTYTLFNLIPVGLRVVAIQGVQTKLYLAMNSEGYLYTSELFTPECKFKESVFENYYVTYSSMIYRQQQSGRGWYLGLNKEGEIMKGNHVKKNKPAAHFLPKPLKVAMYKEPSLHDLTEFSRSGSGTPTKSRSVSGVLNGGKSMSHNEST

SEQ ID NO: 277931 - protein, 43 aa, Artificial Sequence
  derived and/or modified sequence
MLRQDSIQSAELKKKESPFRAKCHEIFCCPLKQVHHKENTEPE

SEQ ID NO: 277932 - protein, 221 aa, Artificial Sequence
  derived and/or modified sequence
MSGKVTKPKEEKDASKVLDDAPPGTQEYIMLRQDSIQSAELKKKESPFRAKCHEIFCCPLKQVHHKENTEPEEPQLKGIVTKLYSRQGYHLQLQADGTIDGTKDEDSTYTLFNLIPVGLRVVAIQGVQTKLYLAMNSEGYLYTSELFTPECKFKESVFENYYVTYSSMIYRQQQSGRGWYLGLNKEGEIMKGNHVKKNKPAAHFLPKPLKVAMYKEPSLHD

SEQ ID NO: 277933 - protein, 226 aa, Artificial Sequence
  derived and/or modified sequence
MLRQDSIQSAELKKKESPFRAKCHEIFCCPLKQVHHKENTEPEEPQLKGIVTKLYSRQGYHLQLQADGTIDGTKDEDSTYTLFNLIPVGLRVVAIQGVQTKLYLAMNSEGYLYTSELFTPECKFKESVFENYYVTYSSMIYRQQQSGRGWYLGLNKEGEIMKGNHVKKNKPAAHFLPKPLKVAMYKEPSLHDLTEFSRSGSGTPTKSRSVSGVLNGGKSMSHNEST

SEQ ID NO: 277934 - protein, 98 aa, Artificial Sequence
  derived and/or modified sequence
MSGKVTKPKEEKDASKVLDDAPPGTQEYIMLRQDSIQSAELKKKESPFRAKCHEIFCCPLKQVHHKENTEPEEPQLKGIVTKLYSRQGYHLQLQADGT

SEQ ID NO: 277935 - protein, 207 aa, Artificial Sequence [sequence omitted]

SEQ ID NO: 277936 - DNA, 768 bp, Artificial Sequence
  derived and/or modified sequence
atgagcggcaaggtgaccaagcccaaggaggagaaggacgccagcaaggtgctggacgacgccccccccggcacccaggagtacatcatgctgagacaggacagcatccagagcgccgagctgaagaagaaggagagccccttcagagccaagtgccacgagatcttctgctgccccctgaagcaggtgcaccacaaggagaacaccgagcccgaggagccccagctgaagggcatcgtgaccaagctgtacagcagacagggctaccacctgcagctgcaggccgacggcaccatcgacggcaccaaggacgaggacagcacctacaccctgttcaacctgatccccgtgggcctgagagtggtggccatccagggcgtgcagaccaagctgtacctggccatgaacagcgagggctacctgtacaccagcgagctgttcacccccgagtgcaagttcaaggagagcgtgttcgagaactactacgtgacctacagcagcatgatctacagacagcagcagagcggcagaggctggtacctgggcctgaacaaggagggcgagatcatgaagggcaaccacgtgaagaagaacaagcccgccgcccacttcctgcccaagcccctgaaggtggccatgtacaaggagcccagcctgcacgacctgaccgagttcagcagaagcggcagcggcacccccaccaagagcagaagcgtgagcggcgtgctgaacggcggcaagagcatgagccacaacgagagcacctag

SEQ ID NO: 277937 - DNA, 666 bp, Artificial Sequence
  derived and/or modified sequence
atgagcggcaaggtgaccaagcccaaggaggagaaggacgccagcaaggtgctggacgacgccccccccggcacccaggagtacatcatgctgagacaggacagcatccagagcgccgagctgaagaagaaggagagccccttcagagccaagtgccacgagatcttctgctgccccctgaagcaggtgcaccacaaggagaacaccgagcccgaggagccccagctgaagggcatcgtgaccaagctgtacagcagacagggctaccacctgcagctgcaggccgacggcaccatcgacggcaccaaggacgaggacagcacctacaccctgttcaacctgatccccgtgggcctgagagtggtggccatccagggcgtgcagaccaagctgtacctggccatgaacagcgagggctacctgtacaccagcgagctgttcacccccgagtgcaagttcaaggagagcgtgttcgagaactactacgtgacctacagcagcatgatctacagacagcagcagagcggcagaggctggtacctgggcctgaacaaggagggcgagatcatgaagggcaaccacgtgaagaagaacaagcccgccgcccacttcctgcccaagcccctgaaggtggccatgtacaaggagcccagcctgcacgactag

SEQ ID NO: 277938 - DNA, 297 bp, Artificial Sequence
  derived and/or modified sequence
atgagcggcaaggtgaccaagcccaaggaggagaaggacgccagcaaggtgctggacgacgccccccccggcacccaggagtacatcatgctgagacaggacagcatccagagcgccgagctgaagaagaaggagagccccttcagagccaagtgccacgagatcttctgctgccccctgaagcaggtgcaccacaaggagaacaccgagcccgaggagccccagctgaagggcatcgtgaccaagctgtacagcagacagggctaccacctgcagctgcaggccgacggcacctag

SEQ ID NO: 277939 - DNA, 624 bp, Artificial Sequence
  derived and/or modified sequence
atgagaaccagcatgaagaaggtgggcatgcaccacctgagcagcagcggcggcagctactacctgatcctggacgacgccccccccggcacccaggagtacatcatgctgagacaggacagcatccagagcgccgagctgaagaagaaggagagccccttcagagccaagtgccacgagatcttctgctgccccctgaagcaggtgcaccacaaggagaacaccgagcccgaggagccccagctgaagggcatcgtgaccaagctgtacagcagacagggctaccacctgcagctgcaggccgacggcaccatcgacggcaccaaggacgaggacagcacctacaccctgttcaacctgatccccgtgggcctgagagtggtggccatccagggcgtgcagaccaagctgtacctggccatgaacagcgagggctacctgtacaccagcgagctgttcacccccgagtgcaagttcaaggagagcgtgttcgagaactactacgtgacctacagcagcatgatctacagacagcagcagagcggcagaggctggtacctgggcctgaacaaggagggcgagatcatgaagggcaaccacgtgaagaagaacaagcccgcctag

SEQ ID NO: 277940 - DNA, 768 bp, Artificial Sequence
  derived and/or modified sequence
atgtctgggaaagtgacaaagccaaaagaggagaaggacgcaagtaaagtgctggatgacgccccacccggaacgcaagagtacataatgctccgacaggatagcatccaaagtgccgaactaaagaagaaagagtcaccgttcagggcaaagtgccatgaaattttttgttgtcccttgaagcaggtgcatcacaaagaaaacacggaaccagaagagcctcaattgaaaggcattgtcacgaaactctacagccgtcagggctaccatttgcagcttcaggcggatgggacaatagatggaacaaaagatgaagattccacctataccttatttaacttaattcccgtgggtctgagggttgtggccattcagggcgtacagacaaagctctatttagccatgaatagcgaggggtacctgtatacttccgagctgtttactccagagtgcaagtttaaggaaagtgtattcgagaattattacgtgacatattcttccatgatatatcgacagcaacagtcaggaaggggctggtatttggggcttaataaggagggggagattatgaagggcaatcatgttaagaagaataaaccggctgcacacttcctacccaaaccacttaaagtggccatgtataaggaaccctccctccacgacctgacagagtttagccgaagtggttcaggtacacccactaagtccagaagcgtgagcggcgtcctgaatggaggcaagtctatgtcccataacgaatctacttag

SEQ ID NO: 277941 - DNA, 666 bp, Artificial Sequence
  derived and/or modified sequence
atgagcggtaaagtaactaaacctaaggaagaaaaagatgcaagtaaggttctagatgatgccccccctggcacccaggagtacataatgctccgtcaggatagcattcagtcagccgaactgaaaaagaaggaatcaccattcagagcaaaatgccacgaaatcttttgctgcccactgaagcaggtacaccataaggaaaacaccgagcctgaggagccgcagctgaagggaatcgtcaccaagttgtacagcagacaggggtaccatctgcagctgcaggcggacggcaccatcgatggtaccaaggatgaggattccacctataccctctttaacctcattcctgtaggactgagagtggttgcgatccaaggagtgcagactaagctgtatctggctatgaactcagaggggtacttatataccagcgagctcttcactcctgaatgcaagtttaaagagtcagtgttcgagaactactacgtgacatacagcagcatgatttatagacaacaacagtccggaagaggctggtacctcgggctcaacaaggagggcgaaattatgaaggggaatcatgtgaaaaagaacaaacctgccgcccacttcctccccaagccccttaaggtggcgatgtacaaggaaccgtcattacatgattag

SEQ ID NO: 277942 - DNA, 297 bp, Artificial Sequence
  derived and/or modified sequence
atgagtggtaaagttaccaagcccaaagaggaaaaggatgcctctaaagtgcttgacgacgctcccccgggaactcaggagtatattatgctccgacaggatagtattcaaagcgcagaattaaagaagaaggagtcaccctttcgagctaagtgccacgaaattttttgttgccctctgaagcaagtccatcacaaggagaataccgagccagaggagccgcagctcaaaggtatcgtcacaaagctgtattcaaggcaggggtaccacctgcagcttcaagctgatggcacctag

SEQ ID NO: 277943 - DNA, 624 bp, Artificial Sequence
  derived and/or modified sequence
atgagaacttccatgaagaaggtcggtatgcatcacctttcgagctctggtgggtcctattacctgatactcgacgacgccccccccggtacacaggagtacataatgctgcgtcaagactctattcagtccgccgagctcaagaaaaaggaatctcctttcagagccaagtgccacgagatattctgttgtcctctgaagcaggtgcatcacaaggaaaacacagaacctgaagaacctcagctgaagggcattgttactaagctctattcgcgccaggggtatcaccttcagctccaggctgacggtactattgacggcacaaaagacgaggatagcacctacaccctgttcaacttgattccagtgggcctcagagtggtggccattcagggggtccaaaccaaactgtaccttgcaatgaattccgaaggctatctgtacacgtcggaactgtttactcctgagtgcaaatttaaggaatcagttttcgaaaactattacgtcacttactcctccatgatatacagacagcaacagtctggacgaggctggtatctaggactgaataaggagggagaaataatgaagggtaaccatgttaaaaagaacaagcccgcatag

SEQ ID NO: 277944 - DNA, 768 bp, Artificial Sequence
  derived and/or modified sequence
atgtctgggaaggtgaccaagcccaaggaggagaaggatgccagcaaggtgctggatgatgcccctcctggcacccaggagtacatcatgctgcggcaggacagcatccagagcgctgagctgaagaagaaggagagccccttccgggccaagtgccacgagatcttctgctgccccctgaagcaggtgcaccacaaggaaaatacagagcctgaggagccccagctgaagggcatcgtgaccaagctgtacagccggcagggctaccacctgcagctgcaggctgatggcaccattgatggcaccaaggatgaggacagcacctacaccctcttcaacctgatccctgtgggcctgcgggtggtggccatccagggcgtgcagaccaagctgtacctggccatgaacagcgagggctacctgtacaccagcgagctgttcaccccagagtgcaagttcaaggagagcgtgtttgagaactactacgtgacctacagctccatgatctaccggcagcagcagagcggccggggctggtacctgggcctgaacaaggagggggagatcatgaagggcaaccacgtgaagaagaacaagccagctgcccacttcctgcccaagcccctgaaggtggccatgtacaaggagcccagcctgcatgacctgacagagttcagccgcagcggcagcggcacccccaccaagagccgctctgtgtctggagtgctgaatggaggcaagtccatgagccacaatgaaagcacctag

SEQ ID NO: 277945 - DNA, 666 bp, Artificial Sequence
  derived and/or modified sequence
atgtctgggaaggtgaccaagcccaaggaggagaaggatgccagcaaggtgctggatgatgcccctcctggcacccaggagtacatcatgctgcggcaggacagcatccagagcgctgagctgaagaagaaggagagccccttccgggccaagtgccacgagatcttctgctgccccctgaagcaggtgcaccacaaggaaaatacagagcctgaggagccccagctgaagggcatcgtgaccaagctgtacagccggcagggctaccacctgcagctgcaggctgatggcaccattgatggcaccaaggatgaggacagcacctacaccctcttcaacctgatccctgtgggcctgcgggtggtggccatccagggcgtgcagaccaagctgtacctggccatgaacagcgagggctacctgtacaccagcgagctgttcaccccagagtgcaagttcaaggagagcgtgtttgagaactactacgtgacctacagctccatgatctaccggcagcagcagagcggccggggctggtacctgggcctgaacaaggagggggagatcatgaagggcaaccacgtgaagaagaacaagccagctgcccacttcctgcccaagcccctgaaggtggccatgtacaaggagcccagcctgcatgactag

SEQ ID NO: 277946 - DNA, 297 bp, Artificial Sequence
  derived and/or modified sequence
atgtctgggaaggtgaccaagcccaaggaggagaaggatgccagcaaggtgctggatgatgcccctcctggcacccaggagtacatcatgctgcggcaggacagcatccagagcgctgagctgaagaagaaggagagccccttccgggccaagtgccacgagatcttctgctgccccctgaagcaggtgcaccacaaggaaaatacagagcctgaggagccccagctgaagggcatcgtgaccaagctgtacagccggcagggctaccacctgcagctgcaggctgatggcacctag

SEQ ID NO: 277947 - DNA, 624 bp, Artificial Sequence
  derived and/or modified sequence
atgaggacctccatgaagaaggtgggcatgcaccacctgagcagcagcggcggcagctactacctgatcctggatgatgcccctcctggcacccaggagtacatcatgctgcggcaggacagcatccagagcgctgagctgaagaagaaggagagccccttccgggccaagtgccacgagatcttctgctgccccctgaagcaggtgcaccacaaggaaaatacagagcctgaggagccccagctgaagggcatcgtgaccaagctgtacagccggcagggctaccacctgcagctgcaggctgatggcaccattgatggcaccaaggatgaggacagcacctacaccctcttcaacctgatccctgtgggcctgcgggtggtggccatccagggcgtgcagaccaagctgtacctggccatgaacagcgagggctacctgtacaccagcgagctgttcaccccagagtgcaagttcaaggagagcgtgtttgagaactactacgtgacctacagctccatgatctaccggcagcagcagagcggccggggctggtacctgggcctgaacaaggagggggagatcatgaagggcaaccacgtgaagaagaacaagccagcctag

SEQ ID NO: 277948 - DNA, 768 bp, Artificial Sequence
  derived and/or modified sequence
atgagcggcaaggtgaccaagcccaaggaggagaaggacgccagcaaagtcctcgatgatgcgccccctgggactcaggagtacatcatgctgaggcaggattctatacagtccgcagagctgaaaaaaaaagagagtccttttagagccaagtgccacgagattttttgctgccctttaaagcaagtacaccacaaagagaatacggagccagaagaaccccagttgaaaggtattgttaccaaactgtactccagacaagggtaccatttacagctgcaggctgatgggaccatcgacgggacgaaagatgaggacagtacctataccttgtttaatttaattccagtgggattgagagtggtggccatccaaggggtacaaacgaagctctacttagcaatgaacagcgagggttacctgtacacgtccgagctttttacccctgagtgtaaatttaaggaaagtgtgtttgaaaactattacgtgacttatagttcaatgatctatcggcaacagcaatcaggtagggggtggtacctcggcctgaataaagaaggggaaattatgaagggtaatcatgtcaaaaagaacaagccagccgcccactttctgcccaaacctctcaaggtcgctatgtacaaggaaccatcactacacgatctgaccgagttctcccggtctggttccgggaccccaactaagtcacggagcgtcagcggtgtgctgaacgggggcaaatcaatgtcccataacgagagcacctag

SEQ ID NO: 277949 - DNA, 666 bp, Artificial Sequence
  derived and/or modified sequence
atgagcggcaaggtgaccaagcccaaggaggagaaggacgccagcaaagtactcgatgacgcaccaccaggaacacaggaatacattatgctgagacaggattccatccaaagcgcagaacttaaaaaaaaagagtcccccttccgggctaagtgtcacgagattttttgctgccccctcaagcaggtccatcataaggagaacaccgagcccgaagaaccccagctgaaaggcatagtgactaagctatacagtaggcagggataccacctccaactccaagctgacggcactatcgacggaacaaaggatgaagacagcacgtatactctctttaacttaattcctgtcggattgcgcgtcgtagccatccagggagtccagactaaattgtatctcgcaatgaattctgagggctatctgtacacctctgagctctttacacccgagtgtaaattcaaagagtccgtgttcgaaaattactacgtgacttatagctctatgatctaccggcagcagcagtctgggcgtggctggtacctaggtttgaacaaagagggggagatcatgaagggaaaccatgtcaagaaaaataagccagcagcccatttcctgcctaagcccctcaaggtggcgatgtacaaggaacctagcctgcacgactag

SEQ ID NO: 277950 - DNA, 297 bp, Artificial Sequence
  derived and/or modified sequence
atgagcggcaaggtgaccaagcccaaggaggagaaggacgccagcaaggtgctggacgacgcccccccgggcacccaggagtacataatgctgaggcaagactccattcagagtgccgagctaaaaaagaaggaaagtccgtttagggccaagtgccacgagatattctgctgtcccctcaagcaggttcatcacaaagaaaatactgagcctgaagagcctcagctgaagggcatcgtgaccaagttgtatagtcgacaaggctaccacctccagctgcaggccgatggcacatag

SEQ ID NO: 277951 - DNA, 624 bp, Artificial Sequence
  derived and/or modified sequence
atgcggaccagcatgaagaaggtgggcatgcaccacctgagcagcagcggtggcagctactacctgatcctggacgacgctccacccgggacccaggagtatattatgctccgccaggactctatccaaagcgctgagttaaagaagaaagaatccccattccgcgcaaagtgccacgagatcttttgttgccctctgaagcaggtgcaccacaaagagaataccgagcctgaggagccgcaacttaaaggcattgtgacgaaactgtattctcgccagggctatcacctgcagctccaggccgacggaactatcgacggaacaaaagatgaagactccacttacactttgttcaacttgatccccgtgggcttgagagtggtagcgatccagggcgttcagactaagctgtacctagcaatgaatagcgaaggctacctgtacacaagtgagctgttcacaccagagtgtaagttcaaagaatccgtttttgagaactactacgtcacttattcatcgatgatataccgtcagcagcagagcggccgaggttggtacctgggactgaataaggaaggcgagatcatgaagggaaaccatgtaaagaagaataagcctgcttag

SEQ ID NO: 277952 - DNA, 768 bp, Artificial Sequence
  derived and/or modified sequence
atgtccggaaaagtgacaaaacccaaggaagaaaaagacgcatccaaggtgttagacgacgccccaccgggtacacaggagtatattatgctccgtcaggatagcatccagagcgctgagctgaaaaagaaggagtcgccctttcgcgcaaaatgtcacgagattttttgttgccccctgaagcaagtccaccataaggaaaacacagaaccagaagaacctcagctgaagggaatagtgacaaagctttactcgcgtcagggttatcatctccagctccaggccgatggcacaattgacgggaccaaggacgaagatagcacttacaccctttttaacctgatccctgtggggctgagagtggtggcaatacagggggtacaaacaaagctctacctagctatgaattcggagggatacctatacacctctgagctttttacccctgaatgtaagttcaaagaatccgtttttgagaactattacgtgacatatagttcaatgatctatcgccagcagcaatctggacggggttggtacctggggctgaacaaagaaggggagattatgaaaggtaatcacgtcaagaagaataagccagccgcacatttccttcctaaacccctgaaggtggccatgtataaggagcctagtctgcacgatttgactgagttctccagaagcggaagcggcaccccaaccaagagccgctccgtgtccggtgtgctgaacgggggaaaatctatgtcccataatgagtccacttag

SEQ ID NO: 277953 - DNA, 666 bp, Artificial Sequence
  derived and/or modified sequence
atgagtggtaaggtgacaaaacctaaggaggagaaagatgctagtaaagtgctcgatgacgcccctcctggaacgcaggaatatatcatgttgcgccaggacagcattcaaagtgccgagctgaagaagaaggagtcacccttcagagcaaaatgccacgaaatattctgctgccctcttaagcaagtacaccacaaggaaaataccgaacccgaagagccccagttaaagggcatagttacaaaattgtacagtcgccagggatatcatctgcagttgcaggctgacgggacaatcgatgggaccaaagacgaagattcaacgtacaccctcttcaacctaatccccgtgggtttgagggtggttgctattcagggtgtacagactaagctgtacttggcaatgaacagtgagggctacctgtacacatccgagcttttcactccagagtgcaaattcaaggagtcggtgtttgagaactactatgtgacgtatagctccatgatctatcgccagcagcagtcaggccgtggatggtatttgggcttgaataaggagggagagatcatgaaggggaaccacgtgaagaagaataaaccggctgcccacttcctgcctaaacccttgaaagttgctatgtataaagaaccctcccttcatgattag

SEQ ID NO: 277954 - DNA, 297 bp, Artificial Sequence
  derived and/or modified sequence
atgagtggaaaggttaccaaaccaaaagaagaaaaggacgcgagcaaagtgctggacgatgcccctcccggaacccaggaatacattatgctgcggcaggattccatccaaagtgctgagttgaagaagaaggagagcccattccgcgcaaaatgccatgaaattttttgctgcccacttaagcaggttcaccacaaagagaacaccgagcctgaggaaccccagctcaagggcattgtgaccaagctgtacagccgccaggggtaccacctgcagctgcaggccgacggcacctag

SEQ ID NO: 277955 - DNA, 624 bp, Artificial Sequence
  derived and/or modified sequence
atgagaacgtccatgaagaaagtcggcatgcatcatttgagctccagtgggggatcctattacctgatcctcgacgatgccccacctggcacccaggagtatatcatgctgcggcaggattctatccagagtgctgaactcaagaagaaagagagtccatttcgggctaagtgtcatgagattttctgttgccctctgaaacaagtgcaccacaaagaaaacacagagccagaagagccccagctaaaaggtatagtgacgaagctgtacagccggcagggatatcacttgcaacttcaggctgatggcaccatagacggaacaaaggacgaagactctacctataccttgtttaatcttattcccgttggcctccgcgtggtggcaattcagggggtgcagactaagctgtacctcgccatgaactccgaagggtatctgtacacgagcgagctgtttactcccgagtgtaaatttaaggagagcgtttttgagaactactatgtcacatactcctccatgatctaccgacagcagcagagtgggagggggtggtacctgggtctgaacaaggaaggcgaaatcatgaagggcaatcatgttaaaaaaaataagcccgcatag

SEQ ID NO: 277956 - DNA, 768 bp, Artificial Sequence
  derived and/or modified sequence
atgagtggaaaggtgaccaagcccaaagaggagaaagatgcttctaaggttctggatgacgccccccctggcacacaggaatacattatgttacgacaagattccatccaatctgcggaattaaagaaaaaagagtccccctttcgtgctaagtgtcacgaaatcttctgctgcccgctgaagcaagtacaccacaaagagaacacagagccggaagagcctcagcttaagggtatagttaccaagctatacagccgacaaggctaccacttgcagctgcaggcggatggaaccattgatggcaccaaagatgaggacagcacttacactctgtttaacctcatccctgtgggtctgcgagtggtggctatccaaggagttcaaaccaagctgtacttggcaatgaacagtgagggatacttgtacacctcggaacttttcacacctgagtgcaaattcaaagaatcagtgtttgaaaattattatgtgacatattcatcaatgatataccgtcagcagcagtcaggccgagggtggtatctgggtctgaacaaagaaggagagatcatgaaaggcaaccatgtgaagaagaacaagcctgcagctcattttctgcctaaaccactgaaagtggccatgtacaaggagccatcactgcacgatctcacggagttctcccgatctggaagcgggaccccaaccaagagcagaagtgtctctggcgtgctgaacggaggcaaatccatgagccacaatgaatcaacgtag

SEQ ID NO: 277957 - DNA, 913 bp, Artificial Sequence
  derived and/or modified sequence
gagagttctttggaaggagagcgcgagcgagggagcgggcgagctccgagggggtgtgggtgtagggagagagagaaagagagcaggcagcggcggcggcggcagcggtggggaaaagcggattccgccccgaaccacaccgaggggagctcgtggtcgagacttgccgccctaagcactctcccaagtccgacccgctcggcgaggacttccgtcttctgagcgaaccttgtcaagcaagctgggatctatgagtggaaaggtgaccaagcccaaagaggagaaagatgcttctaaggttctggatgacgccccccctggcacacaggaatacattatgttacgacaagattccatccaatctgcggaattaaagaaaaaagagtccccctttcgtgctaagtgtcacgaaatcttctgctgcccgctgaagcaagtacaccacaaagagaacacagagccggaagagcctcagcttaagggtatagttaccaagctatacagccgacaaggctaccacttgcagctgcaggcggatggaaccattgatggcaccaaagatgaggacagcacttacactctgtttaacctcatccctgtgggtctgcgagtggtggctatccaaggagttcaaaccaagctgtacttggcaatgaacagtgagggatacttgtacacctcggaacttttcacacctgagtgcaaattcaaagaatcagtgtttgaaaattattatgtgacatattcatcaatgatataccgtcagcagcagtcaggccgagggtggtatctgggtctgaacaaagaaggagagatcatgaaaggcaaccatgtgaagaagaacaagcctgcagctcattttctgcctaaaccactgaaagtggccatgtacaaggagccatcactgcacgat

SEQ ID NO: 277958 - DNA, 1990 bp, Artificial Sequence
  derived and/or modified sequence
ttctggatgacgccccccctggcacacaggaatacattatgttacgacaagattccatccaatctgcggaattaaagaaaaaagagtccccctttcgtgctaagtgtcacgaaatcttctgctgcccgctgaagcaagtacaccacaaagagaacacagagccggaagagcctcagcttaagggtatagttaccaagctatacagccgacaaggctaccacttgcagctgcaggcggatggaaccattgatggcaccaaagatgaggacagcacttacactctgtttaacctcatccctgtgggtctgcgagtggtggctatccaaggagttcaaaccaagctgtacttggcaatgaacagtgagggatacttgtacacctcggaacttttcacacctgagtgcaaattcaaagaatcagtgtttgaaaattattatgtgacatattcatcaatgatataccgtcagcagcagtcaggccgagggtggtatctgggtctgaacaaagaaggagagatcatgaaaggcaaccatgtgaagaagaacaagcctgcagctcattttctgcctaaaccactgaaagtggccatgtacaaggagccatcactgcacgatctcacggagttctcccgatctggaagcgggaccccaaccaagagcagaagtgtctctggcgtgctgaacggaggcaaatccatgagccacaatgaatcaacgtagccagtgagggcaaaagaagggctctgtaacagaaccttacctccaggtgctgttgaattcttctagcagtccttcacccaaaagttcaaatttgtcagtgacatttaccaaacaaacaggcagagttcactattctatctgccattagaccttcttatcatccatactaaagccccattatttagattgagcttgtgcataagaatgccaagcattttagtgaactaaatctgagagaaggactgccaaattttctcatgatctcacctatactttggggatgataatccaaaagtatttcacagcactaatgctgatcaaaatttgctctcccaccaagaaaatgtaaaagaccacaattgttcttcaaaaacaaacaaaacaaaacaaaacaaaattaactgcttaaatgttttgtcggggcaaacaaaattatgtgaattgtgttgttttcttggcttgatgttttctatctacgcttgattcacatgtactcttttctttggcatagtgcaactttatgatttctgaaattcaatggttctattgactttttgcgtcacttaatccaaatcaaccaaattcagggttgaatctgaattggcttctcaggctcaaggtaacagtgttcttgtggtttgaccaattgtttttctttctttttttttttttttagatttgtggtattctggtcaagttattgtgctgtactttgtgcgtagaaattgagttgtattgtcaaccccagtcagtaaagagaacttcaaaaaattatcctcaagtgtagatttctcttaattccatttgtgtatcatgttaaactattgttgtggcttcttgtgtaaagacaggaactgtggaactgtgatgttgtcttttgtgttgttaaaataagaaatgtcttatctgtatatgtatgagtcttcctgtcattgtatttggcacatgaatattgtgtacaaggaattgttaagactggttttccctcaacaacatatattatacttgctactggaaaagtgtttaagacttagctaggtttccatttagatcttcatatctgttgcatggaagaaagttgggttcttggcatagagttgcatgatatgtaagattttgtgcattcataattgttaaaaatctgtgttccaaaagtggacatagcatgtacaggcagttttctgtcctgtgcacaaaaagtttaaaaaagttgtttaatatttgttgttgtatacccaaatacgcaccgaataaactctttatattcattc

SEQ ID NO: 277959 - DNA, 652 bp, Artificial Sequence
  derived and/or modified sequence
gtgctttggctcagatgcagactattgcaaaccgcagaaactcacagtgacgacatgaccaagaagcttcctacccctggcctgggagcaagtgaccgtgggcgctaataacaacagggccctttaagattttggtccatggtgggatcttgcttgtttctcaccaccaggcccattgcgtctccacttctaaggcagcggcggcggcggcagcggtggggaaaagcggattccgccccgaaccacaccgaggggagctcgtggtcgagacttgccgccctaagcactctcccaagtccgacccgctcggcgaggacttccgtcttctgagcgaaccttgtcaagcaagctgggatctatgagtggaaaggtgaccaagcccaaagaggagaaagatgcttctaaggttctggatgacgccccccctggcacacaggaatacattatgttacgacaagattccatccaatctgcggaattaaagaaaaaagagtccccctttcgtgctaagtgtcacgaaatcttctgctgcccgctgaagcaagtacaccacaaagagaacacagagccggaagagcctcagcttaagggtatagttaccaagctatacagccgacaaggctaccacttgcagctgcaggcggatggaacc

SEQ ID NO: 277960 - DNA, 687 bp, Artificial Sequence
  derived and/or modified sequence
gtgacttgctcctgcttgccttcctccatgattgtgaggcctccccagccacgtggaactaggtgtcatgaggacaagcatgaaaaaagtagggatgcatcatttgagttcttcaggaggaagctactacctaattctggatgacgccccccctggcacacaggaatacattatgttacgacaagattccatccaatctgcggaattaaagaaaaaagagtccccctttcgtgctaagtgtcacgaaatcttctgctgcccgctgaagcaagtacaccacaaagagaacacagagccggaagagcctcagcttaagggtatagttaccaagctatacagccgacaaggctaccacttgcagctgcaggcggatggaaccattgatggcaccaaagatgaggacagcacttacactctgtttaacctcatccctgtgggtctgcgagtggtggctatccaaggagttcaaaccaagctgtacttggcaatgaacagtgagggatacttgtacacctcggaacttttcacacctgagtgcaaattcaaagaatcagtgtttgaaaattattatgtgacatattcatcaatgatataccgtcagcagcagtcaggccgagggtggtatctgggtctgaacaaagaaggagagatcatgaaaggcaaccatgtgaagaagaacaagcctgc

SEQ ID NO: 277961 - DNA, 2340 bp, Artificial Sequence
  derived and/or modified sequence
gtggctctctaggaccggagagttctttggaaggagagcgcgagcgagggagcgggcgagctccgagggggtgtgggtgtagggagagagagaaagagagcaggcagcggcggcggcggcagcggtggggaaaagcggattccgccccgaaccacaccgaggggagctcgtggtcgagacttgccgccctaagcactctcccaagtccgacccgctcggcgaggacttccgtcttctgagcgaaccttgtcaagcaagctgggatctatgagtggaaaggtgaccaagcccaaagaggagaaagatgcttctaaggttctggatgacgccccccctggcacacaggaatacattatgttacgacaagattccatccaatctgcggaattaaagaaaaaagagtccccctttcgtgctaagtgtcacgaaatcttctgctgcccgctgaagcaagtacaccacaaagagaacacagagccggaagagcctcagcttaagggtatagttaccaagctatacagccgacaaggctaccacttgcagctgcaggcggatggaaccattgatggcaccaaagatgaggacagcacttacactctgtttaacctcatccctgtgggtctgcgagtggtggctatccaaggagttcaaaccaagctgtacttggcaatgaacagtgagggatacttgtacacctcggaacttttcacacctgagtgcaaattcaaagaatcagtgtttgaaaattattatgtgacatattcatcaatgatataccgtcagcagcagtcaggccgagggtggtatctgggtctgaacaaagaaggagagatcatgaaaggcaaccatgtgaagaagaacaagcctgcagctcattttctgcctaaaccactgaaagtggccatgtacaaggagccatcactgcacgatctcacggagttctcccgatctggaagcgggaccccaaccaagagcagaagtgtctctggcgtgctgaacggaggcaaatccatgagccacaatgaatcaacgtagccagtgagggcaaaagaagggctctgtaacagaaccttacctccaggtgctgttgaattcttctagcagtccttcacccaaaagttcaaatttgtcagtgacatttaccaaacaaacaggcagagttcactattctatctgccattagaccttcttatcatccatactaaagccccattatttagattgagcttgtgcataagaatgccaagcattttagtgaactaaatctgagagaaggactgccaaattttctcatgatctcacctatactttggggatgataatccaaaagtatttcacagcactaatgctgatcaaaatttgctctcccaccaagaaaatgtaaaagaccacaattgttcttcaaaaacaaacaaaacaaaacaaaacaaaattaactgcttaaatgttttgtcggggcaaacaaaattatgtgaattgtgttgttttcttggcttgatgttttctatctacgcttgattcacatgtactcttttctttggcatagtgcaactttatgatttctgaaattcaatggttctattgactttttgcgtcacttaatccaaatcaaccaaattcagggttgaatctgaattggcttctcaggctcaaggtaacagtgttcttgtggtttgaccaattgtttttctttctttttttttttttttagatttgtggtattctggtcaagttattgtgctgtactttgtgcgtagaaattgagttgtattgtcaaccccagtcagtaaagagaacttcaaaaaattatcctcaagtgtagatttctcttaattccatttgtgtatcatgttaaactattgttgtggcttcttgtgtaaagacaggaactgtggaactgtgatgttgtcttttgtgttgttaaaataagaaatgtcttatctgtatatgtatgagtcttcctgtcattgtatttggcacatgaatattgtgtacaaggaattgttaagactggttttccctcaacaacatatattatacttgctactggaaaagtgtttaagacttagctaggtttccatttagatcttcatatctgttgcatggaagaaagttgggttcttggcatagagttgcatgatatgtaagattttgtgcattcataattgttaaaaatctgtgttccaaaagtggacatagcatgtacaggcagttttctgtcctgtgcacaaaaagtttaaaaaagttgtttaatatttgttgttgtatacccaaatacgcaccgaataaactctttatattcattcaaagaaaaaaaaaaaaaaaaaaaaaaaaaaaaaa

SEQ ID NO: 277962 - DNA, 2093 bp, Artificial Sequence
  derived and/or modified sequence
catgtaacatgtgatttgctcctccttgccttccaccgtgatgtgaggcctccccaaccaagtggaactttctggatgacgccccccctggcacacaggaatacattatgttacgacaagattccatccaatctgcggaattaaagaaaaaagagtccccctttcgtgctaagtgtcacgaaatcttctgctgcccgctgaagcaagtacaccacaaagagaacacagagccggaagagcctcagcttaagggtatagttaccaagctatacagccgacaaggctaccacttgcagctgcaggcggatggaaccattgatggcaccaaagatgaggacagcacttacactctgtttaacctcatccctgtgggtctgcgagtggtggctatccaaggagttcaaaccaagctgtacttggcaatgaacagtgagggatacttgtacacctcggaacttttcacacctgagtgcaaattcaaagaatcagtgtttgaaaattattatgtgacatattcatcaatgatataccgtcagcagcagtcaggccgagggtggtatctgggtctgaacaaagaaggagagatcatgaaaggcaaccatgtgaagaagaacaagcctgcagctcattttctgcctaaaccactgaaagtggccatgtacaaggagccatcactgcacgatctcacggagttctcccgatctggaagcgggaccccaaccaagagcagaagtgtctctggcgtgctgaacggaggcaaatccatgagccacaatgaatcaacgtagccagtgagggcaaaagaagggctctgtaacagaaccttacctccaggtgctgttgaattcttctagcagtccttcacccaaaagttcaaatttgtcagtgacatttaccaaacaaacaggcagagttcactattctatctgccattagaccttcttatcatccatactaaagccccattatttagattgagcttgtgcataagaatgccaagcattttagtgaactaaatctgagagaaggactgccaaattttctcatgatctcacctatactttggggatgataatccaaaagtatttcacagcactaatgctgatcaaaatttgctctcccaccaagaaaatgtaaaagaccacaattgttcttcaaaaacaaacaaaacaaaacaaaacaaaattaactgcttaaatgttttgtcggggcaaacaaaattatgtgaattgtgttgttttcttggcttgatgttttctatctacgcttgattcacatgtactcttttctttggcatagtgcaactttatgatttctgaaattcaatggttctattgactttttgcgtcacttaatccaaatcaaccaaattcagggttgaatctgaattggcttctcaggctcaaggtaacagtgttcttgtggtttgaccaattgtttttctttctttttttttttttttagatttgtggtattctggtcaagttattgtgctgtactttgtgcgtagaaattgagttgtattgtcaaccccagtcagtaaagagaacttcaaaaaattatcctcaagtgtagatttctcttaattccatttgtgtatcatgttaaactattgttgtggcttcttgtgtaaagacaggaactgtggaactgtgatgttgtcttttgtgttgttaaaataagaaatgtcttatctgtatatgtatgagtcttcctgtcattgtatttggcacatgaatattgtgtacaaggaattgttaagactggttttccctcaacaacatatattatacttgctactggaaaagtgtttaagacttagctaggtttccatttagatcttcatatctgttgcatggaagaaagttgggttcttggcatagagttgcatgatatgtaagattttgtgcattcataattgttaaaaatctgtgttccaaaagtggacatagcatgtacaggcagttttctgtcctgtgcacaaaaagtttaaaaaagttgtttaatatttgttgttgtatacccaaatacgcaccgaataaactctttatattcattcaaagaaaaaaaaaaaaaaaaaaaaaaaaaaaaaa

SEQ ID NO: 277963 - DNA, 4694 bp, Artificial Sequence
  derived and/or modified sequence
gaagaactggaactggtctggccatagggggaagcggcgcgttaaatccgccccctctccataccctactttcaaggggtgggcggtagaggggaggttggggttggagcagcggcgagggggcccctcccttgcacctccccccaccggacttggtcgcgcccgaagtgtaacactttctctttgtcggaggagctcctctgtttcctgtgcagtagctcccgttgcggcggcacccgtggcagccctggcggacgcaggagcgatggcagcgaccgatatagctcgccaggtgggtgaaggttgccgaactgtccccctggctggacatgtggggtttgacagcttgcctgaccagctggtgaataagtccgtcagccagggcttctgcttcaacatcctgtgcgtgggagagacaggtttgggcaagtccaccctcatggacaccctgttcaacaccaaattcgaaggggagccagccacccacacacagccgggtgtccagctccagtctaatacctatgacctccaagagagcaacgtgaggctaaagctcacgatcgttagcacagttggctttggggaccagatcaacaaagaggacagctacaagcctatcgtggaattcatcgatgcacaattcgaggcctacctgcaggaagagctaaagatccgaagagtgctacacacctaccatgactcccgaatccatgtctgcttgtatttcattgcccccacgggtcattccctgaagtctctggacctagtgactatgaagaagctggacagtaaggtgaacatcatccccatcattgccaaagcagatgccatttcgaagagtgagctaacaaagttcaaaatcaaaatcaccagcgagcttgtcagcaacggagtccagatctatcagtttcctacagatgatgagtcggtggcagagatcaatggaaccatgaacgcccacctgccgtttgctgtcattggcagcacagaagaactgaagataggcaacaagatgatgagggcgcggcagtatccttggggcactgtgcaggttgaaaacgaggcccactgcgactttgtgaagctgcgggagatgctgattcgggtcaacatggaggatctgcgggagcagacccacacccggcactatgagctgtatcgccgctgtaagctggaggagatgggcttcaaggacaccgaccctgacagcaaacccttcagtttacaggagacatatgaggccaaaaggaacgagttcctaggggaactccagaaaaaagaagaggagatgagacagatgttcgtccagcgagtcaaagagaaagaagcggagctcaaagaggcagagaaagagctgcacgagaagtttgaccgtctgaagaaactgcaccaggacgagaagaagaaactggaggataagaagaaatccctggatgatgaagtgaatgctttcaagcaaagaaagacggcggctgagctgctccagtcccagggctcccaggctggaggctcacagactctgaagagagacaaagagaagaaaaattaactctgctgtttgctgcatgctgcatgagacccagggtcctgtttgggcttcctgtagacacccttttcctgcgcaacagagctgggcctccctttctctaatttcccccttaacatgcctggggggcatacaatccaacccgcgccctctcctctcttcctgccaaggtttatagaaacctgagaatctgagggtgatgtctggccgctggtcaagaagccaacagtcatgtggctcgcagatgcatcctgcatcccagtccccctcccagcacccccagccatcccccctgtcttcccccacatctttgccagaggtgtgacatggtcagggggcccatctgctactctttcccaccagctcccctgttccagttctggttgctgttagtttccctgaggtatttgcaaccaccatggctgggtaaccaccgatcagcacagctgtccccttggtctcctgtatcccagtcactagtcctccctggtccaccccaccctcatcctcaggagccacagccatttcttagagggtttcaaaaggacagcctttggcgccttttccttctaacctttgagtccagccctttccagttttcattcactcgaagtaactgcactcaagctgtgctcaaaatcggcaacgcatttatttacaccaagcccttcccataaaacacaactgctgaagaaaatagcagacgtttcccctctctctaactctgggtatcccacagatgcaaaagggagaataaacctgaatattattaccagcctagagtcttgaatgatagccttaccgaattcttcttgtgaggtatttcagcatctcggggggtaatttccggaagggctccatactgtcccaataaggtgaggccagtagcaggaataataaatcccactttgtaggctggaaaactgagctgtcaaaagaatcaagtgtttgggggtttgctctgatgagtcttctagttcatttggtgaatgtcatgatgatttttaacatgcattttgcatgcatcccccaataagaagagatgagactcggccggagagaagaaaaggcccttaactttctttccaatttaaggagttgagagtttaaaaatattccagccctaagtttttatcatgggtcccatctgatagtggctttgggaacctctgtgaagtagagagccctcccttgtcagggttatgaggcacagtggcctttggtgtttggccagtgacagtgtgagagatggagttgacctggcaatgatctgtggctaacatgccgtctctctgcccttcctttgcagtaatccatggctgtgtactgaatagtattccccgctacagctggactggactccatttagccttttaagccgaggttcctattttaactgacagctttcctttggggtgccaggcagcgaggccccccacccctatcctgccatgtacttcaagctcacttcttctttttgagttccgcaacttgctcctgcctcccagccccactggcactgaccatgaccacctacttctattttttttttagagtttctttttttgatcacttactttcaaagcacacagtcaaacaaggttatgccaaatttccaggcctttttgaagtattgagaaggggaaggggatttctcacttcaattatagatcataataggaagcaaaaagaaaaaaatgaaaagcaaacatatgcacgcacttttcttgttgacaaagcaagaatataggtttgctgtgtaggtttggtgctctattgattggtgagtgaccagagcaagtatgaaggtgatgctgccaaagcacaagccagtttcttgggaaaattcaagttacagtggagtatttttttgaagaccatatgcttggaggtagaaacaaaccaacgaccaaaaaaaaaaaaaaaaaaatctgctcagatactcagccagtagctcagagagatgctgagttaggcctgtcaggtctccttgggaaaggcttcatatttgcaactttgatgattctatgtccagcttcagagctgctttcccagaaattcacgcttaaacaaccaaccggtaaccaccacttccccacaccgccgcccggtaattatttgcattacaaaccggaggcgccctcatttgcatttgtgtacagattaactagttaaggcttgagaagctctgaataattcaaaagtattagacccacacagccttggagagaccttcagaaactaaggaggagttttatattaagggagacattttagtcagtaagacgatataacctacttactccgtaaggggaaatgaaggcccagagaagggaagggacttgaccgaggtcccacttctgtttcgaggcagaagccagactaattttcatgcctcctgactcccaatcagtttcacaaagggattcaatctgtttatatacgttacattcctggatacgaggtcttttgatgttcagagtaactgactagttagtattagaagaccctcgaggtttttttccacagaaaaacatctgaagatggattgggtgagggctggcaaaacgaaggcatgccgggccagctccttaacccaatgacccagtgatgctgcaaggctggaacggggtccaggagactgtgtgtaacaggtgccctaggtgacccttataatcagggaagtttggtgaacaaaaatcgaacccatgagtgaacataaattaaaaagttgatcaacctattaaaatgtgtatttcattgggtagcttttctcactgtagacagattttttccttcttcaatgaaaaggcttttaaattagtacaactgttactatttaaaaaaaaaataccctaagtactctgtttacttctggtgaaacaaaaccagtcattagaaatggtctgtgcttttattttcccagactggagtggcttttctgaaacacacacacacacacacacacacacacacacacacacacacacacacacgtacacacatccctcacttctcttaagccaagaagtttgctttccctagctgcagtgtagatggctcttgtttttgtttttttgttttaatcatttggcattcacatgtggctgttaatatgtgcttgtttttaattaaaacaagaagcttt

SEQ ID NO: 277964 - protein, 1070 aa, Artificial Sequence
  derived and/or modified sequence
MPQAAASAPWTSVSCGRIPGLPQNPDGCTFMPIAQAIPLQVDMAMALQRVRIAEKYGKNYLCLLQAVFVAETDLLLRIKDISHFLMQDIAFLSGGRGKDNAWIITFPENCNFRCIPEEVIAKVLTYLTSIARQNGSDSRFTIILDRRLDTWSSLKISLQKISASFPGNLHLVLVLRPTSFLQRTFTDIGFWFSQEDFMLKLPVVMLSSVSDLLTYIDDKQLTPELGGTLQYCHSEWIIFRNAIENFALTVKEMAQMLQSFGTELAETELPDDIPSIEEILAIRAERYHLLKNDITAVTKEGKILLTNLEVPDTEGAVSSRLECHRQISGDWQTINKLLTQVHDMETAFDGFWEKHQLKMEQYLQLWKFEQDFQQLVTEVEFLLNQQAELADVTGTIAQVKQKIKKLENLDENSQELLSKAQFVILHGHKLAANHHYALDLICQRCNELRYLSDILVNEIKAKRIQLSRTFKMHKLLQQARQCCDEGECLLANQEIDKFQSKEDAQKALQDIENFLEMALPFINYEPETLQYEFDVILSPELKVQMKTIQLKLENIRSIFENQQAGFRNLADKHVRPIQFVVPTPENLVTSGTPFFSSKQGKKTWRQNQSNLKIEVVPDCQEKRSSGPSSSLDNGNSLDVLKNHVLNELIQTERVYVRELYTVLLGYRAEMDNPEMFDLMPPLLRNKKDILFGNMAEIYEFHNDIFLSSLENCAHAPERVGPCFLERKDDFQMYAKYCQNKPRSETIWRKYSECAFFQECQRKLKHRLRLDSYLLKPVQRITKYQLLLKELLKYSKDCEGSALLKKALDAMLDLLKSVNDSMHQIAINGYIGNLNELGKMIMQGGFSVWIGHKKGATKMKDLARFKPMQRHLFLYEKAIVFCKRRVESGEGSDRYPSYSFKHCWKMDEVGITEYVKGDNRKFEIWYGEKEEVYIVQASNVDVKMTWLKEIRNILLKQQELLTVKKRKQQDQLTERDKFQISLQQNDEKQQGAFISTEETELEHTSTVVEVCEAIASVQAEANTVWTEASQSAEISEEPAEWSSNYFYPTYDENEEENRPLMRPVSEMALLY

SEQ ID NO: 277965 - protein, 429 aa, Artificial Sequence
  derived and/or modified sequence
  misc_feature (1)..(1): Xaa can be any naturally occurring amino acid
XHVLNELIQTERVYVRELYTVLLGYRAEMDNPEMFDLMPPLLRNKKDILFGNMAEIYEFHNDIFLSSLENCAHAPERVGPCFLERKDDFQMYAKYCQNKPRSETIWRKYSECAFFQECQRKLKHRLRLDSYLLKPVQRITKYQLLLKELLKYSKDCEGSALLKKALDAMLDLLKSVNDSMHQIAINGYIGNLNELGKMIMQGGFSVWIGHKKGATKMKDLARFKPMQRHLFLYEKAIVFCKRRVESGEGSDRYPSYSFKHCWKMDEVGITEYVKGDNRKFEIWYGEKEEVYIVQASNVDVKMTWLKEIRNILLKQQELLTVKKRKQQDQLTERDKFQISLQQNDEKQQGAFISTEETELEHTSTVVEVCEAIASVQAEANTVWTEASQSAEISEEPAEWSSNYFYPTYDENEEENRPLMRPVSEMALLY

SEQ ID NO: 277966 - protein, 1001 aa, Artificial Sequence
  derived and/or modified sequence
MQDIAFLSGGRGKDNAWIITFPENCNFRCIPEEVIAKVLTYLTSIARQNGSDSRFTIILDRRLDTWSSLKISLQKISASFPGNLHLVLVLRPTSFLQRTFTDIGFWFSQEDFMLKLPVVMLSSVSDLLTYIDDKQLTPELGGTLQYCHSEWIIFRNAIENFALTVKEMAQMLQSFGTELAETELPDDIPSIEEILAIRAERYHLLKNDITAVTKEGKILLTNLEVPDTEGAVSSRLECHRQISGDWQTINKLLTQVHDMETAFDGFWEKHQLKMEQYLQLWKFEQDFQQLVTEVEFLLNQQAELADVTGTIAQVKQKIKKLENLDENSQELLSKAQFVILHGHKLAANHHYALDLICQRCNELRYLSDILVNEIKAKRIQLSRTFKMHKLLQQARQCCDEGECLLANQEIDKFQSKEDAQKALQDIENFLEMALPFINYEPETLQYEFDVILSPELKVQMKTIQLKLENIRSIFENQQAGFRNLADKHVRPIQFVVPTPENLVTSGTPFFSSKQVGVGYSFFQACKLFSKGKKTWRQNQSNLKIEVVPDCQEKRSSGPSSSLDNGNSLDVLKNHVLNELIQTERVYVRELYTVLLGYRAEMDNPEMFDLMPPLLRNKKDILFGNMAEIYEFHNDIFLSSLENCAHAPERVGPCFLERKDDFQMYAKYCQNKPRSETIWRKYSECAFFQECQRKLKHRLRLDSYLLKPVQRITKYQLLLKELLKYSKDCEGSALLKKALDAMLDLLKSVNDSMHQIAINGYIGNLNELGKMIMQGGFSVWIGHKKGATKMKDLARFKPMQRHLFLYEKAIVFCKRRVESGEGSDRYPSYSFKHCWKMDEVGITEYVKGDNRKFEIWYGEKEEVYIVQASNVDVKMTWLKEIRNILLKQQELLTVKKRKQQDQLTERDKFQISLQQNDEKQQGAFISTEETELEHTSTVVEVCEAIASVQAEANTVWTEASQSAEISEEPAEWSSNYFYPTYDENEEENRPLMRPVSEMALLY

SEQ ID NO: 277967 - DNA, 3213 bp, Artificial Sequence
  derived and/or modified sequence
atgcctcaggcggcggcctcggctccatggacaagcgtaagctgtggccgtatccctggactaccccagaatccggatggctgcacctttatgcccatagcccaagctatccccctccaagtggatatggctatggcactgcagcgcgttcgcattgctgaaaaatacggaaaaaattacctatgtctgctgcaggccgtctttgttgccgagacggatctcctgttacgaattaaggatatcagtcactttttgatgcaggatatcgcttttcttagtggtggtagggggaaggacaatgcatggattatcactttccccgagaactgtaattttcggtgcatccccgaggaggttatcgcgaaagtgttgacgtacctaaccagtatcgcgcgccagaacggaagcgacagccggtttactatcatcctggatcgtcggttagacacttggtcaagcctgaaaatttcccttcagaagattagcgctagcttccctggcaaccttcacctcgtccttgtcctgcggcccacatccttcctgcagcgcacgtttactgatatcggcttctggttctcacaagaagacttcatgctcaaactgccagtcgttatgctgtctagcgtgagcgacctcttaacttatatcgacgacaaacaactaacgcctgaacttggcggcacgctccaatactgccacagtgaatggattatattccggaacgccatcgagaactttgccttgaccgttaaagagatggcccagatgcttcagtcattcggcaccgaattagcagagacggagctccccgacgacatcccctccatcgaagaaattctggctattagagccgaaagatatcatctgttgaagaacgatattactgctgtgacgaaagaggggaagatcctattgacaaatctggaggtaccagacacagaaggagccgtgagcagtagattagagtgtcaccgccagatctccggcgattggcagaccatcaataagctcctgacacaggtacatgatatggaaaccgcctttgacggattctgggagaaacaccagttaaaaatggagcagtaccttcagttatggaaattcgagcaggactttcagcagcttgtcacagaagtggaatttttactgaatcaacaggccgaactcgctgacgtgactggcacaattgcccaggtgaaacagaagattaaaaaactggaaaatcttgacgagaactcacaggaactcctcagcaaagctcagtttgtcatactccacggccacaagctggctgcaaatcaccactacgcattagatctcatatgccagaggtgtaatgaattacgatacctttcagacatcctggtaaatgagataaaagcaaagcgaattcagctctccagaacattcaagatgcataaactgcttcagcaggcacgacagtgctgcgacgaaggggaatgcctgctcgcgaaccaagaaatagacaaattccagagcaaagaagacgcacagaaagcgttacaggatatcgaaaactttctggaaatggccctgcccttcatcaactatgaacctgagacccttcagtacgaattcgatgtaatcctgagtccggaactgaaggtacaaatgaaaaccatccaattaaagctggagaacatccgctccatctttgaaaatcagcaggcgggcttccggaatcttgccgataaacatgtgcgtcccatccagttcgtggtgccaacaccagaaaacttagtcacaagcggaacaccattctttagcagcaagcaaggaaagaagacctggcgacagaaccagtcaaatctaaaaattgaagtggtgccggattgccaagaaaagcgctcttctgggccgagcagcagcctggataatggcaattcactagatgtcctgaaaaaccacgtgctcaatgagttaatccagaccgagcgggtgtatgttagggagctgtataccgtgttgttgggataccgggcggaaatggacaatcccgagatgttcgatttaatgcctccactgttgcgaaataagaaggatatattgttcggcaacatggccgagatttacgaatttcacaacgatatcttcctctcctcactagagaactgtgcacacgcccctgaacgcgtagggccgtgcttcttagagaggaaggacgactttcagatgtacgccaaatattgccaaaataaacctagatcggaaaccatctggcggaagtacagcgagtgcgcctttttccaagaatgccagaggaaactcaaacacaggttgagacttgactcctaccttttaaaaccggtgcagaggatcactaaataccaattactgttaaaagagctgcttaaatactcaaaagactgtgagggctccgcactgctgaaaaaagccctcgatgcaatgctcgatctgctcaaatctgttaacgacagcatgcaccagattgccattaacgggtatatcggcaacctcaatgagctaggcaaaatgattatgcaaggcggattctctgtgtggattggacataagaagggggccacaaaaatgaaggatctagctcgcttcaagcctatgcagagacatctgtttctgtacgagaaagcaatcgtgttctgtaaacggcgtgtggaaagcggcgagggcagtgatcggtacccttcctactctttcaagcactgttggaaaatggatgaggtgggaattactgagtatgtgaagggggacaaccggaaattcgagatatggtatggagaaaaggaggaggtttatatcgtacaggcttctaatgtcgatgtgaaaatgacttggttgaaagaaattcggaacattttgctgaaacagcaggagctgctgacagttaaaaaaaggaaacaacaggaccagcttactgagagggataagtttcaaatttctcttcagcagaacgacgaaaagcaacaaggggcttttatctcaacagaggaaaccgaactagagcatacctcgacggtggtggaagtctgcgaggccattgcttccgtgcaggcagaagcaaacactgtctggaccgaggcatctcagagcgctgagatctccgaggagcccgccgagtggagtagcaactacttctatcccacttacgatgagaacgaggaggaaaaccggccactgatgagacccgttagtgagatggccttgctctactag

SEQ ID NO: 277968 - DNA, 3213 bp, Artificial Sequence
  derived and/or modified sequence
atgccccaggccgccgccagcgccccctggacctctgtgtcctgtggccgcatccctggcctgccccagaacccagatggctgcaccttcatgcccatcgcccaggccatccccctgcaggtggacatggccatggccctgcagagggtgagaattgctgagaagtatggcaagaactacctgtgcctgctgcaggccgtgtttgtggccgagacagacctgctgctgcgcatcaaggacatcagccacttcctgatgcaggacatcgccttcctgagcggcggccggggcaaggacaatgcctggatcatcaccttccctgagaactgcaacttccgctgcatccctgaggaggtgattgccaaggtgctgacctacctgaccagcatcgcccggcagaatggaagtgacagccgcttcaccatcatcctggaccggcggctggacacctggagcagcctgaagatcagcctgcagaagatcagcgccagcttccctggcaacctgcacctggtgctggtgctgcggcccaccagcttcctgcagaggaccttcacagacatcggcttctggttcagccaggaggacttcatgctgaagctgcctgtggtgatgctgagctctgtgtctgacctgctgacctacattgatgacaagcagctgaccccagagctgggcggcaccctgcagtactgccacagcgagtggatcatcttcagaaatgccatcgagaactttgccctgactgtgaaggagatggcccagatgctgcagagctttggaacagagctggccgagacagagctgcctgatgacatccccagcattgaggagatcctggccatccgggcagagcgctaccacctgctgaagaatgacatcacagctgtgaccaaggagggcaagatcctgctgaccaacctggaggtgcctgacacagaaggagctgtgagcagccggctggagtgccaccggcagatcagcggggactggcagaccatcaacaagctgctgacccaggtgcatgacatggagacagcctttgatggcttctgggagaagcaccagctgaagatggagcagtacctgcagctgtggaagtttgagcaggacttccagcagctggtgacagaggtggagttcctgctgaaccagcaggccgagctggctgatgtgacaggcaccatcgcccaggtgaagcagaagatcaagaagctggagaacctggatgagaacagccaggagctgctgagcaaggcccagtttgtgatcctgcacggccacaagctggccgccaaccaccactacgccctggacctgatctgccagcgctgcaatgagctgcgctacctgagtgacatcctggtgaatgagatcaaggccaagaggatccagctgagcaggaccttcaagatgcacaagctgctgcagcaggcccggcagtgctgtgatgaaggagaatgtctgctggccaaccaggagattgacaagttccagagcaaggaggatgcccagaaggccctgcaggacatcgagaacttcctggagatggccctgcccttcatcaactatgagcctgagaccctgcagtatgaatttgatgtgatcctgagccctgagctgaaggtgcagatgaagaccatccagctgaagctggagaacatccgcagcatctttgagaaccagcaggccggcttcaggaacctggccgacaagcacgtgcggcccatccagtttgtggtgcccaccccagagaacctggtgaccagcggcacccccttcttcagcagcaagcagggcaagaagacctggaggcagaaccagagcaacctgaagattgaggtggtgcctgactgccaggagaagaggagcagcggccccagcagcagcctggacaatggaaacagcctggatgtgctgaagaaccacgtgctgaatgagctgatccagacagagcgggtgtatgtgcgggagctgtacacagtgctgctgggctacagagctgagatggacaaccctgagatgtttgacctgatgccacccctgctgaggaacaagaaggacatcctgtttggaaacatggccgagatctatgagttccacaatgacatcttcctgagcagcctggagaactgtgcccacgcccctgagcgggtgggcccctgcttcctggagaggaaggatgacttccagatgtatgccaagtactgccagaacaagcccaggtctgagaccatctggaggaagtacagtgaatgtgccttcttccaggagtgccagaggaagctgaagcaccggctgcggctggacagctacctgctgaagcctgtgcagaggatcaccaagtaccagctgctgctgaaggagctgctgaagtacagcaaggactgtgagggcagcgccctgctgaagaaggccctggatgccatgctggacctgctgaagtctgtgaatgacagcatgcaccagatcgccatcaatggctacatcggcaacctgaatgagctgggcaagatgatcatgcagggcggcttctctgtgtggattggccacaagaagggggccaccaagatgaaggacctggcccgcttcaagcccatgcagaggcacctgttcctgtatgagaaggccatcgtgttctgcaagagaagagtggagagcggggagggcagtgaccgctaccccagctacagcttcaagcactgctggaagatggatgaggtgggcatcacagaatatgtgaagggggacaacaggaagtttgagatctggtatggagagaaggaggaggtgtacatcgtgcaggccagcaatgtggatgtgaagatgacctggctgaaggagatccggaacatcctgctgaagcagcaggagctgctgactgtgaagaagaggaagcagcaggaccagctgacagagcgggacaagttccagatcagcctgcagcagaatgatgagaagcagcagggcgccttcatcagcacagaggagacagagctggagcacaccagcacagtggtggaggtgtgtgaggccatcgcctctgtgcaggccgaggccaacacagtgtggacagaggccagccagagcgctgagatcagcgaggagcctgctgagtggagcagcaactacttctaccccacctatgatgaaaatgaggaggagaaccggcccctgatgaggcctgtgtctgagatggccctgctgtactag

SEQ ID NO: 277969 - DNA, 3913 bp, Artificial Sequence
  derived and/or modified sequence
atgccccaagctgccgcttcggcgccgtggacctcagtgtcctgcggcaggatcccaggcctgccccagaacccagatggctgcactttcatgccgatagcccaggcgatccctctgcaggtggacatggccatggccctgcagcgcgtgaggattgccgagaagtacgggaagaactacctctgcctcctgcaagcagtcttcgtggcagaaaccgatctgctcctccgtataaaggacatcagtcatttcttaatgcaagacatcgccttcttgtctggtggccggggaaaggacaatgcttggatcattacgtttccagaaaactgtaattttagatgtataccagaggaagtaatagcaaaagtacttacttacctgacatctattgcaaggcaaaatggatcagactcccggtttaccattattctggatcgaagattggatacatggtcttctctcaaaatctctctccaaaaaatctcggcttccttccctgggaacttgcacttggttttggttttacgtcctaccagctttcttcaacgaacgttcacagacattggattttggtttagtcaggaggattttatgcttaaattaccagttgttatgctgagctcagttagtgatttgctgacatacattgatgacaagcaattaacccctgagttaggcggcaccttgcagtactgccacagtgaatggatcatcttcagaaatgctatagaaaattttgccctcacagtgaaagaaatggctcagatgttacagtcctttggaactgaactggctgagacagaactaccagatgatattccctcaatagaagaaattctggcaattcgtgctgaaaggtatcatctgttgaagaatgatattacagctgtaaccaaagaaggaaaaattctgctaacaaatctggaagtgcctgacactgaaggagctgtcagttcaagactagaatgtcatcggcaaataagtggtgactggcaaactattaataagttgctgactcaagtacatgatatggaaacagcttttgatggattttgggaaaaacatcaattaaaaatggagcagtatctgcaactatggaagtttgagcaggattttcaacagcttgtgactgaagttgaatttctattaaaccaacaagcagaactggctgatgtaacagggactatagctcaagtaaaacaaaaaataaaaaaattggaaaacttagatgaaaattctcaggagctattatcaaaggcccagtttgtgatattacatggacacaagcttgcagcaaatcaccattatgcacttgatttaatctgccagaggtgcaatgagctacgttacctttctgatattttggttaatgagataaaagcaaaacggatacaactcagcaggaccttcaaaatgcataaactcctacagcaggctcgtcaatgctgtgatgaaggggaatgtcttctagctaatcaggaaatagataagtttcagtctaaagaagatgctcagaaagctctccaagacattgaaaattttcttgaaatggctctaccctttataaattatgaacctgaaacactgcagtatgaatttgatgtaatattatctcctgagcttaaggttcaaatgaagactatacaactcaagcttgaaaacattcgaagtatatttgagaaccagcaggctggtttcaggaacctggcagataagcatgtgaggccaatccaatttgtggtacccacacctgaaaatttggtcacatctgggacaccatttttttcatctaaacaagggaagaagacttggagacaaaatcagagcaacttaaaaattgaagtggtgcctgattgtcaggagaagagaagttctggtccatcctccagtttggacaatggcaatagcttggatgttttaaagaaccacgtactaaatgaactgatacagactgagagagtttatgttcgagaactgtatactgttttgttgggttatagagcggagatggataatccagagatgtttgatcttatgccacctctcctgagaaataaaaaggacattctctttggaaacatggcagaaatatatgaattccataacgacattttcttgagcagcctggaaaattgtgctcatgctccagaaagagtgggaccttgtttcctggaaaggaaggatgattttcagatgtatgcaaaatattgtcagaataagcccagatcagaaacaatttggaggaagtattcagaatgcgcatttttccaggaatgtcaaagaaagttaaaacacagacttagactggattcctatttactcaaaccagtgcaacgaatcactaaatatcagttattgttgaaggagctattaaaatatagcaaagactgtgaaggatctgctctgttgaagaaggcactcgatgcaatgctggatttactgaagtcagttaatgattctatgcatcagattgcaataaatggctatattggaaacttaaatgaactgggcaagatgataatgcaaggtggattcagcgtttggatagggcacaagaaaggtgctacaaaaatgaaggatttggctagattcaaaccaatgcagcgacaccttttcttgtatgaaaaagccattgttttttgcaaaaggcgtgttgaaagtggagaaggctctgacagatacccgtcatacagttttaaacactgttggaaaatggatgaagttggaatcactgaatatgtaaaaggtgataaccgcaagtttgaaatctggtatggtgaaaaggaagaagtttatattgtccaggcttctaatgtagatgtgaagatgacgtggctaaaagaaataagaaatattttgttgaagcagcaggaacttttgacagttaaaaaaagaaagcaacaggatcaattaacagaacgggataagtttcagatttctcttcagcagaatgatgaaaagcaacagggagcttttataagtactgaggaaactgaattggaacacaccagcactgtggtggaggtctgtgaggcaattgcgtcagttcaggcagaagcaaatacagtttggactgaggcatcacaatctgcagaaatctctgaagaacctgcggaatggtcaagcaactatttctaccctacttatgatgaaaatgaagaagaaaataggcccctcatgagacctgtgtcggagatggctctcctatattgatgaagctactatgtcaaatggcaagtagctctttcctgcctgcttctcagctcatttggaaaaatactgcgcaaaagacattgagctcaaatgatgcagatgttgttttcaggttaatggacacgcaaagaaaccacagcacatacttcttttctttcatttaataaagcttttaattatggtacgctgtctttttaaaatcatgtatttaatgtgtcagatattgtgcttgaaagattctcatctcagaatacttttggacttgaaaattatttcttctctactttgtaaccaaatgcaatcggtgtgccttggattatttagtttattaatgaattaagtcaaaattacggctgcaaaatggctaaggtcaagtaaagcacaacattatgatttaatatgcttttgttgaaaccacagcttttgtgcccattgttttaacttgtgtgaaacaatacaaagcccagaaattcttttcggggcatgagtaaattttgttcagggctactgtctgtatgtgcccagataaaattttcatgagagtagtttacaaaagccgtatttaaaagttaatattttcacactttttttctggatttctgcttataattaatgtaacttaaattagttgtgctctgctattttctgtatatttcatgttgtaattctttttttcaaataaaaattaattcttcaggtt

SEQ ID NO: 277970 - DNA, 3813 bp, Artificial Sequence
  derived and/or modified sequence
catgttaagagcaagaaggcttttgttcttggagcaggcagagagtattgtacattcttttggccgaggaaacagaatgagctgcgacagtcttaaggacaaacatttgtgaaaccgatctgctcctccgtataaaggacatcagtcatttcttaatgcaagacatcgccttcttgtctggtggccggggaaaggacaatgcttggatcattacgtttccagaaaactgtaattttagatgtataccagaggaagtaatagcaaaagtacttacttacctgacatctattgcaaggcaaaatggatcagactcccggtttaccattattctggatcgaagattggatacatggtcttctctcaaaatctctctccaaaaaatctcggcttccttccctgggaacttgcacttggttttggttttacgtcctaccagctttcttcaacgaacgttcacagacattggattttggtttagtcaggaggattttatgcttaaattaccagttgttatgctgagctcagttagtgatttgctgacatacattgatgacaagcaattaacccctgagttaggcggcaccttgcagtactgccacagtgaatggatcatcttcagaaatgctatagaaaattttgccctcacagtgaaagaaatggctcagatgttacagtcctttggaactgaactggctgagacagaactaccagatgatattccctcaatagaagaaattctggcaattcgtgctgaaaggtatcatctgttgaagaatgatattacagctgtaaccaaagaaggaaaaattctgctaacaaatctggaagtgcctgacactgaaggagctgtcagttcaagactagaatgtcatcggcaaataagtggtgactggcaaactattaataagttgctgactcaagtacatgatatggaaacagcttttgatggattttgggaaaaacatcaattaaaaatggagcagtatctgcaactatggaagtttgagcaggattttcaacagcttgtgactgaagttgaatttctattaaaccaacaagcagaactggctgatgtaacagggactatagctcaagtaaaacaaaaaataaaaaaattggaaaacttagatgaaaattctcaggagctattatcaaaggcccagtttgtgatattacatggacacaagcttgcagcaaatcaccattatgcacttgatttaatctgccagaggtgcaatgagctacgttacctttctgatattttggttaatgagataaaagcaaaacggatacaactcagcaggaccttcaaaatgcataaactcctacagcaggctcgtcaatgctgtgatgaaggggaatgtcttctagctaatcaggaaatagataagtttcagtctaaagaagatgctcagaaagctctccaagacattgaaaattttcttgaaatggctctaccctttataaattatgaacctgaaacactgcagtatgaatttgatgtaatattatctcctgagcttaaggttcaaatgaagactatacaactcaagcttgaaaacattcgaagtatatttgagaaccagcaggctggtttcaggaacctggcagataagcatgtgaggccaatccaatttgtggtacccacacctgaaaatttggtcacatctgggacaccatttttttcatctaaacaagggaagaagacttggagacaaaatcagagcaacttaaaaattgaagtggtgcctgattgtcaggagaagagaagttctggtccatcctccagtttggacaatggcaatagcttggatgttttaaagaaccacgtactaaatgaactgatacagactgagagagtttatgttcgagaactgtatactgttttgttgggttatagagcggagatggataatccagagatgtttgatcttatgccacctctcctgagaaataaaaaggacattctctttggaaacatggcagaaatatatgaattccataacgacattttcttgagcagcctggaaaattgtgctcatgctccagaaagagtgggaccttgtttcctggaaaggaaggatgattttcagatgtatgcaaaatattgtcagaataagcccagatcagaaacaatttggaggaagtattcagaatgcgcatttttccaggaatgtcaaagaaagttaaaacacagacttagactggattcctatttactcaaaccagtgcaacgaatcactaaatatcagttattgttgaaggagctattaaaatatagcaaagactgtgaaggatctgctctgttgaagaaggcactcgatgcaatgctggatttactgaagtcagttaatgattctatgcatcagattgcaataaatggctatattggaaacttaaatgaactgggcaagatgataatgcaaggtggattcagcgtttggatagggcacaagaaaggtgctacaaaaatgaaggatttggctagattcaaaccaatgcagcgacaccttttcttgtatgaaaaagccattgttttttgcaaaaggcgtgttgaaagtggagaaggctctgacagatacccgtcatacagttttaaacactgttggaaaatggatgaagttggaatcactgaatatgtaaaaggtgataaccgcaagtttgaaatctggtatggtgaaaaggaagaagtttatattgtccaggcttctaatgtagatgtgaagatgacgtggctaaaagaaataagaaatattttgttgaagcagcaggaacttttgacagttaaaaaaagaaagcaacaggatcaattaacagaacgggataagtttcagatttctcttcagcagaatgatgaaaagcaacagggagcttttataagtactgaggaaactgaattggaacacaccagcactgtggtggaggtctgtgaggcaattgcgtcagttcaggcagaagcaaatacagtttggactgaggcatcacaatctgcagaaatctctgaagaacctgcggaatggtcaagcaactatttctaccctacttatgatgaaaatgaagaagaaaataggcccctcatgagacctgtgtcggagatggctctcctatattgatgaagctactatgtcaaatggcaagtagctctttcctgcctgcttctcagctcatttggaaaaatactgcgcaaaagacattgagctcaaatgatgcagatgttgttttcaggttaatggacacgcaaagaaaccacagcacatacttcttttctttcatttaataaagcttttaattatggtacgctgtctttttaaaatcatgtatttaatgtgtcagatattgtgcttgaaagattctcatctcagaatacttttggacttgaaaattatttcttctctactttgtaaccaaatgcaatcggtgtgccttggattatttagtttattaatgaattaagtcaaaattacggctgcaaaatggctaaggtcaagtaaagcacaacattatgatttaatatgcttttgttgaaaccacagcttttgtgcccattgttttaacttgtgtgaaacaatacaaagcccagaaattcttttcggggcatgagtaaattttgttcagggctactgtctgtatgtgcccagataaaattttcatgagagtagtttacaaaagccgtatttaaaagttaatattttcacactttttttctggatttctgcttataattaatgtaacttaaattagttgtgctctgctattttctgtatatttcatgttgtaattctttttttcaaataaaaattaattcttcaggtt

SEQ ID NO: 277971 - DNA, 3346 bp, Artificial Sequence
  derived and/or modified sequence
aaactttttttcatgttaagagcaagaaggcttttgttcttggagcaggcagagagtattgtacattcttttggccgaggaaacagaatgagctgcgacagtcttaaggacaaacatttgtgaaaccgatctgctcctccgtataaaggacatcagtcatttcttaatgcaagacatcgccttcttgtctggtggccggggaaaggacaatgcttggatcattacgtttccagaaaactgtaattttagatgtataccagaggaagtaatagcaaaagtacttacttacctgacatctattgcaaggcaaaatggatcagactcccggtttaccattattctggatcgaagattggatacatggtcttctctcaaaatctctctccaaaaaatctcggcttccttccctgggaacttgcacttggttttggttttacgtcctaccagctttcttcaacgaacgttcacagacattggattttggtttagtcaggaggattttatgcttaaattaccagttgttatgctgagctcagttagtgatttgctgacatacattgatgacaagcaattaacccctgagttaggcggcaccttgcagtactgccacagtgaatggatcatcttcagaaatgctatagaaaattttgccctcacagtgaaagaaatggctcagatgttacagtcctttggaactgaactggctgagacagaactaccagatgatattccctcaatagaagaaattctggcaattcgtgctgaaaggtatcatctgttgaagaatgatattacagctgtaaccaaagaaggaaaaattctgctaacaaatctggaagtgcctgacactgaaggagctgtcagttcaagactagaatgtcatcggcaaataagtggtgactggcaaactattaataagttgctgactcaagtacatgatatggaaacagcttttgatggattttgggaaaaacatcaattaaaaatggagcagtatctgcaactatggaagtttgagcaggattttcaacagcttgtgactgaagttgaatttctattaaaccaacaagcagaactggctgatgtaacagggactatagctcaagtaaaacaaaaaataaaaaaattggaaaacttagatgaaaattctcaggagctattatcaaaggcccagtttgtgatattacatggacacaagcttgcagcaaatcaccattatgcacttgatttaatctgccagaggtgcaatgagctacgttacctttctgatattttggttaatgagataaaagcaaaacggatacaactcagcaggaccttcaaaatgcataaactcctacagcaggctcgtcaatgctgtgatgaaggggaatgtcttctagctaatcaggaaatagataagtttcagtctaaagaagatgctcagaaagctctccaagacattgaaaattttcttgaaatggctctaccctttataaattatgaacctgaaacactgcagtatgaatttgatgtaatattatctcctgagcttaaggttcaaatgaagactatacaactcaagcttgaaaacattcgaagtatatttgagaaccagcaggctggtttcaggaacctggcagataagcatgtgaggccaatccaatttgtggtacccacacctgaaaatttggtcacatctgggacaccatttttttcatctaaacaagtgggagttggatactctttctttcaagcatgtaaacttttttcaaaagggaagaagacttggagacaaaatcagagcaacttaaaaattgaagtggtgcctgattgtcaggagaagagaagttctggtccatcctccagtttggacaatggcaatagcttggatgttttaaagaaccacgtactaaatgaactgatacagactgagagagtttatgttcgagaactgtatactgttttgttgggttatagagcggagatggataatccagagatgtttgatcttatgccacctctcctgagaaataaaaaggacattctctttggaaacatggcagaaatatatgaattccataacgacattttcttgagcagcctggaaaattgtgctcatgctccagaaagagtgggaccttgtttcctggaaaggaaggatgattttcagatgtatgcaaaatattgtcagaataagcccagatcagaaacaatttggaggaagtattcagaatgcgcatttttccaggaatgtcaaagaaagttaaaacacagacttagactggattcctatttactcaaaccagtgcaacgaatcactaaatatcagttattgttgaaggagctattaaaatatagcaaagactgtgaaggatctgctctgttgaagaaggcactcgatgcaatgctggatttactgaagtcagttaatgattctatgcatcagattgcaataaatggctatattggaaacttaaatgaactgggcaagatgataatgcaaggtggattcagcgtttggatagggcacaagaaaggtgctacaaaaatgaaggatttggctagattcaaaccaatgcagcgacaccttttcttgtatgaaaaagccattgttttttgcaaaaggcgtgttgaaagtggagaaggctctgacagatacccgtcatacagttttaaacactgttggaaaatggatgaagttggaatcactgaatatgtaaaaggtgataaccgcaagtttgaaatctggtatggtgaaaaggaagaagtttatattgtccaggcttctaatgtagatgtgaagatgacgtggctaaaagaaataagaaatattttgttgaagcagcaggaacttttgacagttaaaaaaagaaagcaacaggatcaattaacagaacgggataagtttcagatttctcttcagcagaatgatgaaaagcaacagggagcttttataagtactgaggaaactgaattggaacacaccagcactgtggtggaggtctgtgaggcaattgcgtcagttcaggcagaagcaaatacagtttggactgaggcatcacaatctgcagaaatctctgaagaacctgcggaatggtcaagcaactatttctaccctacttatgatgaaaatgaagaagaaaataggcccctcatgagacctgtgtcggagatggctctcctatattgatgaagctactatgtcaaatggcaagtagctctttcctgcctgcttctcagctcatttggaaaaatactgcgcaaaagacattgagctcaaatgatgcagatgttgttttcaggttaatggacacgcaaagaaaccacagcacatacttcttttctttcatttaataaagctttt

SEQ ID NO: 277972 - DNA, 3945 bp, Artificial Sequence
  derived and/or modified sequence
cctgggttcgccaaggcgggcggccaggcacatgccccaagctgccgcttcggcgccgtggacctcagtgtcctgcggcaggatcccaggcctgccccagaacccagatggctgcactttcatgccgatagcccaggcgatccctctgcaggtggacatggccatggccctgcagcgcgtgaggattgccgagaagtacgggaagaactacctctgcctcctgcaagcagtcttcgtggcagaaaccgatctgctcctccgtataaaggacatcagtcatttcttaatgcaagacatcgccttcttgtctggtggccggggaaaggacaatgcttggatcattacgtttccagaaaactgtaattttagatgtataccagaggaagtaatagcaaaagtacttacttacctgacatctattgcaaggcaaaatggatcagactcccggtttaccattattctggatcgaagattggatacatggtcttctctcaaaatctctctccaaaaaatctcggcttccttccctgggaacttgcacttggttttggttttacgtcctaccagctttcttcaacgaacgttcacagacattggattttggtttagtcaggaggattttatgcttaaattaccagttgttatgctgagctcagttagtgatttgctgacatacattgatgacaagcaattaacccctgagttaggcggcaccttgcagtactgccacagtgaatggatcatcttcagaaatgctatagaaaattttgccctcacagtgaaagaaatggctcagatgttacagtcctttggaactgaactggctgagacagaactaccagatgatattccctcaatagaagaaattctggcaattcgtgctgaaaggtatcatctgttgaagaatgatattacagctgtaaccaaagaaggaaaaattctgctaacaaatctggaagtgcctgacactgaaggagctgtcagttcaagactagaatgtcatcggcaaataagtggtgactggcaaactattaataagttgctgactcaagtacatgatatggaaacagcttttgatggattttgggaaaaacatcaattaaaaatggagcagtatctgcaactatggaagtttgagcaggattttcaacagcttgtgactgaagttgaatttctattaaaccaacaagcagaactggctgatgtaacagggactatagctcaagtaaaacaaaaaataaaaaaattggaaaacttagatgaaaattctcaggagctattatcaaaggcccagtttgtgatattacatggacacaagcttgcagcaaatcaccattatgcacttgatttaatctgccagaggtgcaatgagctacgttacctttctgatattttggttaatgagataaaagcaaaacggatacaactcagcaggaccttcaaaatgcataaactcctacagcaggctcgtcaatgctgtgatgaaggggaatgtcttctagctaatcaggaaatagataagtttcagtctaaagaagatgctcagaaagctctccaagacattgaaaattttcttgaaatggctctaccctttataaattatgaacctgaaacactgcagtatgaatttgatgtaatattatctcctgagcttaaggttcaaatgaagactatacaactcaagcttgaaaacattcgaagtatatttgagaaccagcaggctggtttcaggaacctggcagataagcatgtgaggccaatccaatttgtggtacccacacctgaaaatttggtcacatctgggacaccatttttttcatctaaacaagggaagaagacttggagacaaaatcagagcaacttaaaaattgaagtggtgcctgattgtcaggagaagagaagttctggtccatcctccagtttggacaatggcaatagcttggatgttttaaagaaccacgtactaaatgaactgatacagactgagagagtttatgttcgagaactgtatactgttttgttgggttatagagcggagatggataatccagagatgtttgatcttatgccacctctcctgagaaataaaaaggacattctctttggaaacatggcagaaatatatgaattccataacgacattttcttgagcagcctggaaaattgtgctcatgctccagaaagagtgggaccttgtttcctggaaaggaaggatgattttcagatgtatgcaaaatattgtcagaataagcccagatcagaaacaatttggaggaagtattcagaatgcgcatttttccaggaatgtcaaagaaagttaaaacacagacttagactggattcctatttactcaaaccagtgcaacgaatcactaaatatcagttattgttgaaggagctattaaaatatagcaaagactgtgaaggatctgctctgttgaagaaggcactcgatgcaatgctggatttactgaagtcagttaatgattctatgcatcagattgcaataaatggctatattggaaacttaaatgaactgggcaagatgataatgcaaggtggattcagcgtttggatagggcacaagaaaggtgctacaaaaatgaaggatttggctagattcaaaccaatgcagcgacaccttttcttgtatgaaaaagccattgttttttgcaaaaggcgtgttgaaagtggagaaggctctgacagatacccgtcatacagttttaaacactgttggaaaatggatgaagttggaatcactgaatatgtaaaaggtgataaccgcaagtttgaaatctggtatggtgaaaaggaagaagtttatattgtccaggcttctaatgtagatgtgaagatgacgtggctaaaagaaataagaaatattttgttgaagcagcaggaacttttgacagttaaaaaaagaaagcaacaggatcaattaacagaacgggataagtttcagatttctcttcagcagaatgatgaaaagcaacagggagcttttataagtactgaggaaactgaattggaacacaccagcactgtggtggaggtctgtgaggcaattgcgtcagttcaggcagaagcaaatacagtttggactgaggcatcacaatctgcagaaatctctgaagaacctgcggaatggtcaagcaactatttctaccctacttatgatgaaaatgaagaagaaaataggcccctcatgagacctgtgtcggagatggctctcctatattgatgaagctactatgtcaaatggcaagtagctctttcctgcctgcttctcagctcatttggaaaaatactgcgcaaaagacattgagctcaaatgatgcagatgttgttttcaggttaatggacacgcaaagaaaccacagcacatacttcttttctttcatttaataaagcttttaattatggtacgctgtctttttaaaatcatgtatttaatgtgtcagatattgtgcttgaaagattctcatctcagaatacttttggacttgaaaattatttcttctctactttgtaaccaaatgcaatcggtgtgccttggattatttagtttattaatgaattaagtcaaaattacggctgcaaaatggctaaggtcaagtaaagcacaacattatgatttaatatgcttttgttgaaaccacagcttttgtgcccattgttttaacttgtgtgaaacaatacaaagcccagaaattcttttcggggcatgagtaaattttgttcagggctactgtctgtatgtgcccagataaaattttcatgagagtagtttacaaaagccgtatttaaaagttaatattttcacactttttttctggatttctgcttataattaatgtaacttaaattagttgtgctctgctattttctgtatatttcatgttgtaattctttttttcaaataaaaattaattcttcaggtta

SEQ ID NO: 277973 - DNA, 3213 bp, Artificial Sequence
  derived and/or modified sequence
atgccccaggccgccgccagcgccccctggaccagcgtgagctgcggtcgaattccaggcctgccccagaacccagatggttgcacattcatgccaatcgctcaggcaattcctctacaggttgacatggcaatggccctccagagagtcaggattgcagagaaatatgggaagaactacctttgcttactgcaggcagtctttgtggccgagaccgatctgcttctgcggataaaggacatcagccactttctcatgcaagacattgccttccttagcggggggcggggaaaggacaatgcttggattatcaccttcccggagaactgtaatttcaggtgcatcccagaagaggttatcgcaaaagtcctgacgtatttaaccagtatcgctcgacagaatgggtccgatagtcggtttaccatcatcctggataggagactggacacctggtcctctctcaagattagcctgcagaagatttcagcaagttttccaggcaacctgcacttagtcttagtcctgagacccacctcttttttgcagcggacttttactgacattggattttggttcagtcaagaggattttatgttgaaattgccagtcgtcatgcttagctcagtaagcgacctactgacatatatcgatgacaagcagctgaccccagaactgggcggcactttacagtactgccacagcgaatggataatcttcaggaatgcaattgagaactttgcccttaccgtgaaagaaatggcccaaatgctgcagagctttggtaccgaactcgcagagaccgagcttcccgatgacatcccatcaatcgaggagatcctggctattcgcgctgaaaggtatcacttgctgaaaaatgatattaccgcagtcaccaaagaaggcaagatcttattgacaaatcttgaggtccctgacactgaaggagccgtgtcaagtcgcttagaatgccacagacagatcagtggtgattggcaaactataaataaactattgacccaagtccacgatatggaaaccgcattcgatggcttttgggagaagcaccagttgaagatggaacagtacctgcagctttggaagttcgagcaggatttccagcagctcgtcactgaggttgaattcctgcttaaccagcaggccgagttagcagatgtcaccggaacgattgcccaggtaaagcaaaagatcaagaaactggagaacctggacgaaaactctcaggaactcctctctaaggctcaatttgtaatcttacatggtcataagctggctgcaaatcaccattacgcacttgacctcatatgccagcggtgcaacgagttgcggtatctcagcgatatactcgtgaacgagataaaagccaagcggatacaactttctcgaacctttaagatgcacaagttactgcagcaggcacgccagtgctgcgacgagggtgaatgtcttctagcaaatcaagagattgataaattccaatcgaaggaggacgcacaaaaggcactgcaagatatcgaaaatttcctggagatggccctcccattcatcaattacgagccagagaccctgcagtatgagtttgacgtgatattgagccccgaactgaaggtgcaaatgaagaccatccagctgaagttagagaatatcaggtcgattttcgagaatcaacaggctgggtttcggaacctggccgataagcatgtgcgccccatacagttcgtagtgcctacccctgagaatctggtgacttctggtacgccttttttctcgtcaaaacaggggaaaaagacgtggcgacagaatcagtccaatttaaagatcgaggtggtccccgattgtcaggagaaacgaagcagtgggccttcttccagtctggacaatggaaactcattagacgtgctcaagaatcacgttctcaacgaactgatccagacagagcgggtctacgtccgcgagctgtacacagtgttgttaggttatcgcgccgaaatggacaatcctgagatgttcgatcttatgcccccactgctgagaaacaaaaaagatatactgttcggtaacatggctgaaatctatgagttccataacgatatcttcttgagctctttagaaaactgcgcccacgctccagagagggtgggcccttgctttctggagagaaaggatgattttcaaatgtacgctaagtactgtcagaacaaaccccgctccgagaccatctggcgcaagtactcagaatgcgctttctttcaggaatgccagcggaaattaaagcaccggctgagactggacagctaccttctgaagccagtgcagaggattacaaaatatcaactgctgttgaaagagctgctgaagtatagtaaggactgtgaaggtagcgccctgcttaagaaggccctagacgccatgcttgacttgctgaaatccgtgaatgatagtatgcatcagatagcaataaatgggtatattggaaatttgaacgaattgggcaagatgatcatgcagggcgggttcagcgtgtggatcggtcacaagaagggcgcaactaagatgaaggacctagctcgtttcaagccgatgcagcggcacttgttcttatatgaaaaagctatcgtgttctgtaagcgtcgagtcgagtccggcgaaggcagcgataggtaccctagctatagctttaaacattgttggaaaatggatgaagtcggaatcactgaatatgttaagggtgacaaccgcaaattcgaaatttggtacggcgaaaaggaggaggtttacatcgtgcaagccagtaatgtggacgtgaaaatgacatggctgaaagaaatccgcaacatcctcctcaagcaacaggaactcctgaccgtaaagaagagaaagcagcaggaccagttgactgaacgagacaaattccaaatctcacttcagcagaatgacgaaaaacagcagggcgccttcatctccactgaagaaaccgaactggagcatacatcgacagtagttgaagtgtgtgaagcgatcgcaagcgtgcaggcagaggccaatacagtgtggactgaggcttcacaaagtgctgagattagcgaagaacctgctgaatggtcgagcaactatttctaccctacttatgacgaaaatgaggaagagaacaggccgctgatgagaccagtgtcagagatggcactactttactag

SEQ ID NO: 277974 - DNA, 3213 bp, Artificial Sequence
  derived and/or modified sequence
atgccccaggcagctgcttccgccccatggacctcagtttcctgcgggaggatccccggactcccacagaaccctgatggatgcacctttatgccaatcgcacaggcgattccactccaggtggatatggccatggcgttgcagcgggtgcggatcgcagagaaatatgggaaaaactacttatgccttctgcaggccgtctttgtagctgagactgacctcttgttgcggataaaagatataagtcactttctcatgcaagatatcgcattcctgtccggcggtagagggaaggacaatgcctggatcattacctttccggagaattgtaacttccgctgcattcctgaagaagttattgccaaagtgttgacttatctgacctcaatcgccaggcaaaatggatcagactccagattcaccataatcctggatcggaggcttgacacatggtcctctctcaagattagcctgcagaaaatcagtgctagcttccctggcaacctccatctggtcctggtgctgagacccacatccttccttcagagaacgttcacagacatcggattctggttctcccaggaagattttatgctgaagctacccgtagtcatgttatccagtgtgtcggacctgttaacctatatcgacgacaaacagttaactccagagctcgggggtacactccagtactgccactccgagtggataatctttcgcaacgccatcgaaaattttgcactgaccgtaaaagaaatggcccagatgctacagtcatttggtacagagctggcagagaccgagctgccagacgatattccaagtattgaagaaattctcgctattagggcggaacggtaccatttgcttaagaatgatataaccgccgttacaaaagaaggcaagattctgctgacaaatctggaggtgcctgacacagagggggctgtgagctctcgcctggaatgccaccggcaaatctcaggggactggcagacaattaacaagttgctgacccaggtgcacgatatggagacggcattcgatggattttgggaaaagcaccagctgaagatggaacagtatctgcagctgtggaagttcgaacaggatttccagcagctagtgacagaagtggaattcctactgaaccagcaggcagagctggccgacgtgacggggacaatcgcacaagtaaagcaaaaaatcaaaaaactggagaacctagatgagaatagtcaggagttgctctccaaggcccagttcgttatcttgcatggccacaagttggccgctaaccatcactatgcactcgatctgatctgccaacggtgcaatgagctcagatatctgagcgatatcctggtcaacgaaataaaagccaagaggatccagttaagccgaacatttaaaatgcacaagctgttgcagcaggcacggcagtgttgtgatgagggggagtgcttgctcgccaaccaggaaatcgataaattccaatcaaaggaagacgcgcagaaggcactgcaggatatcgagaactttctggaaatggccttacctttcatcaattacgagccagagacgctgcagtatgaattcgacgtaattttaagtccagagctgaaagttcagatgaaaaccattcagctaaagttggagaacatccggtcaatcttcgagaaccagcaagcagggtttaggaacctggccgataagcacgtgcgccctattcagtttgtggtacccacgcccgaaaatctcgtgacaagcgggaccccgttcttcagttctaagcaaggaaaaaaaacgtggcggcagaatcagtctaacctgaagatagaggttgtgcctgattgtcaagaaaagagaagttccggtcccagctcctcactggacaacgggaactccttggatgtgcttaagaaccacgtgctgaatgagcttattcagacagagagggtgtacgtgagagagctctacaccgtcctactcggataccgcgcagagatggataaccctgagatgtttgacctgatgcctccgctcttgaggaacaaaaaagacatactgtttggaaatatggccgagatttacgaattccacaacgacattttcctgtcgtcgctggagaattgtgcccacgcacctgagcgagttggcccatgctttctggagcgcaaagatgactttcagatgtatgctaagtattgccagaacaagccccgaagtgaaacaatctggcgcaaatattcagagtgtgcctttttccaggaatgtcagcgtaaactgaagcatcgcttacgactagactcttatctcctcaagcccgtccaaaggatcaccaagtatcaactgcttttaaaggagcttctgaaatatagcaaggattgcgagggctccgccctgctcaagaaggcacttgatgccatgcttgacctgctgaaatcagttaatgacagtatgcatcagatcgcaattaatggatacataggcaacttaaatgagctgggcaagatgatcatgcagggtggcttcagtgtctggataggccacaaaaagggtgcaactaagatgaaggatctcgccagattcaaacccatgcaaaggcacctgtttctatatgagaaggctatagtgttctgtaaacgacgcgtggaatctggcgaaggctccgatcgatatccatcttacagctttaaacactgctggaagatggacgaggtgggtataaccgaatatgtgaaaggagataacaggaaatttgaaatatggtacggggagaaggaggaggtctacattgtgcaagctagcaacgttgacgtgaagatgacatggcttaaggaaatcaggaacattctgttgaaacagcaggaactcctgactgtcaagaagaggaagcaacaggaccagctgactgaacgcgataaattccaaatcagcctgcagcaaaatgacgagaagcagcagggggcattcatttccactgaagaaaccgagttagaacacacatctaccgtagtagaagtttgtgaggcgattgctagcgtgcaggctgaagctaacacagtgtggaccgaggccagccagtcggccgaaatcagtgaggagccagccgaatggtcatctaattatttttaccccacttatgacgagaatgaagaggagaaccggccacttatgagacccgtatcggagatggctctgctgtattag

SEQ ID NO: 277975 - DNA, 3213 bp, Artificial Sequence
  derived and/or modified sequence
atgccccaggccgccgccagcgccccctggaccagcgtgagctgcggcagaatccccggcctgccccagaaccccgacggctgcaccttcatgcccatcgcccaggccatccccctgcaggtggacatggccatggccctgcagagagtgagaatcgccgagaagtacggcaagaactacctgtgcctgctgcaggccgtgttcgtggccgagaccgacctgctgctgagaatcaaggacatcagccacttcctgatgcaggacatcgccttcctgagcggcggcagaggcaaggacaacgcctggatcatcaccttccccgagaactgcaacttcagatgcatccccgaggaggtgatcgccaaggtgctgacctacctgaccagcatcgccagacagaacggcagcgacagcagattcaccatcatcctggacagaagactggacacctggagcagcctgaagatcagcctgcagaagatcagcgccagcttccccggcaacctgcacctggtgctggtgctgagacccaccagcttcctgcagagaaccttcaccgacatcggcttctggttcagccaggaggacttcatgctgaagctgcccgtggtgatgctgagcagcgtgagcgacctgctgacctacatcgacgacaagcagctgacccccgagctgggcggcaccctgcagtactgccacagcgagtggatcatcttcagaaacgccatcgagaacttcgccctgaccgtgaaggagatggcccagatgctgcagagcttcggcaccgagctggccgagaccgagctgcccgacgacatccccagcatcgaggagatcctggccatcagagccgagagataccacctgctgaagaacgacatcaccgccgtgaccaaggagggcaagatcctgctgaccaacctggaggtgcccgacaccgagggcgccgtgagcagcagactggagtgccacagacagatcagcggcgactggcagaccatcaacaagctgctgacccaggtgcacgacatggagaccgccttcgacggcttctgggagaagcaccagctgaagatggagcagtacctgcagctgtggaagttcgagcaggacttccagcagctggtgaccgaggtggagttcctgctgaaccagcaggccgagctggccgacgtgaccggcaccatcgcccaggtgaagcagaagatcaagaagctggagaacctggacgagaacagccaggagctgctgagcaaggcccagttcgtgatcctgcacggccacaagctggccgccaaccaccactacgccctggacctgatctgccagagatgcaacgagctgagatacctgagcgacatcctggtgaacgagatcaaggccaagagaatccagctgagcagaaccttcaagatgcacaagctgctgcagcaggccagacagtgctgcgacgagggcgagtgcctgctggccaaccaggagatcgacaagttccagagcaaggaggacgcccagaaggccctgcaggacatcgagaacttcctggagatggccctgcccttcatcaactacgagcccgagaccctgcagtacgagttcgacgtgatcctgagccccgagctgaaggtgcagatgaagaccatccagctgaagctggagaacatcagaagcatcttcgagaaccagcaggccggcttcagaaacctggccgacaagcacgtgagacccatccagttcgtggtgcccacccccgagaacctggtgaccagcggcacccccttcttcagcagcaagcagggcaagaagacctggagacagaaccagagcaacctgaagatcgaggtggtgcccgactgccaggagaagagaagcagcggccccagcagcagcctggacaacggcaacagcctggacgtgctgaagaaccacgtgctgaacgagctgatccagaccgagagagtgtacgtgagagagctgtacaccgtgctgctgggctacagagccgagatggacaaccccgagatgttcgacctgatgccccccctgctgagaaacaagaaggacatcctgttcggcaacatggccgagatctacgagttccacaacgacatcttcctgagcagcctggagaactgcgcccacgcccccgagagagtgggcccctgcttcctggagagaaaggacgacttccagatgtacgccaagtactgccagaacaagcccagaagcgagaccatctggagaaagtacagcgagtgcgccttcttccaggagtgccagagaaagctgaagcacagactgagactggacagctacctgctgaagcccgtgcagagaatcaccaagtaccagctgctgctgaaggagctgctgaagtacagcaaggactgcgagggcagcgccctgctgaagaaggccctggacgccatgctggacctgctgaagagcgtgaacgacagcatgcaccagatcgccatcaacggctacatcggcaacctgaacgagctgggcaagatgatcatgcagggcggcttcagcgtgtggatcggccacaagaagggcgccaccaagatgaaggacctggccagattcaagcccatgcagagacacctgttcctgtacgagaaggccatcgtgttctgcaagagaagagtggagagcggcgagggcagcgacagataccccagctacagcttcaagcactgctggaagatggacgaggtgggcatcaccgagtacgtgaagggcgacaacagaaagttcgagatctggtacggcgagaaggaggaggtgtacatcgtgcaggccagcaacgtggacgtgaagatgacctggctgaaggagatcagaaacatcctgctgaagcagcaggagctgctgaccgtgaagaagagaaagcagcaggaccagctgaccgagagagacaagttccagatcagcctgcagcagaacgacgagaagcagcagggcgccttcatcagcaccgaggagaccgagctggagcacaccagcaccgtggtggaggtgtgcgaggccatcgccagcgtgcaggccgaggccaacaccgtgtggaccgaggccagccagagcgccgagatcagcgaggagcccgccgagtggagcagcaactacttctaccccacctacgacgagaacgaggaggagaacagacccctgatgagacccgtgagcgagatggccctgctgtactag

SEQ ID NO: 277976 - protein, 1581 aa, Artificial Sequence
  derived and/or modified sequence
MISTAPLYSGVHNWTSSDRIRMCGINEERRAPLSDEESTTGDCQHFGSQEFCVSSSFSKVELTAVGSGSNARGADPDGSATEKLGHKSEDKPDDPQPKMDYAGNVAEAEGFLVPLSSPGDGLKLPASDSAEASNSRADCSWTPLNTQMSKQVDCSPAGVKALDSRQGVGEKNTFILATLGTGVPVEGTLPLVTTNFSPLPAPICPPAPGSASVPHSVPDAFQVPLSVPAPVPHSGLVPVQVATSVPAPSPPLAPVPALAPAPPSVPTLISDSNPLSVSASVLVPVPASAPPSGPVPLSAPAPAPLSVPVSAPPLALIQAPVPPSAPTLVLAPVPTPVLAPMPASTPPAAPAPPSVPMPTPTPSSGPPSTPTLIPAFAPTPVPAPTPAPIFTPAPTPMPAATPAAIPTSAPIPASFSLSRVCFPAAQAPAMQKVPLSFQPGTVLTPSQPLVYIPPPSCGQPLSVATLPTTLGVSSTLTLPVLPSYLQDRCLPGVLASPELRSYPYAFSVARPLTSDSKLVSLEVNRLPCTSPSGSTTTQPAPDGVPGPLADTSLVTASAKVLPTPQPLLPAPSGSSAPPHPAKMPSGTEQQTEGTSVTFSPLKSPPQLEREMASPPECSEMPLDLSSKSNRQKLPLPNQRKTPPMPVLTPVHTSSKALLSTVLSRSQRTTQAAGGNVTSCLGSTSSPFVIFPEIVRNGDPSTWVKNSTALISTIPGTYVGVANPVPASLLLNKDPNLGLNRDPRHLPKQEPISIIDQGEPKGTGATCGKKGSQAGAEGQPSTVKRYTPARIAPGLPGCQTKELSLWKPTGPANIYPRCSVNGKPTSTQVLPVGWSPYHQASLLSIGISSAGQLTPSQGAPIRPTSVVSEFSGVPSLSSSEAVHGLPEGQPRPGGSFVPEQDPVTKNKTCRIAAKPYEEQVNPVLLTLSPQTGTLALSVQPSGGDIRMNQGPEESESHLCSDSTPKMEGPQGACGLKLAGDTKPKNQVLATYMSHELVLATPQNLPKMPELPLLPHDSHPKELILDVVPSSRRGSSTERPQLGSQVDLGRVKMEKVDGDVVFNLATCFRADGLPVAPQRGQAEVRAKAGQARVKQESVGVFACKNKWQPDDVTESLPPKKMKCGKEKDSEEQQLQPQAKAVVRSSHRPKCRKLPSDPQESTKKSPRGASDSGKEHNGVRGKHKHRKPTKPESQSPGKRADSHEEGSLEKKAKSSFRDFIPVVLSTRTRSQSDLKARKQKTSSSQSLEHRLRNRNLLLPNKVQGISDSPNGFLPNNLEEPACLENSEKPSGKRKCKTKHMATVSEEAKDVVLYCLQKDSEDVNHRDNAGYTALHEACSRGWTDILNILLEHGANVNCSAQDGTRPVHDAVVNDNLETIWLLLSYGADPTLATYSGQTAMKLASSDTMKRFLSDHLSDLQGRAEGDPGVSWDFYSSSVLEEKDGFACDLLHNPPGSSDQEGDDPMEEDDFMFELSDKPLLPCYNLQVSVSRGPCNWFLFSDVLKRLKLSSRIFQARFPHFEITTMPKAEFYRQVASSQLLTPAERPGGLDDRSPPGSSETVELVRYEPDLLRLLGSEVEFQSCNS

SEQ ID NO: 277977 - protein, 741 aa, Artificial Sequence
  derived and/or modified sequence
  misc_feature (1)..(1): Xaa can be any naturally occurring amino acid
XPLLPAPSGSSAPPHPAKMPSGTEQQTEGTSVTFSPLKSPPQLEREMASPPECSEMPLDLSSKSNRQKLPLPNQRKTPPMPVLTPVHTSSKALLSTVLSRSQRTTQAAGGNVTSCLGSTSSPFVIFPEIVRNGDPSTWVKNSTALISTIPGTYVGVANPVPASLLLNKDPNLGLNRDPRHLPKQEPISIIDQGEPKGTGATCGKKGSQAGAEGQPSTVKRYTPARIAPGLPGCQTKELSLWKPTGPANIYPRCSVNGKPTSTQVLPVGWSPYHQASLLSIGISSAGQLTPSQGAPIRPTSVVSEFSGVPSLSSSEAVHGLPEGQPRPGGSFVPEQDPVTKNKTCRIAAKPYEEQVNPVLLTLSPQTGTLALSVQPSGGDIRMNQGPEESESHLCSDSTPKMEGPQGACGLKLAGDTKPKNQVLATYMSHELVLATPQNLPKMPELPLLPHDSHPKELILDVVPSSRRGSSTERPQLGSQVDLGRVKMEKVDGDVVFNLATCFRADGLPVAPQRGQAEVRAKAGQARVKQESVGVFACKNKWQPDDVTESLPPKKMKCGKEKDSEEQQLQPQAKAVVRSSHRPKCRKLPSDPQESTKKSPRGASDSGKEHNGVRGKHKHRKPTKPESQSPGKRADSHEEGSLEKKAKSSFRDFIPVVLSTRTRSQSDLKARKQKTSSSQSLEHRLRNRNLLLPNKVQGISDSPNGFLPNNLEEPACLENSEKPSGKRKCKTKHMATVSEEAK

SEQ ID NO: 277978 - DNA, 219 bp, Artificial Sequence
  derived and/or modified sequence
atgagctatcagcagcagcagtgcaaacagccatgtcagcctccgccggtgtgcccaacgccaaaatgcccagaaccatgcccacctccaaagtgtcctgagccctgtcctagcccgaaatgtccccaaccttgtccccctcagcagtgccaacagaagtatccacctgtgacaccctcacccccctgccagcctaagtgcccgcccaagtccaagtag

SEQ ID NO: 277979 - DNA, 522 bp, Artificial Sequence
  derived and/or modified sequence
atgcctgctatgccgagcccgctgtgcgcccctgcacgggtctccccttctcccctcactgccgcacccccattctgcagcctatcccccatcctctgggtcagcttgatccttcttctaacaagtatttccaagtgctgtgagtcgatctttaaattcatccaaaatccatttaccagccactacttcccgtgctcacatcccagccagggcaaacggaggctccaccctggcatccttcattcttttcccactgtgtttcccacagcctccctggtcccccaccttagcatactgttctcagctcagcaacccgagcggtcatttcagcgcatgtctccaacaatgtctcatttcagcaaactgagcagcccctgccatagcgaacagaggtcaaccccattcccacacccctccggcctacccgcattggctacacccttgacctccctccagttcctctgtgttcagccgttctggttattgccccctagccgcaacacagacaatttcctgccatag

SEQ ID NO: 277980 - DNA, 4746 bp, Artificial Sequence
  derived and/or modified sequence
atgatatccaccgcccccctttactcaggcgtgcacaactggacatcttcagatagaattcgcatgtgtggtattaacgaggagcgccgggctcccctttccgacgaggagtcgacaactggagactgccagcatttcggcagtcaggaattctgcgtatcctcaagtttttctaaagtcgagttgactgccgtgggttccggctccaacgctcgaggagccgatcccgatgggtcagctaccgagaaactcggtcacaagagcgaggacaaaccggacgacccccagccaaagatggattacgcagggaatgtggccgaagcagagggcttcctggtgccactctcatcacctggcgatgggctgaaattacctgctagcgattcggccgaggctagcaacagcagagctgactgctcctggactcccctcaacactcagatgagcaagcaggttgattgttcaccggctggagtgaaagccctggactcaagacaaggtgtgggggagaagaatacgttcatcttggccactctcggaacaggggtcccggttgaagggacgttaccactggtcaccactaattttagccctctccctgcccctatttgccctcccgctcctggttccgcttccgtcccccacagcgtgccagacgcatttcaagtgcccctgagtgtacccgcacctgtcccacatagcgggcttgtgcctgtccaagtagccacatctgtgcccgctccttctccgcccctggcaccggtgcccgctttggccccagctccgcccagcgtacccactctgatctctgatagcaatcccctgagcgtctccgcaagtgtgctggttccagtgcctgcgtccgcccctcccagcggccctgtcccgctttccgcacctgcccctgcccccctttccgtgcccgtgagtgcaccacccctcgcactgatccaggctcctgtgcccccaagtgctccaaccctggtccttgcccccgtcccgactcctgtcttggcgccgatgcctgcctcaacccctcccgccgcgccagcccctccctccgtccctatgcctacccccacgccttcatcaggcccacccagtactcctacactcatccccgcttttgcgccgacacccgttccagcacctactccggcacctatctttacccccgctccgacgcctatgcctgctgccacaccagccgcaatccctaccagtgcgcccatcccagcctcattctcactttcaagagtgtgcttccctgctgcccaggcccctgctatgcagaaagtcccactgagtttccaacctggtactgttcttacaccctcccagcctcttgtatatatccctccgccatcgtgcggacagcccctgtctgtcgctacattgcctactaccttgggtgtgtcatccactttgaccctgccagtgctgccgtcatatctgcaggatcggtgtctcccaggggtattggccagcccagaactgcgaagttatccctacgccttctctgtagcacgaccactcaccagtgattctaaattagtgtctttggaggtgaatcgactcccttgtacatccccttctgggtcaacgactacacaacctgcgccagacggtgtgccgggccccttggccgacacatccctggttaccgcctccgcgaaggtcctgccaactccccaaccactgcttcccgccccatccggaagctctgccccgcctcacccagccaagatgcctagcgggaccgagcagcagactgagggcacttcagtaaccttctcaccactgaaaagtccccctcaactcgagcgtgaaatggcttctcccccagagtgttccgagatgcctctcgatctgagcagcaaatccaaccgccagaagttgccactccccaaccagcgcaaaaccccacctatgcctgtcttaacccccgtacatacttcttctaaggctttgttatctacagtgctgtctaggtcccagcgtaccactcaggctgcagggggcaacgtaacttcgtgtctggggtctacctcatctccttttgtgattttccctgaaatcgtgcgcaatggcgatccttcgacctgggtgaaaaattcgaccgcgttaatttccacaatccccgggacctatgttggcgtggctaaccctgttccggcctccctgcttctgaataaggaccccaatcttggcttaaaccgtgatccacgccatctgcccaaacaggagccaatcagtatcattgatcagggggagcccaaaggcactggggccacgtgcggaaaaaaggggagtcaggcaggcgctgaaggacagccatctaccgttaagagatacacaccagcacggattgcacctgggctcccgggttgccagactaaagagctgtctctgtggaaaccaaccggccctgcgaatatttaccctcgatgtagcgtgaacggaaagccaacatccacccaggttttgcctgtgggatggagcccatatcaccaggcatctctgctgagtatcggcattagcagcgccggacagctcactccttcccagggggctccaatccgacctacctcagtagtgagtgaatttagcggtgtgccatcattgagctcaagcgaggctgtacacgggctacctgaagggcagccccgaccaggggggagcttcgtgcctgagcaggaccccgttactaagaacaagacttgccgaatagccgcaaagccctatgaggagcaagtgaatcccgtgctgctgacactgagccctcaaacaggcactctggccctgtctgtgcagcccagtgggggtgatattcgaatgaaccaaggccctgaggaatctgaatcacatctctgcagtgatagcactccgaagatggaggggccgcaaggtgcttgtgggctcaaactggctggtgacactaagcccaagaaccaagtgcttgccacctacatgtcacacgagttggtgctggccacacctcagaaccttccaaaaatgccggaattgcccttacttccacatgacagccatccaaaagaactcattctagacgttgtgccaagctcaagacggggtagtagcaccgagcgcccccagctcggctctcaggtggacctaggaagagtgaagatggagaaagttgacggagacgttgtgttcaacctcgctacatgcttcagggccgacggactccctgtcgcccctcagcgtggacaagcagaggtaagggcgaaggccggccaagcccgggtgaaacaggagtctgtcggtgtgttcgcgtgtaaaaataagtggcagccagacgacgtgaccgagtcgttgccccctaagaagatgaagtgcggtaaggaaaaagatagcgaggaacagcagctgcagcctcaggcgaaggccgtggttcgctcgtcccataggcctaagtgcagaaagctgccatccgatcctcaggaaagcaccaagaagtcgcctcgaggagcgtcagacagtggcaaagagcacaacggggtgcgcgggaagcacaagcaccgaaagcccacaaagcccgagtctcaatcccctgggaagcgggctgactctcacgaggaaggaagtctggaaaaaaaagctaaaagctcattcagagactttattcctgtcgtactgtcaacaagaacgaggagccagtccgatttgaaggcaagaaaacagaagacctcaagttcccagtccctcgagcaccgtctgagaaataggaacctgctgctacctaataaagtccaaggaatatccgattctccaaacgggttcctgccaaataacctggaagagcccgcgtgtctagaaaactctgaaaaaccctcaggaaagcgcaagtgtaagacaaagcacatggccactgtctctgaagaagccaaggacgttgtgctttattgtctgcagaaagatagtgaagatgtgaatcaccgcgataatgctggctacactgccctgcacgaggcctgtagcagaggatggactgacatcttgaatatcctgctggagcatggcgctaatgtcaattgtagcgcccaggatggaaccagacctgtacatgacgccgtcgtgaatgataatctggagactatttggttgctcctctcttacggggccgaccccaccctggctacttactctggtcagaccgctatgaagctcgcaagcagtgatactatgaaacgctttctgtccgaccacctgtccgacctgcaggggcgtgctgaaggtgacccaggcgtcagttgggatttctattcatcctcggtactcgaggaaaaggatggattcgcctgcgatctgttacataacccacctggcagctcagatcaggagggggatgacccaatggaagaggatgactttatgttcgaactcagtgacaaaccattgttaccatgttataacctgcaggtctccgtgagcagagggccatgcaactggttcctgttctcggacgtccttaaaaggctcaagctgtccagcagaatctttcaggctcggtttccacactttgagattacgacaatgccaaaagctgagttctatcgtcaggttgcgtctagccagctcttgactccggcggaaaggcccgggggcctggacgataggtctcctccaggatctagcgagactgtggagctggtgcgctatgaacctgacctcctgcggctcctgggaagcgaagtagagttccaatcttgcaacagctag

SEQ ID NO: 277981 - DNA, 2226 bp, Artificial Sequence
  derived and/or modified sequence
taacccttactgccagccccaagtggttcatctgctccacctcatcctgccaaaatgcccagtggcactgaacagcaaactgagggcacctctgtgactttctcgccgctcaaaagtcctccccaactggagcgtgagatggcgtctccaccggagtgctcagagatgccacttgatctgtctagcaagtctaacaggcaaaaactccccctcccaaaccagcgtaaaacccctcctatgcccgtactaacacccgttcatacttcttctaaggcactcttgtccactgttctctccagatcccagcgcacaacccaggcagcaggaggcaacgtgaccagttgtctaggatccacttcaagccccttcgtcatatttccagagattgtcaggaacggcgaccccagcacttgggtgaagaactcaacagccctcatatcgacaattcccggcacgtacgtgggcgtcgcgaacccagtcccagcttccttgctgttgaataaagacccaaatctgggcctgaatagggatccgcggcatctccccaagcaagaaccaatcagtatcatcgatcagggggaacctaaaggaacaggcgcaacctgcggtaagaaagggagtcaggcaggcgctgaagggcagccaagcaccgtcaagcgatatacccctgcccgaattgcaccaggtctaccggggtgtcaaactaaggagttgagtttatggaagccaacggggccagctaacatttatccaaggtgttctgtgaacggtaaacccaccagcactcaggtcctgccagtgggctggagcccttaccatcaagcttccctcctcagcatcggtatcagctcagctggacagctgactccttctcagggggcccccatcaggcctacctctgtggttagtgaattcagcggcgtgcctagcctctcaagctctgaagcggtgcacgggctgccagagggccagcctcggccgggcggcagtttcgttccagaacaggaccctgttaccaaaaataaaacctgccgaatcgctgccaagccatatgaggagcaagtgaaccccgtgttactcaccctcagcccccagacaggaactcttgctctctcggtacagccttcaggaggggatatcagaatgaatcaaggccctgaggaaagtgagagccacttatgcagtgattccacccctaagatggaagggccccagggggcttgcggcctgaagcttgctggagatactaagcccaagaatcaggtcctcgcaacgtatatgtcgcacgagcttgtgctggcaaccccccagaatcttcccaagatgccagaactaccactgttacctcatgactctcatcccaaggaactgatcctggacgtggtccctagttcaaggcgcggctcatccaccgaaagaccccagctgggctctcaagtcgacctcggtcgtgtgaaaatggaaaaagtggacggggatgttgtttttaacttagcaacttgctttagagcagacggcctgcctgttgcaccccagagggggcaggcggaggtccgcgccaaggccggccaggctagagttaaacaggagagcgtgggagttttcgcttgcaagaataagtggcagcccgatgacgtgactgagtctctacctcccaagaagatgaaatgtggcaaagaaaaggacagtgaagagcagcagttgcagcctcaggctaaggcagtcgtccgctcctcccatcgcccgaagtgcagaaagctgccctctgatccacaggagtccacgaagaaatcaccccgcggcgcaagtgactcagggaaagagcacaatggagtgcgtgggaagcacaagcatcgtaaacccactaagccagaatcacagagtcctgggaaaagggcagactcgcacgaagaggggtccctggaaaagaaagccaagagttcctttcgggattttatcccagttgttctttctacccgcacccgctcacagtctgaccttaaggctcgtaagcagaagacatcaagttcgcagtctctcgagcatcgactcaggaataggaatcttctgttgccaaacaaggtgcaggggatttccgattcccccaatgggttccttccgaataatctcgaggaaccggcctgtctggaaaactccgagaaaccctctgggaaacggaaatgcaagacgaaacatatggcaaccgtgtctgaggaagccaaatag

SEQ ID NO: 277982 - DNA, 4746 bp, Artificial Sequence
  derived and/or modified sequence
atgatcagcacagcccccctgtacagcggcgtgcacaactggaccagcagtgaccgcatccgcatgtgtggcatcaatgaggagcggcgggcccccctgagtgatgaggagagcaccaccggggactgccagcacttcggcagccaggagttctgtgtgagcagcagcttcagcaaggtggagctgacagctgtgggcagcggcagcaatgcccggggagctgaccctgatggcagcgccacagagaagctgggccacaagtctgaggacaagccagatgacccccagcccaagatggactatgctggaaatgtggccgaggccgagggcttcctggtgcccctgagcagccctggagatggcctgaagctgcctgccagtgacagcgctgaggccagcaacagcagagctgactgctcctggacccccctgaacacccagatgagcaagcaggtggactgcagccctgctggggtgaaggccctggacagccggcagggcgtgggggagaagaacaccttcatcctggccaccctgggcactggagtgcctgtggagggcaccctgcccctggtgaccaccaacttcagccccctgcctgcccccatctgccccccagcccctggcagcgcctctgtgccccacagcgtgcctgatgccttccaggtgcccctgtctgtgcctgcccctgtgccccacagcggcctggtgcctgtgcaggtggccacctctgtgcctgcccccagcccccccctggcccctgtgcctgccctggccccagccccacccagcgtgcccaccctcatcagtgacagcaaccccctgtctgtgtctgcctctgtgctggtgcctgtgcctgccagcgccccacccagcggccctgtgcccctgagcgccccagccccagcccccctgtctgtgcctgtgtctgccccacccctggccctgatccaggcccctgtgccccccagcgcccccaccctggtgctggcccctgtgcccacccctgtgctggcccccatgcctgccagcaccccacctgctgccccagccccacccagcgtgcccatgcccacccccacccccagcagcggcccccccagcacccccaccctcatcccagcctttgcccccacccctgtgcctgcccccaccccagcccccatcttcaccccagcccccacccccatgcctgctgccaccccagctgccatccccaccagcgcccccatcccagccagcttcagcctgagccgggtgtgcttccctgctgcccaggccccagccatgcagaaggtgcccctgtccttccagcccggcaccgtgctgacccccagccagcccctggtgtacatccccccacccagctgtggccagcccctgtctgtggccaccctgcccaccaccctgggcgtgagcagcaccctgaccctgcctgtgctgcccagctacctgcaggaccgctgcctgcccggggtgctggccagccctgagctgcggagctacccctatgccttctctgtggcccggcccctgaccagtgacagcaagctggtgtccctggaggtgaaccggctgccctgcaccagccccagcggcagcaccaccacccagcctgccccagatggagtgcccggccccctggccgacaccagcctggtgacagccagcgccaaggtgctgcccaccccccagcccctgctgcctgcccccagcggcagcagcgccccaccccacccagccaagatgcccagcggcacagagcagcagacagagggcacctctgtgaccttcagccccctgaagagccccccccagctggagcgggagatggccagccccccagagtgcagcgagatgcccctggacctgagcagcaagagcaaccggcagaagctgcccctgcccaaccagaggaagaccccacccatgcctgtgctgacccctgtgcacaccagcagcaaggccctgctgagcacagtgctgagccgcagccagaggaccacccaggccgccggcggcaatgtgaccagctgcctgggcagcaccagcagcccctttgtgatcttccctgagatcgtgagaaatggagaccccagcacctgggtgaagaacagcacagccctgatcagcaccatccctggcacctacgtgggcgtggccaaccctgtgcctgccagcctgctgctgaacaaggaccccaacctgggcctgaacagagaccccaggcacctgcccaagcaggagcccatcagcatcatcgaccagggcgagcccaagggcaccggggccacctgtgggaagaagggcagccaggccggggctgagggccagcccagcacagtgaagcgctacaccccagcccgcatcgcccctggcctgcccggctgccagaccaaggagctgagcctgtggaagcccaccggccctgccaacatctacccccgctgcagcgtgaatggcaagcccaccagcacccaggtgctgcctgtgggctggagcccctaccaccaggccagcctgctgagcatcggcatcagcagcgctggccagctgacccccagccagggcgcccccatccggcccacctctgtggtgtctgagttcagcggcgtgcccagcctgagcagcagcgaggccgtgcacggcctgcctgagggccagcccaggcctgggggcagctttgtgcctgagcaggaccctgtgaccaagaacaagacctgcagaattgctgccaagccctatgaggagcaggtgaaccctgtgctgctgaccctgagcccccagacaggcaccctggccctgtctgtgcagcccagcggcggggacatccgcatgaaccagggccctgaggagagcgagagccacctgtgcagcgacagcacccccaagatggagggcccccagggcgcctgtggcctgaagctggccggggacaccaagcccaagaaccaggtgctggccacctacatgagccatgagctggtgctggccaccccccagaacctgcccaagatgcctgagctgcccctgctgccccatgacagccaccccaaggagctgatcctggatgtggtgcccagcagccggcggggcagcagcacagagcggccccagctgggcagccaggtggacctgggccgggtgaagatggagaaggtggatggagatgtggtgttcaacctggccacctgcttccgggcagatggcctgcctgtggccccccagaggggccaggccgaggtgcgggccaaggccggccaggcccgggtgaagcaggagagcgtgggcgtgtttgcctgcaagaacaagtggcagccagatgatgtgacagagagcctgccccccaagaagatgaagtgtgggaaggagaaggacagcgaggagcagcagctgcagccccaggccaaggctgtggtgcgcagcagccaccggcccaagtgcaggaagctgcccagcgacccccaggagagcaccaagaagagccccaggggggccagtgacagcggcaaggagcacaacggggtgcggggcaagcacaagcacaggaagcccaccaagccagagagccagagccctgggaagagagctgacagccatgaggagggcagcctggagaagaaggccaagagcagcttccgggacttcatccctgtggtgctgagcaccaggaccaggagccagagcgacctgaaggccaggaagcagaagaccagcagcagccagagcctggagcaccggctgaggaacagaaacctgctgctgcccaacaaggtgcagggcatcagtgacagccccaacggcttcctgcccaacaacctggaggagcccgcctgcctggagaacagcgagaagcccagcggcaagaggaagtgcaagaccaagcacatggccaccgtgtctgaggaggccaaggatgtggtgctgtactgcctgcagaaggacagtgaagatgtgaaccaccgggacaatgccggctacacagccctgcacgaggcctgcagccggggctggacagacatcctgaacatcctgctggagcacggggccaacgtgaactgcagcgcccaggacggcaccaggcctgtgcatgatgctgtggtgaatgacaacctggagaccatctggctgctgctgtcctatggagctgaccccaccctggccacctacagcggccagacagccatgaagctggccagcagtgacaccatgaagcgcttcctgagtgaccacctgagtgacctgcagggccgggcagagggggaccccggggtgtcctgggacttctacagcagctctgtgctggaggagaaggatggctttgcctgtgacctgctgcacaaccccccaggcagcagtgaccaggagggagatgaccccatggaggaggatgacttcatgtttgagctgagtgacaagcccctgctgccctgctacaacctgcaggtgtctgtgtcccggggcccctgcaactggttcctgttcagtgatgtgctgaagaggctgaagctgagcagccgcatcttccaggcccgcttcccccactttgagatcaccaccatgcccaaggccgagttctaccggcaggtggccagcagccagctgctgaccccagctgagaggcctgggggcctggatgacaggagccccccaggcagcagcgagaccgtggagctggtgcgctatgagccagacctgctgcggctgctgggcagcgaggtggagttccagagctgcaacagctag

SEQ ID NO: 277983 - DNA, 2226 bp, Artificial Sequence
  derived and/or modified sequence
tgacccctgctgcctgcccccagcggcagcagcgccccaccccacccagccaagatgcccagcggcacagagcagcagacagagggcacctctgtgaccttcagccccctgaagagccccccccagctggagcgggagatggccagccccccagagtgcagcgagatgcccctggacctgagcagcaagagcaaccggcagaagctgcccctgcccaaccagaggaagaccccacccatgcctgtgctgacccctgtgcacaccagcagcaaggccctgctgagcacagtgctgagccgcagccagaggaccacccaggccgccggcggcaatgtgaccagctgcctgggcagcaccagcagcccctttgtgatcttccctgagatcgtgagaaatggagaccccagcacctgggtgaagaacagcacagccctgatcagcaccatccctggcacctacgtgggcgtggccaaccctgtgcctgccagcctgctgctgaacaaggaccccaacctgggcctgaacagagaccccaggcacctgcccaagcaggagcccatcagcatcatcgaccagggcgagcccaagggcaccggggccacctgtgggaagaagggcagccaggccggggctgagggccagcccagcacagtgaagcgctacaccccagcccgcatcgcccctggcctgcccggctgccagaccaaggagctgagcctgtggaagcccaccggccctgccaacatctacccccgctgcagcgtgaatggcaagcccaccagcacccaggtgctgcctgtgggctggagcccctaccaccaggccagcctgctgagcatcggcatcagcagcgctggccagctgacccccagccagggcgcccccatccggcccacctctgtggtgtctgagttcagcggcgtgcccagcctgagcagcagcgaggccgtgcacggcctgcctgagggccagcccaggcctgggggcagctttgtgcctgagcaggaccctgtgaccaagaacaagacctgcagaattgctgccaagccctatgaggagcaggtgaaccctgtgctgctgaccctgagcccccagacaggcaccctggccctgtctgtgcagcccagcggcggggacatccgcatgaaccagggccctgaggagagcgagagccacctgtgcagcgacagcacccccaagatggagggcccccagggcgcctgtggcctgaagctggccggggacaccaagcccaagaaccaggtgctggccacctacatgagccatgagctggtgctggccaccccccagaacctgcccaagatgcctgagctgcccctgctgccccatgacagccaccccaaggagctgatcctggatgtggtgcccagcagccggcggggcagcagcacagagcggccccagctgggcagccaggtggacctgggccgggtgaagatggagaaggtggatggagatgtggtgttcaacctggccacctgcttccgggcagatggcctgcctgtggccccccagaggggccaggccgaggtgcgggccaaggccggccaggcccgggtgaagcaggagagcgtgggcgtgtttgcctgcaagaacaagtggcagccagatgatgtgacagagagcctgccccccaagaagatgaagtgtgggaaggagaaggacagcgaggagcagcagctgcagccccaggccaaggctgtggtgcgcagcagccaccggcccaagtgcaggaagctgcccagcgacccccaggagagcaccaagaagagccccaggggggccagtgacagcggcaaggagcacaacggggtgcggggcaagcacaagcacaggaagcccaccaagccagagagccagagccctgggaagagagctgacagccatgaggagggcagcctggagaagaaggccaagagcagcttccgggacttcatccctgtggtgctgagcaccaggaccaggagccagagcgacctgaaggccaggaagcagaagaccagcagcagccagagcctggagcaccggctgaggaacagaaacctgctgctgcccaacaaggtgcagggcatcagtgacagccccaacggcttcctgcccaacaacctggaggagcccgcctgcctggagaacagcgagaagcccagcggcaagaggaagtgcaagaccaagcacatggccaccgtgtctgaggaggccaagtag

SEQ ID NO: 277984 - DNA, 4746 bp, Artificial Sequence
  derived and/or modified sequence
atgatcagcaccgcccccctgtacagcggcgtgcacaactggacctcttctgatagaatacgcatgtgcggaatcaacgaggaacggcgggcccccctttccgacgaagagtccacaaccggcgattgtcagcatttcggatctcaggaattctgtgtctcctcctcgttttctaaggtagaattgaccgcagttgggagcgggagtaacgcccgaggcgccgaccccgatgggagcgctaccgagaagctggggcacaagtccgaggataaaccagacgacccccagccaaaaatggactatgccggcaatgttgcggaagcagaagggtttctggtccctctttctagtccaggcgacggactcaaattgcctgcctcagacagtgctgaagcttcaaatagccgggccgattgtagttggacacccctaaacactcaaatgagcaaacaggtggattgcagtcccgctggtgtgaaggcactcgacagcagacagggcgtgggcgaaaaaaatacctttatactagcaacactcgggaccggggtacccgttgagggtactctgcctcttgttacaactaatttttctcctttgcccgctcccatttgtccaccggccccgggatctgccagcgtgcctcactccgttcccgatgcttttcaggtgccactgtctgtcccggcccccgtgccgcacagtgggcttgtccctgttcaggtggccaccagcgtgccagctccttccccacccctggctcccgttccggccctcgcccctgcccccccctctgtgccaaccttaatatcagatagtaaccccctgtcggtttcagcatctgtcctggtaccagtcccggcatccgctcctccctccgggcccgtaccactgtcggcaccggcgcctgcccccctcagtgtcccagtctctgctccgcctctggcccttatccaggcccccgtgcccccgtctgcccccacactggtgctggccccagtgccaacgcccgttttggcaccaatgccggcctccacacctcccgctgctccagccccacctagcgtgcctatgcccacccctacaccttctagcgggccacccagtacaccaaccctaattccagccttcgctccaacacctgtccctgccccgactccggcaccaatttttaccccagcccctacccccatgcctgctgctactccagcagccatccctacgagcgctccgattccagcatccttttccctgtcccgggtgtgttttcctgccgcacaggctcccgccatgcaaaaagtgccgctgtcttttcagccaggaaccgtgctgaccccctctcagcccctggtgtacatacctccccctagctgcggacagccactgagcgtggccacgctccccactacactcggggtttcttcaacacttaccctgcctgttttgccctcgtacctacaggaccgctgcctacccggagttctcgctagtcccgagctgcgttcttatccctatgccttctcggtggcccgccccctcaccagtgacagtaagcttgtgtcactcgaggtgaaccgactgccctgcaccagtcccagcgggtccacaaccacccagcctgccccagatggtgttcccggccccctggctgatacgagtctggtgacggcaagcgctaaagtgctgccaacaccccagcctcttttgccagcccctagtggaagttcagctcccccacatcccgccaagatgcctagcggtacggagcagcagaccgaaggaacctccgtaaccttctcacctttgaagagccctccccagctggaaagagagatggctagcccccccgagtgttctgagatgcccttggatctgtcttccaagagcaaccggcagaaactccctctgcccaatcagcggaaaacccccccaatgcctgttctcacccccgtccataccagcagcaaggccttactgtctacagtcttatcccggagtcagcgaactacccaagcagccggcgggaatgtgaccagttgcctgggctctactagcagtccctttgtgatctttcctgaaattgtgaggaatggcgatccttctacgtgggtaaaaaactccaccgcgctgatctctaccattcctggcacctatgtgggggttgccaatcccgtccctgcgtcattgcttctgaacaaggatcccaacctcggtctgaacagagacccacgccacttaccaaagcaggagccaattagtattattgaccagggtgagcccaagggcaccggtgcgacttgcggcaagaaaggcagtcaggcaggtgcagaagggcaacctagcactgtcaagaggtatacccccgctcgaatcgcccccggactgcctggctgccaaacaaaagagctgagcctatggaaaccaaccggccccgccaatatataccccaggtgcagcgtgaacggtaagcccaccagtactcaagtcctgcccgtcgggtggtcaccctatcatcaggcctcactgctaagcatcggaatttccagcgccgggcaacttacaccctcacagggcgcccccatcaggcctacatccgttgtatccgagttctcgggagtgccgagtttaagctccagcgaggccgtccatggacttcccgagggacaacctcgaccgggtgggagcttcgtacccgagcaggaccctgtgactaaaaacaagacttgcagaatagccgcgaaaccctacgaggagcaagtcaatccggtactgctcactctttcacctcagactggaaccctggccttgtccgttcagccatcagggggagatattaggatgaatcagggtcccgaagagtctgagagtcacttatgcagcgattccacaccaaaaatggaagggccacagggggcctgtggactcaaactcgctggcgatactaagccaaagaaccaagtgctggccacctatatgagtcacgagttggtgctcgcgactcctcagaacctgcctaagatgcctgaactaccactccttccccacgactcccacccaaaagaactgatcctcgatgtagtgccaagtagcaggcgaggctcctccactgagcgcccgcaacttgggagccaggttgacctggggagggtgaaaatggagaaggtagatggggatgtagtgttcaacttagctacctgttttcgcgccgatggcttgcccgtggcccctcagcgggggcaggctgaggtgagggcaaaggcaggccaggccagggtcaaacaggagagcgtcggagtatttgcgtgcaagaataaatggcagccggatgacgtgaccgaatccctcccccccaaaaagatgaagtgtggtaaggaaaaggattctgaggagcagcagcttcagccccaggccaaggctgttgtgcgaagctctcatcggcctaaatgcagaaagctacctagtgacccacaggagagtaccaaaaaaagtccacgaggggcatctgactccggtaaagagcacaacggagtgagaggtaagcacaaacacaggaaaccaacaaagcccgagagccagtcccccggaaaacgggcggatagccacgaggagggcagtctcgagaaaaaggccaaatcgagcttcagggattttattccagtggtgttgagcacaaggacccgatcacagagcgatttaaaagcgcgaaaacagaaaacctcttcctcccagagtctggaacacagattacgtaacagaaatcttttgctgccgaataaggtgcaggggatttctgatagccccaatggcttccttccaaataatctcgaggaaccggcctgtctcgaaaatagcgagaagccctccggtaaaaggaaatgcaagacaaaacacatggctaccgtcagcgaggaagctaaagatgtggtgttatattgtctgcagaaggattcagaagacgtcaaccacagagataacgccggatacactgctctgcacgaagcctgttcccgcggatggactgacattctaaatatacttctggaacacggagccaacgttaactgctctgcacaggatgggacgaggccagtgcatgacgccgtggttaacgacaacctggagaccatctggctccttctgagttacggggccgaccctacacttgcaacctacagcggccagacagccatgaaactcgcttccagtgacacgatgaagcgcttcctcagtgatcacctgagtgacttacaggggcgagctgaaggagaccctggcgttagctgggatttttattcttctagcgttctcgaggagaaggacgggttcgcttgcgaccttctacacaaccctcctggctcatctgaccaagaaggtgacgatcccatggaggaggatgactttatgttcgaacttagcgacaagcctttgctgccctgctacaacctgcaggtatccgtgagccgcgggccttgtaactggttcctgttctccgacgtgttgaagcgcctgaaactctcttccaggatcttccaagctagatttccacattttgagattaccacaatgcccaaggccgagttttacaggcaggtggcctcatcccagttgcttaccccagccgaacggccaggcggcctggacgaccgctcaccaccaggatcaagcgagaccgtagagttggttcggtacgagcccgatttgcttcgactcctgggatcagaagtcgagtttcagagctgcaattcctag

SEQ ID NO: 277985 - DNA, 2226 bp, Artificial Sequence
  derived and/or modified sequence
tgacccctgctgcccgcccccagcggcagcagcgcccccccccacccagctaagatgccaagtgggaccgaacagcagacagaggggacaagtgtcacctttagccccttgaaatcccctccccagctggagagagaaatggcgtcccctccagaatgcagtgaaatgcctctcgacctgagctcgaaatctaaccgacagaaattgccactgcccaatcagcgcaagactcccccaatgccagtgctcaccccagtacacaccagttctaaagcactattgagcactgttctgtctcgaagccagaggaccacacaggcggccggtggaaacgttacttcatgcctagggtctactagctcccccttcgtcattttccccgaaatcgtgaggaacggagatccaagtacgtgggtgaaaaacagcaccgcactaatcagcacgattccaggaacctatgtgggggtggccaatcctgtgccagcctccctgctgctgaataaggatccaaacctcggactaaaccgcgatccacggcacttaccaaagcaggagccgatctctattattgatcagggagaacctaaggggacgggggccacatgtggaaagaagggatcccaggcaggtgctgaaggacagccttcgactgttaagaggtacactcctgcccgcattgcacctggactcccaggatgtcagacgaaagagctctctctgtggaaaccaaccggtcccgccaatatctatccccggtgctctgtgaacgggaagcccacatctacccaagtgctgccggtgggctggagtccttaccaccaggcctcactcctatcaatcggtatctcaagtgcaggtcagctcactccttctcagggtgctcctataagaccaacttccgtcgtctctgagtttagcggagttccctccctgagcagcagtgaggcagttcatgggcttccagagggccagccaaggccgggtggcagttttgtgcctgaacaggatcctgttacaaaaaataaaacctgtaggattgctgcaaaaccttatgaggaacaagtgaatcccgtgctgttgactctcagcccacagaccgggactctggctttgtccgtccagccctctggcggggacattaggatgaaccagggaccggaggagagcgagtcgcacctgtgcagcgacagcacgccaaaaatggaggggccgcagggcgcctgcggtcttaagctggcaggagacaccaaacctaagaaccaggtcctcgcaacctatatgagccatgagctcgtcctcgccactcctcagaatctcccaaagatgcctgagcttcccctcttgcctcacgactcacatcccaaggagttgatcctggacgtggtcccgtcatcgaggcggggctcctctacagagcgccctcaattggggtcacaggtggatctgggccgtgtgaagatggaaaaggtggacggagacgtggtcttcaatctggctacttgtttcagagctgacggcttgcctgttgcccctcagagggggcaagctgaggtgagggccaaggctgggcaagctcgggtaaagcaggagtcggtaggagtgttcgcatgcaagaacaagtggcagccagatgatgtgactgaaagcctgcctcccaagaagatgaaatgcggcaaagagaaggactcggaagagcagcagctccaaccacaggctaaggcggtagtacggagttcccatcgccctaaatgccgaaaactgccctccgatcctcaggagtccacgaagaagtccccacgaggtgcctctgacagtggcaaggaacacaacggtgtaagagggaaacataagcatagaaagccaactaaacccgagtcccaatctcctggcaagagggcagatagccacgaggaaggatctctggaaaaaaaggccaagagctcctttagagacttcattcctgtcgtgctgagcacccggacacgttcccaatcagacctgaaagctcgtaaacagaaaacatcttcaagccagtccctggagcaccggctgagaaatagaaacctcctgttacctaataaggtccaggggatttctgacagccccaacggatttctccctaataacctcgaagagccagcatgcctggagaattccgagaaaccctcggggaagcgcaaatgcaagaccaagcatatggcaaccgtttcagaggaagctaagtag

SEQ ID NO: 277986 - DNA, 4746 bp, Artificial Sequence
  derived and/or modified sequence
atgatttctacagcccctctctattccggagtacacaattggactagttcagacagaatcaggatgtgcggcatcaacgaggaaagaagggcacctttgtctgatgaggagagtaccacgggagattgccaacactttggcagccaggagttctgtgtctcaagctctttctccaaggtagaactgacagctgtgggatcagggtcgaatgccaggggcgcagatccggacgggagcgccaccgaaaagctgggtcacaaatctgaagataaacccgacgatcctcagcctaagatggattatgccggaaatgttgccgaggcagagggcttcctcgtgcctctgagttctcccggtgatggactcaagctcccggctagtgacagtgctgaagcctctaacagcagagccgactgctcatggaccccgctaaacacacagatgtctaaacaggtcgactgctccccagccggagttaaggccttagattctcgccagggcgtaggagaaaaaaacactttcatcttagcgactctgggcacaggagtgccagtggaagggaccctgccattggttaccacgaattttagccctcttccggcacccatttgtccccctgcgcctggatcagcaagcgtgccacactctgtgccagacgcttttcaggtcccactgagcgtccccgctccagtgccacactctggcctagtccctgtccaggtagcgactagcgtgccggcaccatccccgccactagctcctgttcccgctctcgctcccgctccaccctctgttccgaccctcatttcggattccaatcctttgtccgtgtcagcctcagttttggtgcctgttccagcctccgcaccgccttcgggccctgtacctctgtcggcccctgcaccagcgcctctcagtgttccagtgtcagcccctccgctcgctctaatccaagctccagtcccaccctccgcccctaccctggtcttagctcccgtgcccacccccgtactcgcccctatgcctgcatccaccccaccagccgcacccgcacccccatccgttccaatgcccaccccaactccttcgagcgggcctcctagcacccccactctgataccagcttttgccccaacgccggtgccagcaccgacaccagcgcctattttcacccctgccccaacgcctatgcccgcagcaactccagcggctatccctacttctgccccaattcctgcctctttctcactcagccgcgtatgttttccagcagcacaggcccctgcgatgcagaaggtgcctttgagcttccaacccggtactgtgctcacaccgagccaaccactggtatatattccacctccatcatgcggacaacctctcagcgttgctacactgcccactaccctcggggtcagcagtactctgaccctgcctgtgcttccgtcttatttgcaagaccgctgtctgccaggcgtcctcgcctcgcccgagctgcgctcgtatccttacgcttttagcgtagcgaggccactcaccagtgattccaagctcgtttctctggaggtgaataggctgccgtgtacctctccctccggctccaccaccactcagcccgcacccgacggggtgccgggaccactggcagacacgagccttgtgactgcaagcgctaaggtcctgccgacaccacagccacttctgcctgcccctagcggcagctccgcccctcctcatccagccaagatgccgtcagggacagagcaacagaccgaagggacttccgtcactttcagccccttgaaaagtccaccgcagcttgaacgcgaaatggcctcacccccagagtgctcagaaatgccacttgatttgtcgtcaaaatccaaccggcagaaactgcctcttccaaaccagaggaagactccacctatgcctgttctgacgccagtgcacactagcagcaaggctcttctctcaaccgtgctatcgaggagtcagcgaaccacccaagctgccggaggtaatgtaacatcatgtctggggtctacaagttcaccctttgttatatttcccgagatagtgagaaatggggaccccagtacctgggttaagaattctaccgctctcatttccactatcccaggaacgtacgtcggcgtggctaacccagtgccagctagcttgctgttgaataaggaccccaacttggggcttaatcgcgacccacggcacttgccaaagcaagaaccgatctccataattgaccagggagaacctaaggggacaggcgctacttgtgggaagaagggatctcaggcaggagccgaagggcagcctagtactgtgaagaggtatacacccgctcgcatagctcctggactgccaggatgtcagaccaaagaattgagcctgtggaagccaactggacctgccaacatataccccagatgttccgtcaacgggaaacccacctcaactcaagtacttccggtgggctggagtccatatcaccaggccagcctgctgagtatcggtataagcagtgcagggcaattaactccgagtcagggtgcgccaattcgtcccacatcggtggtctctgagtttagtggcgtgccttccctctcttcttcggaggccgttcacggactgccagagggccagccaagaccaggcggttcatttgtgccagagcaggacccagtgaccaaaaataagacatgcaggattgccgcaaagccttacgaagagcaggtgaatcccgtgctacttactctgtccccgcagacggggacactggccctgtccgtgcagccatccggcggagatatccgaatgaatcaaggacccgaagaatcggagtcacacctctgcagcgacagcacccctaaaatggaaggccctcaaggcgcttgtggactcaagctcgccggagacaccaagccaaagaatcaggtccttgcgacgtacatgtctcatgagctggtgctggccaccccacagaacctccccaagatgccggaacttcctctcctcccccacgattctcatcctaaggagttaatcctcgacgttgtgccaagctcacggagaggcagctcaacagagagaccccagctagggagtcaagttgatttgggcagggtgaagatggagaaggttgacggggacgtggtgtttaatctggcaacatgtttccgggcagacggcctcccagtcgctccccagcggggtcaggccgaagtgcgggctaaagcagggcaagctagagtcaaacaggaatctgtgggcgtgtttgcctgtaaaaataaatggcagccagacgatgtgactgaatcactgcctccaaaaaaaatgaagtgtggtaaggagaaggattcagaagaacagcaactccagccccaggccaaggccgtggttcggagtagtcataggccaaaatgtcgaaaacttccttccgacccacaggaaagcacaaaaaaatctcccagaggtgccagtgactccgggaaggagcacaatggcgtccgcggaaaacataagcacagaaagcctacgaagcccgaatcccagtccccagggaaacgggcagactcacacgaagaagggtctctcgaaaaaaaggctaagtcttcatttcgagacttcatcccggttgtgctgtctacgagaacaagaagccaaagcgacctaaaggcacggaagcaaaaaacgtcttcgtcccaaagcctcgaacacaggctgagaaatcgcaacctgttactccccaacaaggtccagggaatctccgactccccgaacggcttcttacccaacaatcttgaggagccagcttgcttagaaaactcggagaagcctagtggcaaaaggaaatgtaaaacaaagcatatggctacagtttcagaagaagctaaagacgtggtactgtattgcttacagaaagattccgaggatgtgaatcacagagacaatgccggatacacagccctgcatgaggcgtgtagtcgcggatggaccgacatcttgaacatcctgctggagcacggcgcaaacgtcaattgttccgctcaggatggtactcgcccagtgcatgacgcggtggttaacgacaatctcgaaacgatatggctactgctgtcttacggagccgaccccacactggcaacgtactccggtcaaacagcaatgaaactcgcctcctcagatacgatgaagaggttcctctccgaccacctttccgacttgcagggcagagctgaaggcgaccccggtgtctcctgggacttttattctagcagcgtgcttgaggagaaagatggattcgcctgtgatctacttcataacccgcctgggagttctgaccaggaaggggatgaccctatggaagaggatgactttatgttcgagctttcagacaaacctctcttgccatgttacaacctgcaagtgtccgttagcagaggtccctgtaattggtttttgtttagtgatgtgctcaagcgacttaagctcagctcgcgtatattccaagccaggtttcctcatttcgaaatcaccaccatgccaaaagctgaattctacaggcaggtcgccagctctcagctgctgacccccgctgaacgtcctggcggactggatgaccggtctccccctggaagcagtgagacagtcgagctggtgcgttacgagccggatctcctccgccttttaggttcagaggtagaattccagagttgcaatagctag

SEQ ID NO: 277987 - DNA, 2226 bp, Artificial Sequence
  derived and/or modified sequence
tagccactgctgcccgctcccagtggaagctccgcaccgcctcaccccgcaaagatgccctctggaactgaacagcagacagagggaaccagcgtgaccttctcacccctcaagtctccaccacagctagaacgcgagatggcatcccccccagaatgtagcgagatgcctttggacttatctagcaaaagcaaccggcaaaaattgcctctccctaaccaacggaaaacccccccaatgccagtcttgacgccagttcatacgagcagtaaagcactgctgtcgacggtcctgagccgctctcagaggaccacacaggctgctggaggcaacgtgacgtcgtgcttaggtagcaccagcagcccgttcgtgatcttccctgaaatagtgcgaaacggggaccctagcacatgggtgaaaaattccactgcattgatttccactatccccggaacatacgtcggagtggctaacccagtcccagcatccctgcttttaaacaaggatccaaaccttggtctgaatcgtgaccccaggcatctacccaagcaagaaccgatttctattattgatcagggagagccaaaaggaacaggcgctacatgcgggaagaaggggtctcaggcgggagccgaaggacagccctcaacagtaaagcgatacactcccgcacgcatcgccccaggcctcccagggtgtcaaactaaggagttgagtctgtggaaacctacaggaccggctaacatttatccgagatgctctgtgaatggtaaacctacatctactcaagtgctgcccgtgggatggagcccatatcaccaagccagtctgctaagcataggtatcagcagcgctgggcagcttaccccgtcacagggagccccaatcagaccgactagcgtggtttctgaattcagtggtgtgcctagtctgtcctccagcgaggcagtgcatgggcttcctgaaggacagccacgccctggagggagctttgtgccagaacaggatccagtcacaaaaaataaaacttgccgcatcgcagccaagccttacgaagagcaagtaaatcctgtgctgttgactcttagtcctcagacaggtactctggcgctgagcgttcagccgagcgggggtgatattcgtatgaaccaggggccagaggagtccgaaagccacctgtgcagcgattctactcccaagatggaagggccacagggggcatgtggccttaagctggcaggcgatacaaagccaaagaaccaggttctggcaacttacatgtcgcatgaactcgtacttgcaactccacagaatctgcccaagatgccggagctccctctgttgccacacgattcgcacccaaaggaacttattctggacgttgtgccgagttcccggcgaggaagctctaccgagcggccacagctgggctcccaggtggacctgggccgagtaaaaatggagaaggtggatggagatgtcgtgtttaacctggctacttgctttagagctgacggactccccgtggcgcctcaacgcggtcaggcagaagtgagggccaaggctgggcaggctagggtcaagcaagagagcgtaggggtgttcgcctgtaagaacaaatggcagcctgacgacgtgaccgagagcctgcccccaaagaaaatgaagtgtggtaaggagaaagatagcgaggagcaacagctgcagccccaggccaaggctgtcgtgaggtcaagccatcgtcccaaatgtcggaaactgccatcggacccacaggaaagtaccaaaaaatcgcctaggggcgcttcagattcaggtaaggaacacaacggagttagaggtaagcataaacacagaaagcccactaaacccgagtcccaatcaccgggtaagagagctgacagccatgaagaaggttccctagaaaaaaaagccaagagtagcttccgggactttatcccagtggtgctttccacaagaacacggagccagtccgacctaaaggccagaaaacagaaaaccagctcaagccagagcctggaacatcgattgagaaataggaacctcttattgcccaacaaggtccaaggaattagcgattccccaaacggcttcttgccaaataacctggaggagcccgcttgtctagagaactccgagaagcctagcggtaagcgcaagtgtaaaaccaagcatatggccaccgtttcagaagaggccaagtag

SEQ ID NO: 277988 - DNA, 6322 bp, Artificial Sequence
  derived and/or modified sequence
tgagccctcccttcttcctctcagttcctagagtccgaccgccgccgccgccgagagagaggagaaggagggggagtggccacagcaggtcctatctggtggtgagtggctgtcatgatctctacagcaccgctctacagcggcgtgcacaactggaccagttctgaccggattcgcatgtgtggcatcaacgaggagagaagagcacctctttctgatgaggagtcaacgacaggcgactgccagcactttggatctcaggagttttgtgtcagcagcagtttttccaaggtggagctcacggcagttggaagtggcagcaatgcccggggggcagacccagatggcagtgctacagaaaaacttgggcacaagtcagaagacaagcctgacgatccccagccaaaaatggactacgctgggaacgtggcagaggctgagggcttcttggtgcccctgagcagcccaggagacgggctcaagcttcccgcatctgacagcgccgaggccagcaacagcagggccgactgctcctggactccactcaacacccaaatgagcaaacaggttgactgctcacccgccggagtaaaggctttggactctcggcaaggtgttggagagaagaatactttcattttggcaactctgggaactggagtccctgtggaggggaccctgcccctggttaccactaacttcagtcctctgccagcccctatctgtccccctgctcccggttcggcctctgtgccccactctgttccagatgcattccaggttcccctctccgtccctgccccagtcccccattcagggcttgttccagtccaagttgccacttcggttccagctccttcccctcccttagcacctgtcccggctctggctccagcgccaccgtcagtgcccacgctcatctctgactcgaaccccctttctgtttcggcctcagtcttggtgcctgtgccagcttctgctcccccttcaggcccggttcccttgtcggctccagctcctgccccgctttcagtcccagtttcagctcctcccttggctctcatccaggctcctgtgcccccttcagctccgaccttggttctcgctcccgtccccactccggttctggctcccatgccagcatccacgcctccagcggcccctgcccctccgtctgtgcccatgcccactccaaccccatcttccggcccaccttctacccccaccctcatccccgcctttgctcctacaccggtgcctgcacccaccccagcccccatctttactccagcccctacacccatgcctgctgccacgccagctgccattcccacctctgcacccatcccggcctccttcagtttgagtagagtgtgctttcctgcagctcaggcaccagctatgcaaaaagtccccctgtcctttcagccagggacagtgctgaccccgagccagccgctggtatatatcccgcctccaagctgtgggcagccactcagtgtggccacactgccaaccactctaggggtttcctccactcttacgctccctgtcctgccgtcctacctgcaggacaggtgtctcccaggcgtgctagcctcccccgagctccgttcttacccgtatgcattttctgtggcccggcctctgacttcggattccaagctggtatctctggaggtgaacaggctcccctgcacttccccatccggtagcaccaccacccagcctgcacccgatggggtccctgggcctttggcagatacctcccttgttactgcttctgccaaggtgcttccaactccacagcctctgctgccagcccccagtgggagctcagccccaccgcaccccgccaagatgcccagtggcaccgagcagcaaacagaagggacttccgttaccttctctcctcttaagtcaccgccacagctggaacgagagatggcctctccacctgagtgcagcgagatgccccttgatctgtcctccaagtccaaccgccagaagcttccattgccgaaccagcgcaagacaccccccatgcctgtgttgacccccgtgcacaccagcagcaaggccctcctctccacagtcctgtctaggtctcagcgcacaacccaggctgccggtggcaatgtcacctcctgcctgggctccacttcctcgccctttgtcatctttcccgagatcgtgaggaatggggacccgagcacctgggtgaagaactcaactgcactgatcagcaccattcctggcacctacgtgggagtggccaacccagtgcctgcatccctgctgctgaacaaagaccccaacctgggcctcaaccgtgacccccgccatctccccaagcaggagcccatctccatcattgatcaaggagagcctaagggcactggtgccacgtgtggcaaaaagggcagccaggctggtgctgagggacagccaagcacagtgaaacgatatactccagcccgcattgcccctgggctgccagggtgccaaaccaaggaactctctttgtggaaacccacggggccggcaaatatttatccccggtgttcagtcaatgggaaacctaccagcacccaggtcctgcctgttggctggtccccgtaccaccaggcgtctctgctttccattggcatttccagtgccgggcagctgacccccagtcagggggcgcccatcaggcccaccagcgttgtttcggagttttctggtgtgccatctctcagctccagcgaagccgtgcacggacttcctgaggggcaaccacggcctgggggctccttcgttccagagcaggaccctgttacaaagaacaaaacttgccggattgctgccaagccttatgaagaacaagtcaatcctgtcctcttgaccctcagccctcagactgggaccctggcactgtctgttcagcctagcggtggggacattcgaatgaatcaggggcctgaggaatcagagagccacctctgctctgacagcactcctaagatggaaggcccccagggggcttgtggcctgaagctggcaggagacacgaagcctaagaaccaagtgctggccacctacatgtcccatgagctggtcctggccaccccccagaacctgcctaagatgcctgagctgcctttgctacctcacgacagccaccccaaggaacttatattggacgtggttccgagcagcaggaggggctccagcacagagcgcccacagcttggaagccaggtggatctggggcgagtgaaaatggagaaggtggatggtgatgtggtcttcaatttagccacctgcttccgggctgatggcctcccagtggctccccagaggggccaagctgaagttcgggctaaggccgggcaggctcgagtgaaacaggaaagcgtaggggtctttgcttgcaagaacaagtggcagccagatgatgtgacggaatctctgccgcccaagaagatgaagtgcggcaaagagaaggacagtgaagagcagcagctccagccacaagccaaggccgtggtccggagttcccacagacccaagtgccggaagctgcccagtgacccccaggaatccaccaagaaaagccccaggggggcttcagattcaggaaaagagcacaatggagtcaggggaaagcacaagcaccggaagccgacaaagccggagtcccagtctccaggaaaacgagccgacagccacgaggaaggttccttggaaaagaaagcaaagagcagtttccgtgactttattcctgtggttctgagcacccgcacgcgcagtcagtctgatttaaaggcccgtaagcagaagacttcctcctcccaaagtttggagcaccgcctcaggaacaggaaccttctcttgcccaacaaagtccaggggatctcggattcaccaaacggtttcctcccaaataacctggaagagccagcctgccttgaaaattcagaaaagccatcaggaaaacgaaagtgcaagaccaagcacatggcaaccgtctcagaagaggcaaaggatgttgttctctactgcctccagaaagacagtgaagatgtgaatcaccgtgacaatgctggctacacagccctgcatgaggcttgttcccggggctggaccgacatcctgaacatcctgctggagcacggggccaacgtgaactgcagtgcgcaggacggcacgaggccagttcatgatgcggtggtcaatgacaacctggagaccatctggctcctgctgtcctatggggccgatcccacactggctacctactcgggtcagacagccatgaagctggccagcagcgacaccatgaagcgctttctcagtgatcacctctcggatcttcagggccgggcagagggtgatcccggtgtatcctgggatttttacagcagttctgtgttggaggaaaaagacgggtttgcctgtgacctcctacataatcctcctgggagctcagatcaagaaggagacgatccgatggaggaggatgatttcatgtttgaactctcagacaagcctcttctcccttgctacaacctccaagtgtcagtgtcccgcgggccctgcaactggttcctcttttccgatgtcttgaagaggctgaagctttcctcgaggatctttcaggcccggttcccgcactttgaaatcaccaccatgcccaaggccgagttctacaggcaggtggcctccagtcagctgctgacccctgccgagaggcctggaggcttggacgacagatcccccccaggctcctctgagactgtggagctggtgcggtacgagccagacctacttcggctcctagggtccgaggtggaattccagtcttgcaacagttgaccgggaaaacagcccctcctcttctttctccttccgagttcgcccttcccccacctccttgtctttccccgaccgagcaccagactgcagaatgaggcaataatacggaccaacaagaagccgccttatcaatgccagcattagcgactggactgtttttgtttttttggttacaattagttctcatctccctgtcgtcgtcattgttatcgtggttgctgatgggggtggaaagttgaactccatgtctgaggacaagaggtcccgggggtggtgggaggtggcgccggggtcccttggactggcctccttgttcatgaccaagaccaaacctgggccctggatggccttggcctgtcccgaggagaaatgagaaaatcccagatctctgagcgccccccaactccattcccctgtgttcttctgtcttctgtagtatttattttattagtatttaatttgtattgtttcattggtttctgataagtctgtatcactgtgacgatttgagacaacttgttgtattgagggactttctgtacctccttttctttttctttgttgatgagctctgacaaagctattccctggtgtttttttcccccactggggagggggtgaggtggaatggggtgggggaacatggacttgtgactaacgaagctggttgctgctggcccagggctgggggcttgggggtaaatcctgaggctttggtgctcccccacccacccattcccgccctttgcagcagccccgctatcttgagattagtgttgacagggaggggaggattgtgaggtgaggggttaataagttactctaataaaggagcgtggagaagggatctgaggggtgagggtggcccccctcctcacgccttcttcactgcccccctcagagtgcacaatacgagtttgttcctgcctccactctcccaccccgttctggcctccctgtctcaagatactgagcctctcacctcccagccctcagccacccccatccctgccccttctgagactcacagcacccctttccttcctctcctcccacctcctccctcagcccctcattctccttgggaatctgcagagggctctgggactcactgccggatgtgaaatccaggcgtcagctgtttcctaggcaagggcaggaaagtggtctccagcccttgctccactcatgcctgggggcctggggctgagtggtatccctacctggcctccccctggcctctgggcctccagcgctgggtttgtcgagtgagagagagagaggagcttgggttgcttccctgtccccgccccctctgtggcattgtccctcccactcttatttttctaccaattgctatttttccgaacaatccttgtagagtatgtaccatccaaaggcaggagggcctcgccgtggccggctctggttggagatggtacagttttattgtacaggtgct

SEQ ID NO: 277989 - DNA, 2221 bp, Artificial Sequence
  derived and/or modified sequence
gcctctgctgccagcccccagtgggagctcagccccaccgcaccccgccaagatgcccagtggcaccgagcagcaaacagaagggacttccgttaccttctctcctcttaagtcaccgccacagctggaacgagagatggcctctccacctgagtgcagcgagatgccccttgatctgtcctccaagtccaaccgccagaagcttccattgccgaaccagcgcaagacaccccccatgcctgtgttgacccccgtgcacaccagcagcaaggccctcctctccacagtcctgtctaggtctcagcgcacaacccaggctgccggtggcaatgtcacctcctgcctgggctccacttcctcgccctttgtcatctttcccgagatcgtgaggaatggggacccgagcacctgggtgaagaactcaactgcactgatcagcaccattcctggcacctacgtgggagtggccaacccagtgcctgcatccctgctgctgaacaaagaccccaacctgggcctcaaccgtgacccccgccatctccccaagcaggagcccatctccatcattgatcaaggagagcctaagggcactggtgccacgtgtggcaaaaagggcagccaggctggtgctgagggacagccaagcacagtgaaacgatatactccagcccgcattgcccctgggctgccagggtgccaaaccaaggaactctctttgtggaaacccacggggccggcaaatatttatccccggtgttcagtcaatgggaaacctaccagcacccaggtcctgcctgttggctggtccccgtaccaccaggcgtctctgctttccattggcatttccagtgccgggcagctgacccccagtcagggggcgcccatcaggcccaccagcgttgtttcggagttttctggtgtgccatctctcagctccagcgaagccgtgcacggacttcctgaggggcaaccacggcctgggggctccttcgttccagagcaggaccctgttacaaagaacaaaacttgccggattgctgccaagccttatgaagaacaagtcaatcctgtcctcttgaccctcagccctcagactgggaccctggcactgtctgttcagcctagcggtggggacattcgaatgaatcaggggcctgaggaatcagagagccacctctgctctgacagcactcctaagatggaaggcccccagggggcttgtggcctgaagctggcaggagacacgaagcctaagaaccaagtgctggccacctacatgtcccatgagctggtcctggccaccccccagaacctgcctaagatgcctgagctgcctttgctacctcacgacagccaccccaaggaacttatattggacgtggttccgagcagcaggaggggctccagcacagagcgcccacagcttggaagccaggtggatctggggcgagtgaaaatggagaaggtggatggtgatgtggtcttcaatttagccacctgcttccgggctgatggcctcccagtggctccccagaggggccaagctgaagttcgggctaaggccgggcaggctcgagtgaaacaggaaagcgtaggggtctttgcttgcaagaacaagtggcagccagatgatgtgacggaatctctgccgcccaagaagatgaagtgcggcaaagagaaggacagtgaagagcagcagctccagccacaagccaaggccgtggtccggagttcccacagacccaagtgccggaagctgcccagtgacccccaggaatccaccaagaaaagccccaggggggcttcagattcaggaaaagagcacaatggagtcaggggaaagcacaagcaccggaagccgacaaagccggagtcccagtctccaggaaaacgagccgacagccacgaggaaggttccttggaaaagaaagcaaagagcagtttccgtgactttattcctgtggttctgagcacccgcacgcgcagtcagtctgatttaaaggcccgtaagcagaagacttcctcctcccaaagtttggagcaccgcctcaggaacaggaaccttctcttgcccaacaaagtccaggggatctcggattcaccaaacggtttcctcccaaataacctggaagagccagcctgccttgaaaattcagaaaagccatcaggaaaacgaaagtgcaagaccaagcacatggcaaccgtctcagaagaggcaaag

SEQ ID NO: 277990 - DNA, 4746 bp, Artificial Sequence
  derived and/or modified sequence
atgatcagcaccgcccccctgtacagcggcgtgcacaactggaccagcagcgacagaatcagaatgtgcggcatcaacgaggagagaagagcccccctgagcgacgaggagagcaccaccggcgactgccagcacttcggcagccaggagttctgcgtgagcagcagcttcagcaaggtggagctgaccgccgtgggcagcggcagcaacgccagaggcgccgaccccgacggcagcgccaccgagaagctgggccacaagagcgaggacaagcccgacgacccccagcccaagatggactacgccggcaacgtggccgaggccgagggcttcctggtgcccctgagcagccccggcgacggcctgaagctgcccgccagcgacagcgccgaggccagcaacagcagagccgactgcagctggacccccctgaacacccagatgagcaagcaggtggactgcagccccgccggcgtgaaggccctggacagcagacagggcgtgggcgagaagaacaccttcatcctggccaccctgggcaccggcgtgcccgtggagggcaccctgcccctggtgaccaccaacttcagccccctgcccgcccccatctgcccccccgcccccggcagcgccagcgtgccccacagcgtgcccgacgccttccaggtgcccctgagcgtgcccgcccccgtgccccacagcggcctggtgcccgtgcaggtggccaccagcgtgcccgcccccagcccccccctggcccccgtgcccgccctggcccccgccccccccagcgtgcccaccctgatcagcgacagcaaccccctgagcgtgagcgccagcgtgctggtgcccgtgcccgccagcgccccccccagcggccccgtgcccctgagcgcccccgcccccgcccccctgagcgtgcccgtgagcgccccccccctggccctgatccaggcccccgtgccccccagcgcccccaccctggtgctggcccccgtgcccacccccgtgctggcccccatgcccgccagcaccccccccgccgcccccgccccccccagcgtgcccatgcccacccccacccccagcagcggcccccccagcacccccaccctgatccccgccttcgcccccacccccgtgcccgcccccacccccgcccccatcttcacccccgcccccacccccatgcccgccgccacccccgccgccatccccaccagcgcccccatccccgccagcttcagcctgagcagagtgtgcttccccgccgcccaggcccccgccatgcagaaggtgcccctgagcttccagcccggcaccgtgctgacccccagccagcccctggtgtacatccccccccccagctgcggccagcccctgagcgtggccaccctgcccaccaccctgggcgtgagcagcaccctgaccctgcccgtgctgcccagctacctgcaggacagatgcctgcccggcgtgctggccagccccgagctgagaagctacccctacgccttcagcgtggccagacccctgaccagcgacagcaagctggtgagcctggaggtgaacagactgccctgcaccagccccagcggcagcaccaccacccagcccgcccccgacggcgtgcccggccccctggccgacaccagcctggtgaccgccagcgccaaggtgctgcccaccccccagcccctgctgcccgcccccagcggcagcagcgcccccccccaccccgccaagatgcccagcggcaccgagcagcagaccgagggcaccagcgtgaccttcagccccctgaagagccccccccagctggagagagagatggccagcccccccgagtgcagcgagatgcccctggacctgagcagcaagagcaacagacagaagctgcccctgcccaaccagagaaagaccccccccatgcccgtgctgacccccgtgcacaccagcagcaaggccctgctgagcaccgtgctgagcagaagccagagaaccacccaggccgccggcggcaacgtgaccagctgcctgggcagcaccagcagccccttcgtgatcttccccgagatcgtgagaaacggcgaccccagcacctgggtgaagaacagcaccgccctgatcagcaccatccccggcacctacgtgggcgtggccaaccccgtgcccgccagcctgctgctgaacaaggaccccaacctgggcctgaacagagaccccagacacctgcccaagcaggagcccatcagcatcatcgaccagggcgagcccaagggcaccggcgccacctgcggcaagaagggcagccaggccggcgccgagggccagcccagcaccgtgaagagatacacccccgccagaatcgcccccggcctgcccggctgccagaccaaggagctgagcctgtggaagcccaccggccccgccaacatctaccccagatgcagcgtgaacggcaagcccaccagcacccaggtgctgcccgtgggctggagcccctaccaccaggccagcctgctgagcatcggcatcagcagcgccggccagctgacccccagccagggcgcccccatcagacccaccagcgtggtgagcgagttcagcggcgtgcccagcctgagcagcagcgaggccgtgcacggcctgcccgagggccagcccagacccggcggcagcttcgtgcccgagcaggaccccgtgaccaagaacaagacctgcagaatcgccgccaagccctacgaggagcaggtgaaccccgtgctgctgaccctgagcccccagaccggcaccctggccctgagcgtgcagcccagcggcggcgacatcagaatgaaccagggccccgaggagagcgagagccacctgtgcagcgacagcacccccaagatggagggcccccagggcgcctgcggcctgaagctggccggcgacaccaagcccaagaaccaggtgctggccacctacatgagccacgagctggtgctggccaccccccagaacctgcccaagatgcccgagctgcccctgctgccccacgacagccaccccaaggagctgatcctggacgtggtgcccagcagcagaagaggcagcagcaccgagagaccccagctgggcagccaggtggacctgggcagagtgaagatggagaaggtggacggcgacgtggtgttcaacctggccacctgcttcagagccgacggcctgcccgtggccccccagagaggccaggccgaggtgagagccaaggccggccaggccagagtgaagcaggagagcgtgggcgtgttcgcctgcaagaacaagtggcagcccgacgacgtgaccgagagcctgccccccaagaagatgaagtgcggcaaggagaaggacagcgaggagcagcagctgcagccccaggccaaggccgtggtgagaagcagccacagacccaagtgcagaaagctgcccagcgacccccaggagagcaccaagaagagccccagaggcgccagcgacagcggcaaggagcacaacggcgtgagaggcaagcacaagcacagaaagcccaccaagcccgagagccagagccccggcaagagagccgacagccacgaggagggcagcctggagaagaaggccaagagcagcttcagagacttcatccccgtggtgctgagcaccagaaccagaagccagagcgacctgaaggccagaaagcagaagaccagcagcagccagagcctggagcacagactgagaaacagaaacctgctgctgcccaacaaggtgcagggcatcagcgacagccccaacggcttcctgcccaacaacctggaggagcccgcctgcctggagaacagcgagaagcccagcggcaagagaaagtgcaagaccaagcacatggccaccgtgagcgaggaggccaaggacgtggtgctgtactgcctgcagaaggacagcgaggacgtgaaccacagagacaacgccggctacaccgccctgcacgaggcctgcagcagaggctggaccgacatcctgaacatcctgctggagcacggcgccaacgtgaactgcagcgcccaggacggcaccagacccgtgcacgacgccgtggtgaacgacaacctggagaccatctggctgctgctgagctacggcgccgaccccaccctggccacctacagcggccagaccgccatgaagctggccagcagcgacaccatgaagagattcctgagcgaccacctgagcgacctgcagggcagagccgagggcgaccccggcgtgagctgggacttctacagcagcagcgtgctggaggagaaggacggcttcgcctgcgacctgctgcacaacccccccggcagcagcgaccaggagggcgacgaccccatggaggaggacgacttcatgttcgagctgagcgacaagcccctgctgccctgctacaacctgcaggtgagcgtgagcagaggcccctgcaactggttcctgttcagcgacgtgctgaagagactgaagctgagcagcagaatcttccaggccagattcccccacttcgagatcaccaccatgcccaaggccgagttctacagacaggtggccagcagccagctgctgacccccgccgagagacccggcggcctggacgacagaagcccccccggcagcagcgagaccgtggagctggtgagatacgagcccgacctgctgagactgctgggcagcgaggtggagttccagagctgcaacagctag

SEQ ID NO: 277991 - DNA, 2226 bp, Artificial Sequence
  derived and/or modified sequence
tgacccctgctgcccgcccccagcggcagcagcgcccccccccaccccgccaagatgcccagcggcaccgagcagcagaccgagggcaccagcgtgaccttcagccccctgaagagccccccccagctggagagagagatggccagcccccccgagtgcagcgagatgcccctggacctgagcagcaagagcaacagacagaagctgcccctgcccaaccagagaaagaccccccccatgcccgtgctgacccccgtgcacaccagcagcaaggccctgctgagcaccgtgctgagcagaagccagagaaccacccaggccgccggcggcaacgtgaccagctgcctgggcagcaccagcagccccttcgtgatcttccccgagatcgtgagaaacggcgaccccagcacctgggtgaagaacagcaccgccctgatcagcaccatccccggcacctacgtgggcgtggccaaccccgtgcccgccagcctgctgctgaacaaggaccccaacctgggcctgaacagagaccccagacacctgcccaagcaggagcccatcagcatcatcgaccagggcgagcccaagggcaccggcgccacctgcggcaagaagggcagccaggccggcgccgagggccagcccagcaccgtgaagagatacacccccgccagaatcgcccccggcctgcccggctgccagaccaaggagctgagcctgtggaagcccaccggccccgccaacatctaccccagatgcagcgtgaacggcaagcccaccagcacccaggtgctgcccgtgggctggagcccctaccaccaggccagcctgctgagcatcggcatcagcagcgccggccagctgacccccagccagggcgcccccatcagacccaccagcgtggtgagcgagttcagcggcgtgcccagcctgagcagcagcgaggccgtgcacggcctgcccgagggccagcccagacccggcggcagcttcgtgcccgagcaggaccccgtgaccaagaacaagacctgcagaatcgccgccaagccctacgaggagcaggtgaaccccgtgctgctgaccctgagcccccagaccggcaccctggccctgagcgtgcagcccagcggcggcgacatcagaatgaaccagggccccgaggagagcgagagccacctgtgcagcgacagcacccccaagatggagggcccccagggcgcctgcggcctgaagctggccggcgacaccaagcccaagaaccaggtgctggccacctacatgagccacgagctggtgctggccaccccccagaacctgcccaagatgcccgagctgcccctgctgccccacgacagccaccccaaggagctgatcctggacgtggtgcccagcagcagaagaggcagcagcaccgagagaccccagctgggcagccaggtggacctgggcagagtgaagatggagaaggtggacggcgacgtggtgttcaacctggccacctgcttcagagccgacggcctgcccgtggccccccagagaggccaggccgaggtgagagccaaggccggccaggccagagtgaagcaggagagcgtgggcgtgttcgcctgcaagaacaagtggcagcccgacgacgtgaccgagagcctgccccccaagaagatgaagtgcggcaaggagaaggacagcgaggagcagcagctgcagccccaggccaaggccgtggtgagaagcagccacagacccaagtgcagaaagctgcccagcgacccccaggagagcaccaagaagagccccagaggcgccagcgacagcggcaaggagcacaacggcgtgagaggcaagcacaagcacagaaagcccaccaagcccgagagccagagccccggcaagagagccgacagccacgaggagggcagcctggagaagaaggccaagagcagcttcagagacttcatccccgtggtgctgagcaccagaaccagaagccagagcgacctgaaggccagaaagcagaagaccagcagcagccagagcctggagcacagactgagaaacagaaacctgctgctgcccaacaaggtgcagggcatcagcgacagccccaacggcttcctgcccaacaacctggaggagcccgcctgcctggagaacagcgagaagcccagcggcaagagaaagtgcaagaccaagcacatggccaccgtgagcgaggaggccaagtag

SEQ ID NO: 277992 - protein, 1054 aa, Artificial Sequence
  derived and/or modified sequence
MEQDTAAVAATVAAADATATIVVIEDEQPGPSTSQEEGAAAAATEATAATEKGEKKKEKNVSSFQLKLAAKAPKSEKEMDPEYEEKMKADRAKRFEFLLKQTELFAHFIQPSAQKSPTSPLNMKLGRPRIKKDEKQSLISAGDYRHRRTEQEEDEELLSESRKTSNVCIRFEVSPSYVKGGPLRDYQIRGLNWLISLYENGVNGILADEMGLGKTLQTIALLGYLKHYRNIPGPHMVLVPKSTLHNWMNEFKRWVPSLRVICFVGDKDARAAFIRDEMMPGEWDVCVTSYEMVIKEKSVFKKFHWRYLVIDEAHRIKNEKSKLSEIVREFKSTNRLLLTGTPLQNNLHELWALLNFLLPDVFNSADDFDSWFDTKNCLGDQKLVERLHAVLKPFLLRRIKTDVEKSLPPKKEIKIYLGLSKMQREWYTKILMKDIDVLNSSGKMDKMRLLNILMQLRKCCNHPYLFDGAEPGPPYTTDEHIVSNSGKMVVLDKLLAKLKEQGSRVLIFSQMTRLLDILEDYCMWRGYEYCRLDGQTPHEEREDKFLEVEFLGQREAIEAFNAPNSSKFIFMLSTRAGGLGINLASADVVILYDSDWNPQVDLQAMDRAHRIGQKKPVRVFRLITDNTVEERIVERAEIKLRLDSIVIQQGRLIDQQSNKLAKEEMLQMIRHGATHVFASKESELTDEDITTILERGEKKTAEMNERLQKMGESSLRNFRMDIEQSLYKFEGEDYREKQKLGMVEWIEPPKRERKANYAVDAYFREALRVSEPKIPKAPRPPKQPNVQDFQFFPPRLFELLEKEILYYRKTIGYKVPRNPDIPNPALAQREEQKKIDGAEPLTPEETEEKEKLLTQGFTNWTKRDFNQFIKANEKYGRDDIDNIAREVEGKSPEEVMEYSAVFWERCNELQDIEKIMAQIERGEARIQRRISIKKALDAKIARYKAPFHQLRIQYGTSKGKNYTEEEDRFLICMLHKMGFDRENVYEELRQCVRNAPQFRFDWFIKSRTAMEFQRRCNTLISLIEKENMEIEERERAEKKKRATKTPMVKFSAFS

SEQ ID NO: 277993 - DNA, 4102 bp, Artificial Sequence
  derived and/or modified sequence
gcggagtgattccccacccctgctccatctagctctttccagtgcagccactgccgccgcccaggagccctcgtcccctgccttgtccccctactcgttcccgctcccacggcatggagcaggacactgccgcagtggcagccaccgtggcagccgcggatgcgaccgccactatcgtggtcatagaggacgagcagcccgggccgtccacctctcaggaggagggagcggccgccgcggccaccgaagccaccgcggccacggagaagggcgagaagaagaaggagaaaaacgtttcttcatttcaactcaaacttgctgctaaagcgcctaaatctgaaaaggaaatggacccagaatatgaagagaaaatgaaagccgaccgagcaaagagatttgaatttttactgaagcagacagaactttttgcacatttcattcagccttcagcacagaaatctccaacatctccactgaacatgaaattgggacgtccccgaataaagaaagatgaaaagcagagcttaatttctgctggagactaccgccataggcgcacagagcaagaagaagatgaagagctactgtctgagagtcggaaaacatctaatgtgtgtattagatttgaggtgtcaccttcatatgtgaaaggggggccactgagagattatcagattcgaggactgaattggttgatctctttatatgaaaatggagtcaatggcattttggctgatgaaatgggccttgggaaaactttacaaacaattgctttgcttggttacctgaaacactaccgaaatattcctggacctcacatggttttagttccaaagtctactttacacaactggatgaatgaatttaaacgatgggtcccatctctccgtgtcatttgttttgtcggagacaaggatgccagagctgcttttattcgtgatgaaatgatgccaggagagtgggatgtttgcgttacttcttatgagatggtaattaaagaaaaatctgtattcaaaaagtttcactggcgatacctggtcattgatgaagctcacagaataaagaatgaaaaatctaagctttcagagattgttcgtgagttcaagtcgactaaccgcttgctcctaactggaacacctttgcagaataacctgcatgaactgtgggccttactcaactttttattgcctgatgtctttaattctgcagatgactttgattcttggtttgacactaaaaattgtcttggtgatcaaaaactcgtggaaagacttcatgcagttttaaaaccatttttgttacgccgtataaaaactgatgtagagaagagtctgccacctaaaaaggaaataaagatttacttggggctgagtaagatgcaacgagaatggtatacaaaaatcctgatgaaagatattgatgttttaaactcttctggcaagatggacaagatgcgactcttaaacattctgatgcagcttcgaaagtgttgtaatcatccatatctgtttgatggtgctgaacctggtccaccttataccactgatgagcatattgtcagcaacagtggtaaaatggtagttctggataaactattggccaaactcaaagaacagggttcaagggttctcattttcagccagatgactcgcttgctggatattttggaagattattgcatgtggcgtggttatgagtattgtcgactggatggacaaaccccgcatgaagaaagagaggataaattcctagaagtggaatttctgggtcaaagggaagcaatagaggcttttaatgctcctaatagtagcaaattcatctttatgctaagtaccagggctggaggtctcggaattaacctggcaagtgctgatgtggttatactatatgattcagactggaacccacaggttgatctacaagctatggatcgagcacatcgtattggtcagaagaaaccagtacgtgtattccgtctcatcactgacaacactgttgaagagaggattgtagaaagagctgagataaaactgagactcgattcaattgttatacaacaaggaagactcattgaccaacagtctaacaagctggcaaaagaggaaatgttacaaatgatacggcatggagccacccatgtttttgcttctaaagagagtgagttgacagatgaagacattacaactattctggaaagaggggaaaagaagactgcagagatgaatgaacgcctgcaaaaaatgggagagtcttctctaagaaattttagaatggacattgaacaaagtttatacaaatttgagggagaagattatagagaaaaacagaagcttggcatggtggaatggattgaacctcctaaacgagaacgcaaagcaaactacgcagtggatgcctactttagagaggctttgcgtgtcagcgagccaaagattccaaaggctccacggcctccaaaacagccaaatgttcaggattttcaatttttcccaccacgcttatttgagctcctggaaaaggaaattctttattatcggaagacaataggctataaggttccaaggaatcctgatatcccaaatccagctctggctcaaagagaagagcaaaaaaagattgatggagctgaacctcttacaccagaagagactgaagaaaaggaaaaacttctcacacaaggtttcacaaactggactaaacgagattttaaccagtttattaaagctaatgagaaatatggaagagatgacattgataacatagctcgagaggtagagggcaaatcccctgaggaggtcatggagtattcagctgtattttgggaacgttgcaatgaattacaggacattgagaaaattatggctcaaattgaacgtggagaagcaagaattcaacgaaggatcagtatcaagaaagccctggatgccaaaattgcaagatacaaggctccatttcatcagttgcgcattcagtatggaaccagcaaaggaaagaactatactgaggaagaagatagattcttgatttgtatgttacacaaaatgggctttgatagagaaaatgtatatgaagaattaagacagtgtgtacgaaatgctccccagtttagatttgactggtttatcaagtctaggactgccatggaattccagagacgctgtaacactctgatttcattgattgagaaagaaaatatggaaattgaggaaagagagagagcagaaaagaagaaacgggcaactaaaactccaatggtaaaattttcagcattttcctaacttttagatttaacattgttgggccatttaaaatgtgcatattggagcagaacattaaatctgtttccattttagtcacagaaaagaaaagcagagtcagctactgagagctctggaaagaaggatgtcaagaaggtgaaatcctaaagcctagaaataaagttttaaatgggaaactgctattttcttgttcccatcttcaaatgctaattgccagttccagtgtattcatggtactctaagaaaaatctctttggttttgatttcttgcatattttatatattttacaatgctttctacctgaaatgtgtagctttatattttatggcattctagtatttttgtgtactgtattttgtgcatttcatgtcttcatcaaaatcctctcagtccttgttcttttgaagcttgtgctgaggttttagcttttctatgttttatatgccgctgctttgaaagagaacctagattctatagttgtattattgttgtttcatactttaaatttatatggctgtggaaaaacgaattaaaatgttttgaggagaaagactttttcacttctttgttgctttcttttctattgagtctgggcttgtttgtgttactgcatactgtgattagcataataattgtttctttgaggtcatctaaatatttttttcctaaaggaataaagggtgaggaaagaaaaatattaaaaaagctaatatttgatactgtgcttgctgtcagtatgcattacatttaaattattctctattcaagtgggaaaatataataaagaaatgtctataagaaatttaaaaaaaaaaaaaaaaaa

SEQ ID NO: 277994 - DNA, 3165 bp, Artificial Sequence
  derived and/or modified sequence
atggagcaggacaccgccgccgtggccgccaccgtggccgccgccgacgccaccgccaccatcgtggtgatcgaggacgagcagcccggccccagcaccagccaggaggagggcgccgccgccgccgccaccgaggccaccgccgccaccgagaagggcgagaagaagaaggagaagaacgtgagcagcttccagctgaagctggccgccaaggcccccaagagcgagaaggagatggaccccgagtacgaggagaagatgaaggccgacagagccaagagattcgagttcctgctgaagcagaccgagctgttcgcccacttcatccagcccagcgcccagaagagccccaccagccccctgaacatgaagctgggcagacccagaatcaagaaggacgagaagcagagcctgatcagcgccggcgactacagacacagaagaaccgagcaggaggaggacgaggagctgctgagcgagagcagaaagaccagcaacgtgtgcatcagattcgaggtgagccccagctacgtgaagggcggccccctgagagactaccagatcagaggcctgaactggctgatcagcctgtacgagaacggcgtgaacggcatcctggccgacgagatgggcctgggcaagaccctgcagaccatcgccctgctgggctacctgaagcactacagaaacatccccggcccccacatggtgctggtgcccaagagcaccctgcacaactggatgaacgagttcaagagatgggtgcccagcctgagagtgatctgcttcgtgggcgacaaggacgccagagccgccttcatcagagacgagatgatgcccggcgagtgggacgtgtgcgtgaccagctacgagatggtgatcaaggagaagagcgtgttcaagaagttccactggagatacctggtgatcgacgaggcccacagaatcaagaacgagaagagcaagctgagcgagatcgtgagagagttcaagagcaccaacagactgctgctgaccggcacccccctgcagaacaacctgcacgagctgtgggccctgctgaacttcctgctgcccgacgtgttcaacagcgccgacgacttcgacagctggttcgacaccaagaactgcctgggcgaccagaagctggtggagagactgcacgccgtgctgaagcccttcctgctgagaagaatcaagaccgacgtggagaagagcctgccccccaagaaggagatcaagatctacctgggcctgagcaagatgcagagagagtggtacaccaagatcctgatgaaggacatcgacgtgctgaacagcagcggcaagatggacaagatgagactgctgaacatcctgatgcagctgagaaagtgctgcaaccacccctacctgttcgacggcgccgagcccggccccccctacaccaccgacgagcacatcgtgagcaacagcggcaagatggtggtgctggacaagctgctggccaagctgaaggagcagggcagcagagtgctgatcttcagccagatgaccagactgctggacatcctggaggactactgcatgtggagaggctacgagtactgcagactggacggccagaccccccacgaggagagagaggacaagttcctggaggtggagttcctgggccagagagaggccatcgaggccttcaacgcccccaacagcagcaagttcatcttcatgctgagcaccagagccggcggcctgggcatcaacctggccagcgccgacgtggtgatcctgtacgacagcgactggaacccccaggtggacctgcaggccatggacagagcccacagaatcggccagaagaagcccgtgagagtgttcagactgatcaccgacaacaccgtggaggagagaatcgtggagagagccgagatcaagctgagactggacagcatcgtgatccagcagggcagactgatcgaccagcagagcaacaagctggccaaggaggagatgctgcagatgatcagacacggcgccacccacgtgttcgccagcaaggagagcgagctgaccgacgaggacatcaccaccatcctggagagaggcgagaagaagaccgccgagatgaacgagagactgcagaagatgggcgagagcagcctgagaaacttcagaatggacatcgagcagagcctgtacaagttcgagggcgaggactacagagagaagcagaagctgggcatggtggagtggatcgagccccccaagagagagagaaaggccaactacgccgtggacgcctacttcagagaggccctgagagtgagcgagcccaagatccccaaggcccccagaccccccaagcagcccaacgtgcaggacttccagttcttcccccccagactgttcgagctgctggagaaggagatcctgtactacagaaagaccatcggctacaaggtgcccagaaaccccgacatccccaaccccgccctggcccagagagaggagcagaagaagatcgacggcgccgagcccctgacccccgaggagaccgaggagaaggagaagctgctgacccagggcttcaccaactggaccaagagagacttcaaccagttcatcaaggccaacgagaagtacggcagagacgacatcgacaacatcgccagagaggtggagggcaagagccccgaggaggtgatggagtacagcgccgtgttctgggagagatgcaacgagctgcaggacatcgagaagatcatggcccagatcgagagaggcgaggccagaatccagagaagaatcagcatcaagaaggccctggacgccaagatcgccagatacaaggcccccttccaccagctgagaatccagtacggcaccagcaagggcaagaactacaccgaggaggaggacagattcctgatctgcatgctgcacaagatgggcttcgacagagagaacgtgtacgaggagctgagacagtgcgtgagaaacgccccccagttcagattcgactggttcatcaagagcagaaccgccatggagttccagagaagatgcaacaccctgatcagcctgatcgagaaggagaacatggagatcgaggagagagagagagccgagaagaagaagagagccaccaagacccccatggtgaagttcagcgccttcagctag

SEQ ID NO: 277995 - DNA, 3165 bp, Artificial Sequence
  derived and/or modified sequence
atggaacaggacacagccgccgtggccgcaaccgtcgctgctgctgatgccactgcgaccatagtggttatcgaggatgagcagcctggcccgagtacatcccaggaagaaggtgcggctgctgcggccacagaagccacagctgctacagaaaagggggagaaaaagaaagagaaaaatgtctccagttttcagttgaagcttgccgccaaggctccaaaatctgaaaaggagatggatcccgagtatgaggagaaaatgaaggcagaccgagctaaacgcttcgagtttttgctgaaacagacagaattgttcgcacactttattcaaccaagcgcacaaaagtctcccacaagcccactcaacatgaaacttggccgtcctaggattaagaaggatgagaagcagtcactgataagcgctggcgattataggcatcgtaggaccgagcaggaggaggacgaagaactgctctcagaatccagaaagaccagcaacgtatgtatccgtttcgaggtgtcccctagctacgtgaaagggggacccctccgcgattaccagatccgtggccttaactggctaatcagcctttacgaaaatggggtgaacggcatcctggccgatgagatgggacttggaaaaaccctgcagacaattgccctgctgggctacctaaagcattaccgaaacattccaggacctcatatggtgcttgtgcctaaatccacgcttcacaattggatgaacgaattcaagcggtgggtgccaagtcttagggtgatctgtttcgtgggtgataaggacgcacgcgcggcttttatccgggacgagatgatgccaggagaatgggatgtctgcgtaactagctacgaaatggtgatcaaggagaagagtgttttcaagaaattccattggcggtaccttgtcatcgacgaggcccaccggatcaaaaatgaaaagagcaagctcagcgagatagtgagagagttcaagagcacaaatcggctgctgctgacaggcacgcccttgcagaataacctgcatgagctgtgggccctgcttaattttctcctccctgatgtcttcaattcagccgacgattttgattcctggtttgatactaagaactgtctgggggaccagaaactagtggagagactgcatgccgtgctgaagccttttttactacgccggatcaagacggatgtggagaaaagtcttcccccgaagaaagaaataaagatctaccttggcttgagtaaaatgcaaagggagtggtataccaaaatcttgatgaaagacattgatgtgttgaatagcagcggcaagatggataaaatgcgtctgttgaatattctgatgcagctgcgcaagtgctgtaaccacccatatcttttcgatggggctgaacctggaccaccctatacgacagatgaacacatcgtgagcaactccggcaaaatggtggttcttgacaaactgttggccaagctgaaagaacaagggtcccgggtgttgattttttcgcagatgacccgcttgcttgatatactggaggactactgtatgtggcggggttacgaatattgtcgactggatggacagacccctcacgaggagcgtgaagacaagtttctcgaggtggagtttctcggtcagcgcgaggcaatcgaggcattcaatgctccaaactcatctaagttcatcttcatgctctcaacacgtgccggggggctaggcatcaatctagcgtctgccgacgtagtgatcttgtatgacagtgattggaacccccaagttgatttgcaggcgatggatcgtgcacaccgcatcggccagaaaaagccagttcgggtcttccgcctgattaccgacaatactgtggaggagagaatcgtagaacgtgcagaaatcaagttaagacttgactccattgtgatacagcagggtcgcctcatcgatcagcagagtaacaaattggcgaaggaggagatgctgcagatgattcgacacggagctacacatgtattcgcctccaaggaaagcgagctaaccgacgaggatattaccaccatcttggagaggggcgaaaaaaagacagctgagatgaacgaacgtcttcagaagatgggcgaaagctctctgcgtaactttaggatggatatcgagcagtctttgtataaattcgagggagaagattatcgagagaaacagaagctgggcatggtggagtggatcgagcctccaaagagagagcgcaaggctaactatgccgtggacgcctattttagagaagcgctgcgagtcagcgagccaaagatccctaaggctccccgccctccaaagcagccgaatgtgcaggacttccagttcttcccccccagattgtttgaactgcttgagaaggagatcttatattacaggaagactattggatacaaggtgccaagaaacccagacattcccaatcccgcactggctcagcgtgaggaacagaaaaaaattgatggcgcagagcctctgacccccgaagagactgaggagaaagagaaattactgacgcagggctttacaaattggaccaaaagggacttcaatcagtttatcaaagccaacgagaaatatggcagggacgacatcgacaacatcgcccgagaggttgagggcaagtcccccgaggaagtgatggagtacagcgctgtgttctgggagagatgcaacgagttgcaggatatcgaaaagatcatggcccagattgagcggggcgaggcaagaatccaacgacgcatttctatcaagaaggctctcgacgcgaaaatcgccaggtacaaagctccctttcaccagcttagaattcagtacggcacctcaaagggaaaaaactatacggaggaagaagacaggttcttgatctgtatgctgcataagatgggcttcgaccgggagaatgtgtacgaggaactgcgtcagtgtgtacgtaatgcgcctcagtttcggtttgactggtttatcaaaagcaggaccgccatggagttccagaggaggtgtaatactctgatttctctcatcgagaaggaaaacatggagatcgaggagagagaaagagcggagaagaagaagcgggccactaagactcccatggtgaagttcagtgcattctcctag

SEQ ID NO: 277996 - DNA, 3165 bp, Artificial Sequence
  derived and/or modified sequence
atggagcaggacacagctgctgtggccgccaccgtggccgctgctgatgccacagccaccatcgtggtgattgaagatgagcagcccggccccagcaccagccaggaggagggcgctgctgctgctgccacagaggccacagctgccacagagaagggggagaagaagaaggagaagaatgtgtcctccttccagctgaagctggccgccaaggcccccaagtctgagaaggagatggaccctgaatatgaggagaagatgaaggctgaccgggccaagagatttgagttcctgctgaagcagacagagctgtttgcccacttcatccagcccagcgcccagaagagccccaccagccccctgaacatgaagctgggccggccccgcatcaagaaggatgagaagcagagcctcatctctgctggggactaccgccacagaagaacagagcaggaggaggatgaggagctgctgtctgagagcaggaagaccagcaatgtgtgcatccgctttgaggtgagccccagctatgtgaagggcggccccctgcgggactaccagatccggggcctgaactggctgatcagcctgtatgaaaatggagtgaatggcatcctggctgatgagatgggcctgggcaagaccctgcagaccatcgccctgctgggctacctgaagcactacagaaacatccctggcccccacatggtgctggtgcccaagagcaccctgcacaactggatgaatgagttcaagcgctgggtgcccagcctgcgggtcatctgctttgtgggggacaaggatgcccgggccgccttcatcagagatgagatgatgcctggagagtgggatgtgtgtgtgaccagctatgagatggtgatcaaggagaagagcgtcttcaagaagttccactggagatacctggtgattgatgaggcccaccgcatcaagaatgagaagagcaagctgtctgagatcgtgcgggagttcaagagcaccaaccggctgctgctgaccggcacccccctgcagaacaacctgcacgagctgtgggccctgctgaacttcctgctgcctgatgtgttcaacagcgcagatgactttgacagctggtttgacaccaagaactgcctgggggaccagaagctggtggagcggctgcatgctgtgctgaagcccttcctgctgcggcgcatcaagacagatgtggagaagagcctgccccccaagaaggagatcaagatctacctgggcctgagcaagatgcagcgggagtggtacaccaagatcctgatgaaggacattgatgtgctgaacagcagcggcaagatggacaagatgaggctgctgaacatcctgatgcagctgaggaagtgctgcaaccacccctacctgtttgatggagctgagcccggccccccctacaccacagatgagcacatcgtgagcaacagcggcaagatggtggtgctggacaagctgctggccaagctgaaggagcagggcagccgggtgctgatcttcagccagatgacccggctgctggacatcctggaggactactgcatgtggaggggctatgagtactgccgcctggatggccagacccctcatgaggagcgggaggacaagttcctggaggtggagttcctgggccagcgggaggccatcgaggccttcaatgcccccaacagcagcaagttcatcttcatgctgagcacccgggccggcggcctgggcatcaacctggccagcgcagatgtggtgatcctgtatgacagcgactggaacccccaggtggacctgcaggccatggaccgggcccacagaattggccagaagaagcctgtgcgggtcttccgcctcatcacagacaacacagtggaggagcgcatcgtggagcgggcagagatcaagctgcggctggacagcatcgtcatccagcagggccgcctgattgaccagcagagcaacaagctggccaaggaggagatgctgcagatgatcagacatggagccacccacgtgtttgccagcaaggagagcgagctgacagatgaggacatcaccaccatcctggagcggggggagaagaagacagctgagatgaatgaaaggctgcagaagatgggagagagcagcctgaggaacttcaggatggacatcgagcagagcctgtacaagtttgaaggagaggactaccgggagaagcagaagctgggcatggtggagtggattgagccccccaagcgggagaggaaggccaactatgctgtggatgcctacttccgggaggccctgcgggtgtctgagcccaagatccccaaggccccccggccccccaagcagcccaacgtgcaggacttccagttcttccccccccggctgtttgagctgctggagaaggagatcctgtactacaggaagaccatcggctacaaggtgcccagaaatccagacatccccaacccagccctggcccagcgggaggagcagaagaagattgatggagctgagcccctgaccccagaggagacagaggagaaggagaagctgctgacccagggcttcaccaactggaccaagagggacttcaaccagttcatcaaggccaatgagaagtatggaagagatgacatcgacaacatcgcccgggaggtggagggcaagagccctgaggaggtgatggagtacagcgctgtgttctgggagcgctgcaatgagctgcaggacatcgagaagatcatggcccagatcgagcggggggaggcccgcatccagaggcgcatcagcatcaagaaggccctggatgccaagatcgcccgctacaaggcccccttccaccagctgcgcatccagtatggcaccagcaagggcaagaactacacagaggaggaggaccgcttcctgatctgcatgctgcacaagatgggctttgaccgggagaatgtgtatgaggagctgcggcagtgtgtgagaaatgccccccagttccgctttgactggttcatcaagagcaggacagccatggagttccagaggcgctgcaacaccctcatcagcctgattgagaaggagaacatggagattgaggagcgggagcgggcagagaagaagaagagggccaccaagacccccatggtgaagttcagcgccttctcctag

SEQ ID NO: 277997 - DNA, 3165 bp, Artificial Sequence
  derived and/or modified sequence
atggagcaggacaccgccgccgtggccgccaccgtggccgccgccgacgcaacggctacgatcgtggtgatagaagacgagcagcccggcccttctacatcacaggaggaaggtgccgctgccgccgctacagaggccacagccgctactgaaaagggcgagaagaagaaggaaaaaaatgtgagcagtttccagcttaagctagctgctaaagctccaaagagcgaaaaggagatggaccctgagtacgaagagaaaatgaaagcagacagagccaagagattcgagttcttgctgaagcagaccgagctgttcgctcactttattcagccctccgcccagaagtcaccaacctcacctttgaatatgaaactgggcagacctaggattaaaaaggacgagaagcagtcactgatcagcgccggtgactacaggcaccgccgcacagagcaagaggaagacgaggaactcttgagcgagtccagaaaaactagcaacgtgtgcatccggttcgaggtctccccaagctatgtcaaagggggcccgctgcgggactaccagatccggggcctgaactggcttatcagcctgtatgaaaacggcgtcaatggcatcctggccgacgagatgggcctgggaaagacccttcagacaatagctctgttgggctaccttaagcattatcggaacatccccggccctcacatggtgctcgttccaaagtctaccctgcataattggatgaatgagtttaaacgctgggtgccaagcttacgtgtcatatgcttcgtcggggacaaggatgccagagcagcttttatccgggacgagatgatgcccggggaatgggacgtgtgcgtgaccagttacgaaatggttataaaggaaaagagcgtgttcaagaagtttcactggcggtacttagttattgatgaggcccatcgcatcaaaaacgagaaaagcaagctcagcgaaatcgtccgggagtttaagtcaacaaatcgtttgttgctgaccggtactcccctccagaacaacctccacgagctgtgggccctcctgaactttctgctgccggacgtttttaatagtgctgatgacttcgactcttggtttgacactaagaattgtttaggtgatcagaaattagtcgaacggttacatgcagtcctaaagccattcttgctgaggcgaattaagactgacgttgagaaaagtcttccacccaagaaggagattaaaatttaccttggactcagcaagatgcagcgcgaatggtatacaaagattttaatgaaagacatcgacgtgctgaattccagcggaaagatggacaaaatgcgcttacttaacattctcatgcaactcagaaaatgctgtaaccatccctatctgtttgacggcgctgaacctgggcctccgtatactactgacgaacatatcgtgtccaattctggcaagatggtggtgcttgataagctgttggcaaaactcaaggagcagggctcacgggttttaattttcagtcagatgacgcggctgctcgatatactcgaggactattgtatgtggagggggtacgagtactgcagactggacggacagaccccgcatgaggagcgggaagacaagttcctggaagtggaatttctaggacagagagaagcgattgaggcttttaacgccccaaactcttccaagttcatttttatgctctcaacaagggctggtggactgggcataaacctggcttccgccgacgtggttattctttatgactcagattggaatccgcaagtggacctgcaggctatggaccgggcccaccgtatcggacagaaaaaaccagtgcgggtctttaggttgattactgataacaccgtggaagaacgtatcgtggagagagctgaaatcaagttgcgactcgactccatagtgattcaacagggcagactgatcgatcagcagtctaacaagcttgccaaggaggaaatgctccagatgatccgccacggtgccactcatgtgttcgcatccaaagagtccgagctaaccgacgaggacatcactacaatcttagaaagaggagagaaaaagactgccgagatgaatgagaggcttcagaagatgggggaatcctctcttcgcaacttcaggatggacattgagcaaagcctttataagtttgagggagaggattaccgcgaaaagcagaaactcggcatggttgagtggatcgaacccccaaagcgggagcgcaaggcaaattatgccgtggatgcctactttagagaggccttgcgggtcagtgagccaaagattcctaaggcccctaggcctcccaagcagcccaacgtgcaggatttccagtttttcccaccccgtctcttcgaactattagaaaaagagattttgtattaccgaaaaaccatcggctataaggttcccaggaaccccgatatccccaaccccgcactagcacaaagagaggagcagaagaaaatagacggcgcggaacctctaactcccgaggaaactgaagagaaggagaaactgctgacccagggctttaccaattggacgaaacgcgactttaatcagtttatcaaagcaaatgagaagtacggcagagacgacatagacaacatagctagggaggtcgagggcaagagtcccgaagaagttatggaatatagcgccgtgttctgggagagatgcaacgaacttcaggatatagagaaaattatggcacaaatcgaaaggggagaagcaagaattcagagaaggatcagcatcaaaaaggctctggacgctaagatcgcccgctacaaagccccctttcaccagttgagaatccagtatggcacttctaagggaaagaactacaccgaggaagaggaccggttcttaatctgcatgttgcacaagatgggcttcgacagagaaaacgtgtatgaggagctgagacaatgcgttagaaacgcaccacagtttcggtttgactggttcataaagagccgcacagctatggagtttcagcgccgctgtaatacactgattagcttaatcgaaaaggaaaatatggaaattgaggagagggaaagagccgagaagaagaagcgtgctaccaagacacccatggtgaagttctcggcctttagctag

SEQ ID NO: 277998 - DNA, 3165 bp, Artificial Sequence
  derived and/or modified sequence
atggagcaggacacagcggcagttgcagccactgtggcagctgccgatgcaacagcaaccatcgttgtgatcgaggatgaacagcccggaccctccactagccaggaggaaggcgcagccgctgctgcgacagaggctacagcagcgacggagaagggtgagaaaaaaaaggagaagaacgtctcatcctttcaattaaaactcgctgccaaggctcccaagagcgagaaggagatggaccccgaatacgaggaaaaaatgaaagccgaccgcgctaagcgatttgaattcctgttgaaacaaacagagctcttcgcccacttcattcagcccagtgctcaaaagtctcctaccagccccctgaacatgaagctcgggaggcccagaatcaagaaggacgagaagcagagcctcatcagcgcgggagactacaggcatcgacgcactgagcaagaggaagatgaggagctgctctcggagtcccgcaaaacctccaatgtgtgcataaggttcgaagtgagcccctcctacgtgaagggaggccctctcagagactaccagatcagaggcttaaattggctcatttctctgtacgaaaacggagtgaatgggattctcgccgacgaaatggggctcggcaagacgctccaaacgattgcactgttgggatacctgaagcactatcgcaacataccagggcctcatatggtgctcgtaccgaagtccactctgcacaattggatgaacgaatttaagcgatgggtgccctccctgcgagtgatctgcttcgtcggggacaaggatgctagggcagctttcattcgcgatgaaatgatgccaggtgaatgggatgtatgcgtcacttcctatgaaatggtcattaaagagaaatcggtctttaaaaaattccattggcgctatttggtgattgacgaggcccaccgtattaagaatgagaagagcaagctgagtgagatagtgcgggaattcaaaagcaccaacagattattgttaacaggaacacccttgcagaacaacctccatgagttatgggctttgctaaattttctcttgcctgacgtattcaattctgctgatgattttgacagctggttcgacacgaaaaactgcctgggagaccaaaagttggtcgagaggcttcacgctgtcctaaaacccttcctgctccggagaattaagaccgacgtggagaaatcattacctccaaaaaaggaaatcaaaatctacctcggactgagtaaaatgcaacgggagtggtacacaaaaatcttaatgaaagacatcgatgtcctgaattccagcggaaagatggacaaaatgaggctccttaacatactcatgcagctacgtaagtgctgtaatcacccctacctcttcgatggagccgagcccggtccgccatatactaccgatgagcatatcgtgtctaattctggcaagatggtagtactggacaagctcctggcgaagttgaaagaacaaggcagtcgagtgcttattttctcccagatgacccgattgctcgacatcctagaagattattgtatgtggcggggatacgaatactgtcgtctggacggccaaaccccccatgaggagcgcgaggataaatttttggaagtcgaatttctcggacagcgggaagccattgaggccttcaatgcccctaattcaagcaagtttatcttcatgctgagtactagggccggagggttggggattaatctggcaagcgccgatgtggtgattctctatgatagcgattggaaccctcaggttgatttacaggccatggaccgggctcatcggattggccagaaaaagcccgtccgcgtgtttagactgattaccgataacaccgtggaggaacgcattgttgagcgagctgagattaaactccgccttgactctatcgtgattcagcaggggaggcttattgaccaacagtcaaataaactcgcgaaggaagagatgttacagatgattcgacacggagctacacacgtctttgcatccaaggagtcagaacttaccgacgaggatatcactaccatattggagagaggggagaaaaaaaccgcagaaatgaatgaacggctgcagaagatgggtgaaagctccttgcgaaactttcgaatggacatcgagcagtccctgtataagttcgaaggtgaggactatagggagaagcagaaattggggatggtcgagtggatcgagcctcccaagagggagcggaaagccaattatgcggtggacgcctattttcgcgaagcactgcgcgtgtcagagccgaaaatacctaaggccccaaggcctcccaaacaacccaacgttcaggactttcagtttttcccccctcgcctttttgaactgcttgagaaggaaatcctctactaccgtaaaaccatcggttacaaggtccctaggaacccagatattcccaatcctgccctggctcagagggaggagcagaaaaaaattgacggagcggaaccactaacacccgaagaaaccgaggaaaaagaaaaacttctgactcaaggcttcactaattggaccaaacgggatttcaatcagttcataaaggcgaacgagaaatacggacgggacgatattgataatattgcccgagaggtcgagggtaaatcaccagaagaggtcatggaatattcagccgttttttgggagcgttgcaatgagctgcaggatattgagaaaattatggcccaaatcgagcggggagaggcgcgtattcagagacgaatttcgattaaaaaagctttggacgccaagattgccagatacaaggctcctttccaccagctgaggattcagtatggtacatctaagggcaagaattatactgaggaagaggatagattcctgatatgcatgctgcataagatgggattcgatcgggagaacgtgtatgaagagctgaggcaatgtgtgcgcaacgcccctcaatttaggtttgactggttcatcaagtccaggacagctatggaattccagaggcgctgcaacactttaatttcattaatcgagaaagagaacatggagatcgaagaacgggaacgcgcagaaaaaaaaaagcgcgcaaccaagactccaatggttaagttttctgctttttcttag

SEQ ID NO: 277999 - DNA, 4099 bp, Artificial Sequence
  derived and/or modified sequence
gagcgaaggggttggaagcggagtgattccccacccctgctccatctagctctttccagtgcagccactgccgccgcccaggagccctcgtcccctgccttgtccccctactcgttcccgctcccacggcatggagcaggacactgccgcagtggcagccaccgtggcagccgcggatgcgaccgccactatcgtggtcatagaggacgagcagcccgggccgtccacctctcaggaggagggagcggccgccgcggccaccgaagccaccgcggccacggagaagggcgagaagaagaaggagaaaaacgtttcttcatttcaactcaaacttgctgctaaagcgcctaaatctgaaaaggaaatggacccagaatatgaagagaaaatgaaagccgaccgagcaaagagatttgaatttttactgaagcagacagaactttttgcacatttcattcagccttcagcacagaaatctccaacatctccactgaacatgaaattgggacgtccccgaataaagaaagatgaaaagcagagcttaatttctgctggagactaccgccataggcgcacagagcaagaagaagatgaagagctactgtctgagagtcggaaaacatctaatgtgtgtattagatttgaggtgtcaccttcatatgtgaaaggggggccactgagagattatcagattcgaggactgaattggttgatctctttatatgaaaatggagtcaatggcattttggctgatgaaatgggccttgggaaaactttacaaacaattgctttgcttggttacctgaaacactaccgaaatattcctggacctcacatggttttagttccaaagtctactttacacaactggatgaatgaatttaaacgatgggtcccatctctccgtgtcatttgttttgtcggagacaaggatgccagagctgcttttattcgtgatgaaatgatgccaggagagtgggatgtttgcgttacttcttatgagatggtaattaaagaaaaatctgtattcaaaaagtttcactggcgatacctggtcattgatgaagctcacagaataaagaatgaaaaatctaagctttcagagattgttcgtgagttcaagtcgactaaccgcttgctcctaactggaacacctttgcagaataacctgcatgaactgtgggccttactcaactttttattgcctgatgtctttaattctgcagatgactttgattcttggtttgacactaaaaattgtcttggtgatcaaaaactcgtggaaagacttcatgcagttttaaaaccatttttgttacgccgtataaaaactgatgtagagaagagtctgccacctaaaaaggaaataaagatttacttggggctgagtaagatgcaacgagaatggtatacaaaaatcctgatgaaagatattgatgttttaaactcttctggcaagatggacaagatgcgactcttaaacattctgatgcagcttcgaaagtgttgtaatcatccatatctgtttgatggtgctgaacctggtccaccttataccactgatgagcatattgtcagcaacagtggtaaaatggtagttctggataaactattggccaaactcaaagaacagggttcaagggttctcattttcagccagatgactcgcttgctggatattttggaagattattgcatgtggcgtggttatgagtattgtcgactggatggacaaaccccgcatgaagaaagagaggataaattcctagaagtggaatttctgggtcaaagggaagcaatagaggcttttaatgctcctaatagtagcaaattcatctttatgctaagtaccagggctggaggtctcggaattaacctggcaagtgctgatgtggttatactatatgattcagactggaacccacaggttgatctacaagctatggatcgagcacatcgtattggtcagaagaaaccagtacgtgtattccgtctcatcactgacaacactgttgaagagaggattgtagaaagagctgagataaaactgagactcgattcaattgttatacaacaaggaagactcattgaccaacagtctaacaagctggcaaaagaggaaatgttacaaatgatacggcatggagccacccatgtttttgcttctaaagagagtgagttgacagatgaagacattacaactattctggaaagaggggaaaagaagactgcagagatgaatgaacgcctgcaaaaaatgggagagtcttctctaagaaattttagaatggacattgaacaaagtttatacaaatttgagggagaagattatagagaaaaacagaagcttggcatggtggaatggattgaacctcctaaacgagaacgcaaagcaaactacgcagtggatgcctactttagagaggctttgcgtgtcagcgagccaaagattccaaaggctccacggcctccaaaacagccaaatgttcaggattttcaatttttcccaccacgcttatttgagctcctggaaaaggaaattctttattatcggaagacaataggctataaggttccaaggaatcctgatatcccaaatccagctctggctcaaagagaagagcaaaaaaagattgatggagctgaacctcttacaccagaagagactgaagaaaaggaaaaacttctcacacaaggtttcacaaactggactaaacgagattttaaccagtttattaaagctaatgagaaatatggaagagatgacattgataacatagctcgagaggtagagggcaaatcccctgaggaggtcatggagtattcagctgtattttgggaacgttgcaatgaattacaggacattgagaaaattatggctcaaattgaacgtggagaagcaagaattcaacgaaggatcagtatcaagaaagccctggatgccaaaattgcaagatacaaggctccatttcatcagttgcgcattcagtatggaaccagcaaaggaaagaactatactgaggaagaagatagattcttgatttgtatgttacacaaaatgggctttgatagagaaaatgtatatgaagaattaagacagtgtgtacgaaatgctccccagtttagatttgactggtttatcaagtctaggactgccatggaattccagagacgctgtaacactctgatttcattgattgagaaagaaaatatggaaattgaggaaagagagagagcagaaaagaagaaacgggcaactaaaactccaatggtaaaattttcagcattttcctaacttttagatttaacattgttgggccatttaaaatgtgcatattggagcagaacattaaatctgtttccattttagtcacagaaaagaaaagcagagtcagctactgagagctctggaaagaaggatgtcaagaaggtgaaatcctaaagcctagaaataaagttttaaatgggaaactgctattttcttgttcccatcttcaaatgctaattgccagttccagtgtattcatggtactctaagaaaaatctctttggttttgatttcttgcatattttatatattttacaatgctttctacctgaaatgtgtagctttatattttatggcattctagtatttttgtgtactgtattttgtgcatttcatgtcttcatcaaaatcctctcagtccttgttcttttgaagcttgtgctgaggttttagcttttctatgttttatatgccgctgctttgaaagagaacctagattctatagttgtattattgttgtttcatactttaaatttatatggctgtggaaaaacgaattaaaatgttttgaggagaaagactttttcacttctttgttgctttcttttctattgagtctgggcttgtttgtgttactgcatactgtgattagcataataattgtttctttgaggtcatctaaatatttttttcctaaaggaataaagggtgaggaaagaaaaatattaaaaaagctaatatttgatactgtgcttgctgtcagtatgcattacatttaaattattctctattcaagtgggaaaatataataaagaaatgtctataagaaat

SEQ ID NO: 278000 - DNA, 3018 bp, Artificial Sequence
  derived and/or modified sequence
atggagcaggacaccgccgccgtggccgccaccgtggccgccgccgacgccaccgccaccatcgtggtgatcgaggacgagcagcccggccccagcaccagccaggaggagaagaacgtgagcagcttccagctgaagctggccgccaaggcccccaagagcgagaaggagatggaccccgagtacgaggagaagatgaaggccgacagagccaagagattcgagttcctgctgaagcagaccgagctgttcgcccacttcatccagcccagcgcccagaagagccccaccagccccctgaacatgaagctgggcagacccagaatcaagaaggacgagaagcagagcctgatcagcgccggcgactacagacacagaagaaccgagcaggaggaggacgaggagctgctgagcgagagcagaaagaccagcaacgtgtgcatcagattcgaggtgagccccagctacgtgaagggcggccccctgagagactaccagatcagaggcctgaactggctgatcagcctgtacgagaacggcgtgaacggcatcctggccgacgagatgggcctgggcaagaccctgcagaccatcgccctgctgggctacctgaagcactacagaaacatccccggcccccacatggtgctggtgcccaagagcaccctgcacaactggatgaacgagttcaagagatgggtgcccagcctgagagtgatctgcttcgtgggcgacaaggacgccagagccgccttcatcagagacgagatgatgcccggcgagtgggacgtgtgcgtgaccagctacgagatggtgatcaaggagaagagcgtgttcaagaagttccactggagatacctggtgatcgacgaggcccacagaatcaagaacgagaagagcaagctgagcgagatcgtgagagagttcaagagcaccaacagactgctgctgaccggcacccccctgcagaacaacctgcacgagctgtgggccctgctgaacttcctgctgcccgacgtgttcaacagcgccgacgacttcgacagctggttcgacaccaagaactgcctgggcgaccagaagctggtggagagactgcacgccgtgctgaagcccttcctgctgagaagaatcaagaccgacgtggagaagagcctgccccccaagaaggagatcaagatctacctgggcctgagcaagatgcagagagagtggtacaccaagatcctgatgaaggacatcgacgtgctgaacagcagcggcaagatggacaagatgagactgctgaacatcctgatgcagctgagaaagtgctgcaaccacccctacctgttcgacggcgccgagcccggccccccctacaccaccgacgagcacatcgtgagcaacagcggcaagatggtggtgctggacaagctgctggccaagctgaaggagcagggcagcagagtgctgatcttcagccagatgaccagactgctggacatcctggaggactactgcatgtggagaggctacgagtactgcagactggacggccagaccccccacgaggagagagaggacaagttcctggaggtggagttcctgggccagagagaggccatcgaggccttcaacgcccccaacagcagcaagttcatcttcatgctgagcaccagagccggcggcctgggcatcaacctggccagcgccgacgtggtgatcctgtacgacagcgactggaacccccaggtggacctgcaggccatggacagagcccacagaatcggccagaagaagcccgtgagagtgttcagactgatcaccgacaacaccgtggaggagagaatcgtggagagagccgagatcaagctgagactggacagcatcgtgatccagcagggcagactgatcgaccagcagagcaacaagctggccaaggaggagatgctgcagatgatcagacacggcgccacccacgtgttcgccagcaaggagagcgagctgaccgacgaggacatcaccaccatcctggagagaggcgagaagaagaccgccgagatgaacgagagactgcagaagatgggcgagagcagcctgagaaacttcagaatggacatcgagcagagcctgtacaagttcgagggcgaggactacagagagaagcagaagctgggcatggtggagtggatcgagccccccaagagagagagaaaggccaactacgccgtggacgcctacttcagagaggccctgagagtgagcgagcccaagatccccaaggcccccagaccccccaagcagcccaacgtgcaggacttccagttcttcccccccagactgttcgagctgctggagaaggagatcctgtactacagaaagaccatcggctacaaggtgcccagaaaccccgacatccccaaccccgccctggcccagagagaggagcagaagaagatcgacggcgccgagcccctgacccccgaggagaccgaggagaaggagaagctgctgacccagggcttcaccaactggaccaagagagacttcaaccagttcatcaaggccaacgagaagtacggcagagacgacatcgacaacatcgccagagaggtggagggcaagagccccgaggaggtgatggagtacagcgccgtgttctgggagagatgcaacgagctgcaggacatcgagaagatcatggcccagatcgagagaggcgaggccagaatccagagaagaatcagcatcaagaaggccctggacgccaagatcgccagatacaaggcccccttccaccagctgagaatccagtacggcaccagcaagggcaagaactacaccgaggaggaggacagattcctgatctgcatgctgcacaagatgggcttcgacagagagaacgtgtacgaggagctgagacagtgcgtgagaaacgccccccagttcagattcgactggttcatcaagagcagaaccgccatggagttccagagaagatgcaacaccctgatcagcctgatcgagaaggagtag

SEQ ID NO: 278001 - DNA, 3018 bp, Artificial Sequence
  derived and/or modified sequence
atggagcaggacacagctgccgttgcagcaacagtggctgccgctgacgccacggccaccattgtagttatcgaggacgagcagcccggcccctcaacatcgcaagaagagaagaatgtgtcaagctttcagttgaagctcgcggctaaagctccaaagagcgaaaaagagatggaccctgagtatgaggaaaagatgaaagcggacagggccaaacgcttcgagttcctgttaaaacaaaccgagttatttgcacactttatccagccctcagcccagaagagcccgacatctccattaaacatgaaattagggcgtcccaggatcaaaaaggacgaaaaacagagcctcatttccgcaggtgattaccgtcatcgacgcactgagcaggaggaggatgaagaactgctcagcgagagcagaaaaacctccaatgtgtgcatcagatttgaggtatcaccaagttacgtgaaggggggaccgctaagggattatcagattcgggggttaaactggctgattagtctctatgagaatggcgtcaacgggatcctcgctgatgagatgggcctgggtaagactctgcagactatagcactacttggataccttaaacactataggaatattcccggacctcatatggtgctcgtgcctaagtccacacttcataactggatgaacgaatttaagcgttgggtcccgagcttgcgcgtcatttgctttgtgggcgacaaggacgcaagagctgcatttattagggacgagatgatgccaggtgaatgggacgtatgtgttacatcatacgagatggtcatcaaggagaagagcgtatttaaaaagtttcactggagatacctggtgatcgatgaggctcaccgtatcaagaatgaaaaatccaagctctccgagatcgttcgggaattcaagtccaccaataggctgctattaacaggcacacccctgcagaataacctgcacgaattatgggccttgctaaattttcttttacccgatgtctttaattctgcagacgacttcgactcctggtttgacaccaaaaattgtttgggagatcaaaaactggtggaaagattacatgcagtcttaaagcccttcctactcaggcgcattaagaccgatgtcgaaaaatcgttgccccccaagaaggagattaaaatttatttgggcttatcgaaaatgcagcgtgaatggtacactaagatcttaatgaaagacatcgacgtgctgaactcttcgggtaagatggacaagatgcgactgcttaatattctaatgcaattgagaaaatgttgtaatcacccatacctattcgatggggccgaacccggaccaccatatacaaccgacgaacacattgtgagcaacagtggcaagatggtggtgttagataaattactggctaagctgaaagagcagggctcgcgcgtgctgatcttcagccagatgacccggttactggatatcctggaagactactgcatgtggaggggatatgagtattgtagactcgacggccagactcctcatgaagagagggaggataagttccttgaggttgagttcttaggacaacgcgaagccattgaggctttcaacgccccaaattcttcaaaattcatattcatgctcagcactcgcgcagggggcctgggcattaacctagctagcgctgacgtggttatcttgtatgactccgattggaatcctcaagtagatctccaagccatggaccgcgctcaccggatcgggcagaagaaacctgtgagggtgttccgactgatcacagacaacaccgtcgaggagcgcattgttgaacgcgcagagatcaagctacgactcgatagtatagtgatccagcaggggcggcttattgatcagcagtctaacaaactagctaaagaagaaatgttgcaaatgatacgccacggcgccacccacgtcttcgccagcaaggaaagcgaactgacggatgaggacatcacaaccatactggagcggggggaaaaaaagaccgccgagatgaacgaacgcttgcagaaaatgggagaatcttcactgcgtaactttcgaatggacatagaacaatcgttatataagtttgaaggtgaggactatcgggagaaacaaaaattggggatggttgagtggatagaaccacccaagagggagcggaaagcaaattacgccgttgacgcatacttcagagaagcacttcgagtttcagagccaaaaatacctaaggcaccccggcctcctaaacagcctaatgtgcaggacttccagttctttccccctagactgtttgagctcctggagaaggaaatactttactaccgcaaaactatcgggtataaggtaccacggaatcctgacattccaaacccagctctggcacagcgagaggaacagaagaaaattgatggggcagagccattgacacctgaagagacagaggaaaaggaaaagctcctgactcaagggttcacaaactggaccaaaagggattttaatcaattcatcaaggctaatgagaagtacgggcgtgacgatatcgacaatatcgctcgagaggtggagggaaaatcacccgaagaagtcatggaatactcagcagttttttgggagcggtgtaacgaactacaggatatcgaaaaaatcatggcgcaaatcgagcgcggcgaggcccggattcagcggcggattagcattaaaaaggccctcgacgccaagatagcacgttacaaagcccccttccaccagctcagaatccagtacgggacttccaaagggaaaaactacaccgaagaagaggacaggtttctgatatgcatgctgcacaagatgggatttgatagggagaacgtgtacgaggaactgcgtcagtgcgtcaggaacgctcctcagttcaggtttgattggttcatcaaatccaggaccgccatggaatttcagcgtcggtgcaataccttaatcagcctcatcgaaaaggagtag

SEQ ID NO: 278002 - DNA, 3018 bp, Artificial Sequence
  derived and/or modified sequence
atggagcaggacacagctgctgtggccgccaccgtggccgctgctgatgccacagccaccatcgtggtgattgaagatgagcagcccggccccagcaccagccaggaggagaagaatgtgagcagcttccagctgaagctggccgccaaggcccccaagtctgagaaggagatggaccctgaatatgaggagaagatgaaggctgaccgggccaagagatttgagttcctgctgaagcagacagagctgtttgcccacttcatccagcccagcgcccagaagagccccaccagccccctgaacatgaagctgggccggccccgcatcaagaaggatgagaagcagagcctcatctctgctggggactaccgccacagaagaacagagcaggaggaggatgaggagctgctgtctgagagcaggaagaccagcaatgtgtgcatccgctttgaggtgagccccagctatgtgaagggcggccccctgcgggactaccagatccggggcctgaactggctgatcagcctgtatgaaaatggagtgaatggcatcctggctgatgagatgggcctgggcaagaccctgcagaccatcgccctgctgggctacctgaagcactacagaaacatccctggcccccacatggtgctggtgcccaagagcaccctgcacaactggatgaatgagttcaagcgctgggtgcccagcctgcgggtcatctgctttgtgggggacaaggatgcccgggccgccttcatcagagatgagatgatgcctggagagtgggatgtgtgtgtgaccagctatgagatggtgatcaaggagaagtctgtgttcaagaagttccactggagatacctggtgattgatgaggcccaccgcatcaagaatgagaagagcaagctgtctgaaattgtgcgggagttcaagagcaccaaccggctgctgctgaccggcacccccctgcagaacaacctgcacgagctgtgggccctgctgaacttcctgctgcctgatgtgttcaacagcgcagatgactttgacagctggtttgacaccaagaactgcctgggggaccagaagctggtggagcggctgcatgctgtgctgaagcccttcctgctgcggcgcatcaagacagatgtggagaagagcctgccccccaagaaggagatcaagatctacctgggcctgagcaagatgcagcgggagtggtacaccaagatcctgatgaaggacattgatgtgctgaacagcagcggcaagatggacaagatgaggctgctgaacatcctgatgcagctgaggaagtgctgcaaccacccctacctgtttgatggagctgagcccggccccccctacaccacagatgagcacatcgtgagcaacagcggcaagatggtggtgctggacaagctgctggccaagctgaaggagcagggcagccgggtgctgatcttcagccagatgacccggctgctggacatcctggaggactactgcatgtggaggggctatgagtactgccgcctggatggccagacccctcatgaggagcgggaggacaagttcctggaggtggagttcctgggccagcgggaggccatcgaggccttcaatgcccccaacagcagcaagttcatcttcatgctgagcaccagggctgggggcctgggcatcaacctggccagcgcagatgtggtgatcctgtatgacagcgactggaacccccaggtggacctgcaggccatggaccgggcccaccgcatcggccagaagaagcctgtgcgggtcttccgcctcatcacagacaacacagtggaggagagaattgtggagagagctgagatcaagctgcggctggacagcatcgtcatccagcagggccgcctgattgaccagcagagcaacaagctggccaaggaggagatgctgcagatgatccgccacggggccacccacgtgtttgccagcaaggagagcgagctgacagatgaggacatcaccaccatcctggagcggggggagaagaagacagctgagatgaatgaaaggctgcagaagatgggagagagcagcctgaggaacttcaggatggacatcgagcagagcctgtacaagtttgaaggagaggactaccgggagaagcagaagctgggcatggtggagtggattgagccccccaagcgggagaggaaggccaactatgctgtggatgcctacttccgggaggccctgcgggtgtctgagcccaagatccccaaggcccccaggcctcccaagcagcccaacgtgcaggacttccagttcttccccccccggctgtttgagctgctggagaaggagatcctgtactacaggaagaccatcggctacaaggtgcccaggaacccagacatccccaacccagccctggcccagcgggaggagcagaagaagattgatggagctgagcccctgaccccagaggagacagaggagaaggagaagctgctgacccagggcttcaccaactggaccaagagggacttcaaccagttcatcaaggccaatgagaagtatggaagagatgacatcgacaacatcgcccgggaggtggagggcaagagccctgaggaggtgatggagtacagcgctgtgttctgggagcgctgcaatgagctgcaggacatcgagaagatcatggcccagatcgagcggggggaggcccgcatccagaggcgcatcagcatcaagaaggccctggatgccaagatcgcccgctacaaggcccccttccaccagctgcgcatccagtatggcaccagcaagggcaagaactacacagaggaggaggaccgcttcctgatctgcatgctgcacaagatgggctttgacagagaaaatgtgtatgaggagctgcggcagtgtgtgagaaatgccccccagttccgctttgactggttcatcaagagcaggacagccatggagttccagaggcgctgcaacaccctcatcagcctcatcgagaaggagtag

SEQ ID NO: 278003 - DNA, 3018 bp, Artificial Sequence
  derived and/or modified sequence
atggagcaggacaccgccgccgtggccgccaccgtggccgccgccgacgccaccgcaacgatcgttgtgatagaagatgagcaacctggtccttccactagccaggaagaaaaaaatgtctcatccttccaactcaagctcgcggcaaaggcccccaaatcagaaaaagagatggatcctgagtatgaagaaaaaatgaaggccgaccgagccaagcggttcgagttcctactgaaacagacagagctgtttgctcacttcattcagccttccgctcagaagagcccgacgtcacccctcaatatgaagctgggacggccgcgaattaaaaaggacgagaagcagagcctcatctcagctggtgactacagacatagacgcactgagcaggaagaggacgaggaacttctgtctgagtcacgaaagaccagtaatgtgtgtatccggtttgaagtatctccatcttacgtgaaggggggccctcttagagactatcagatcaggggcctcaactggcttatttcattgtatgaaaacggggttaatggcatcctcgcagatgaaatgggtttggggaaaacccttcagacaattgctctcttaggctaccttaagcactatcgcaatattccagggccccacatggtgcttgtgcctaagagcacgttacacaactggatgaatgaatttaagagatgggtgccatctcttcgtgtgatctgcttcgttggggataaggatgcaagagccgcctttattcgggatgagatgatgccaggtgagtgggacgtttgcgttacctcatacgagatggttatcaaggagaagtccgtttttaagaagttccactggcggtatctggtgatcgacgaagcccaccgcatcaaaaacgagaaaagtaaactttctgagattgtgcgagaattcaagtctaccaaccgacttctactcacgggcactcccctgcagaataacctgcacgagttgtgggccctgctgaatttcctcctccctgatgtatttaattcagccgatgatttcgactcgtggtttgacactaagaattgtctaggggaccagaaattagttgaacggctgcacgctgtcttgaagcccttcttgctccgccgtatcaagacagacgtggagaagtccttacctcctaagaaagagatcaaaatttatctgggactgtcaaaaatgcagagggagtggtacacaaagattctgatgaaggacatcgatgtactaaatagcagcgggaaaatggacaaaatgcgtctgcttaacattttgatgcagcttcgtaaatgttgcaaccacccctacctctttgacggggccgagcctgggcctccttacacgaccgacgaacatattgtgagcaacagcggcaaaatggtggtgttagacaagctcctggccaagctaaaagaacagggcagtagagtactcattttttctcagatgacacgcctgcttgacatccttgaggattattgcatgtggcgcggctatgagtactgcagattggatggccagaccccgcatgaagaaagggaggataagtttttagaggtggagtttcttggccaacgggaagcgatcgaggccttcaatgcaccgaactcttcaaaattcatattcatgctgtccactcgagccggtggccttggcatcaatctggccagtgccgatgtggtaattctatacgactctgactggaatccccaggtagacttgcaagcaatggaccgcgcacatagaatcgggcagaaaaaacccgtcagggtcttcaggcttatcactgacaacacagtcgaagaacgtattgtggagcgggccgaaattaagctacgtctagactcgattgtgatccagcagggcaggttgatcgatcagcagagcaataaactggcgaaggaggaaatgttgcaaatgataaggcatggtgctacccatgtcttcgccagtaaggagtccgagctgaccgacgaggacattacaacgatcttggagcgtggggagaaaaagaccgcggagatgaacgaacgactgcagaaaatgggtgagagttctctgcgaaactttagaatggatattgaacagagcctctataagttcgagggcgaggactacagagagaaacagaaactggggatggtcgaatggatagagccccccaaaagggagaggaaggcaaattacgccgtggacgcatatttccgagaggcactccgggtgtccgagcccaagatcccaaaagcccctagaccccctaaacagccaaacgtccaggactttcaatttttcccccctcgattatttgaactactcgagaaggaaatcctgtactatcgcaaaaccattggctataaagttccaaggaacccagacatacccaatcccgctttagcgcagagagaggagcagaagaagattgacggcgccgagcctctcacacccgaggaaaccgaggagaaagaaaagctgctcacccaaggattcacaaactggaccaagagagactttaatcagttcatcaaggctaatgaaaaatacggacgggacgatatcgacaatatagcccgggaggtagaggggaagtcacctgaggaagtgatggagtactccgcagtgttctgggaacgctgtaatgaactccaggacatcgaaaaaataatggcccagatcgagcgcggagaagctaggatccagcggagaatatcaatcaaaaaagcactggacgccaaaatcgcccggtacaaagcacccttccatcagttgcgtatacagtatgggacatcgaagggcaaaaactacacagaagaggaagaccgctttctgatctgcatgttgcataaaatgggtttcgatcgggagaacgtgtatgaagagctccgccagtgtgtgaggaatgcaccccagttccgcttcgactggtttatcaaatctcggacagccatggagtttcagcggcgctgtaacacgctgataagccttattgagaaggagtag

SEQ ID NO: 278004 - DNA, 3018 bp, Artificial Sequence
  derived and/or modified sequence
atggagcaggatacggcagccgtggccgcaacggttgcagctgcggacgctactgccaccattgtggtcattgaagacgagcaacccggtccctccacctcccaggaagagaagaacgtctcgtctttccagcttaagcttgcagccaaagctccgaagagcgagaaggagatggaccctgagtatgaagaaaagatgaaagccgaccgagcaaaaaggttcgaattcttactaaaacagacagagttgttcgcgcatttcatccagccatccgcgcagaaatctcccacaagcccactgaacatgaaactcggaaggccaagaatcaagaaagacgagaagcagtccttgatctccgccggtgattaccgccacaggcggacggagcaagaagaggatgaggaacttttgtctgaaagcagaaagacaagtaatgtgtgcataagatttgaggtttcaccttcctacgtcaagggtggacccctgcgcgattatcagatccgcggactgaattggttgatcagtctttatgagaatggggtaaacgggatcctggctgacgagatgggtctgggcaagactctgcagaccatagcactgctgggctatctcaaacactaccggaacatccctggaccccatatggtgctcgtccccaagagcacactgcataactggatgaatgaatttaaacggtgggtccccagtcttagggtcatctgcttcgtcggagataaggacgcgagggccgcttttattcgcgacgaaatgatgccgggtgaatgggacgtgtgcgtgacttcatatgagatggtgattaaggagaagagcgtatttaagaagtttcattggagatatctagtcattgatgaagctcaccgtatcaagaatgagaagtctaagttgtcagaaattgtgagggagtttaaaagcaccaatcggctattgctgactggcaccccactgcagaacaacctccacgagctgtgggcgctgctaaactttctgttgcctgatgtgttcaattctgccgacgatttcgattcatggttcgacaccaaaaactgtctgggcgaccagaagttagtggaaagattgcacgcagtgttgaagccgttccttcttaggcgtatcaaaactgatgtcgagaagagtcttcccccaaaaaaagagatcaagatctacctgggccttagcaaaatgcagcgtgagtggtataccaaaattctcatgaaggacatcgacgtactcaactcctcagggaagatggacaagatgcggctgttaaacatcctgatgcagctgcggaaatgttgcaaccatccatacctttttgatggcgctgaaccgggacccccatacacaaccgacgagcacattgtctccaactccggtaaaatggtggtgctcgataagcttctggctaaactgaaggagcaggggtcacgcgtcctcatctttagccaaatgaccaggctgctcgatatccttgaagactactgcatgtggagggggtacgagtattgccggctcgacgggcagacgccccatgaagaaagggaggataagttcttggaggtcgagttcctgggtcagcgggaggcaatagaggctttcaacgcccctaatagctcgaaatttattttcatgctctccaccagggccggaggactcggaatcaacctggcatcggctgacgtggtgatcctgtacgatagcgactggaacccgcaggtggatctgcaggccatggacagggcgcaccgcatagggcaaaagaagccggttcgagtgttccgcctgattacagacaacacagtcgaggagcgcatagtggagcgcgctgaaattaaattgcgtctggacagcatcgtaatccagcaggggagattgattgaccagcagtctaacaaacttgccaaagaagaaatgctccagatgatcaggcacggcgcaacacacgtctttgcgagcaaggagtcggagctgacagacgaggacatcacaacgatcctggagaggggtgaaaagaaaacagccgagatgaacgagcgactccaaaaaatgggtgaatctagtctaaggaactttagaatggacatagaacagagtttgtataaattcgaaggtgaagattaccgggagaaacagaaactgggcatggtggagtggatcgaaccgcctaagcgggagagaaaggcaaactacgccgtggatgcatactttcgggaagccttacgggtgtccgagccgaaaatccccaaagccccaagaccgcctaagcagcctaacgtgcaggacttccagttcttcccaccccgattgtttgagctcctcgagaaggagatcttgtattaccgaaagacaattggctacaaggttccgagaaatccggatatacctaacccagcgctcgcacagcgagaagaacagaagaaaattgatggggctgaacccctgacacctgaggagacagaggaaaaagaaaaattactgactcaaggcttcaccaactggacaaagagagactttaaccaatttattaaggcaaatgagaagtacggcagagatgacatagataacatcgcacgtgaggtcgaaggaaagtccccagaagaggttatggagtatagcgctgttttttgggaacggtgcaacgagttgcaagacatcgagaaaattatggcacagatagaacgtggggaagccagaatccagagacgcattagcatcaagaaagcgctcgacgcaaaaatcgcgaggtataaagctccgttccaccagctgcggatccagtacgggacttccaagggcaagaactacaccgaagaggaagatcgattcttgatttgtatgcttcataaaatgggctttgatagggagaacgtatacgaggagctgcgacaatgtgtcagaaacgccccacagttccgctttgactggtttatcaaatcacggaccgccatggagtttcagcgacggtgtaacactctgatttcactgatcgagaaggagtag

SEQ ID NO: 278005 - DNA, 3090 bp, Artificial Sequence
  derived and/or modified sequence
agtgcagccactgccgccgcccaggagccctcgtcccctgccttgtccccctactcgttcccgctcccacggcatggagcaggacactgccgcagtggcagccaccgtggcagccgcggatgcgaccgccactatcgtggtcatagaggacgagcagcccgggccgtccacctctcaggaggagaaaaacgtttcttcatttcaactcaaacttgctgctaaagcgcctaaatctgaaaaggaaatggacccagaatatgaagagaaaatgaaagccgaccgagcaaagagatttgaatttttactgaagcagacagaactttttgcacatttcattcagccttcagcacagaaatctccaacatctccactgaacatgaaattgggacgtccccgaataaagaaagatgaaaagcagagcttaatttctgctggagactaccgccataggcgcacagagcaagaagaagatgaagagctactgtctgagagtcggaaaacatctaatgtgtgtattagatttgaggtgtcaccttcatatgtgaaaggggggccactgagagattatcagattcgaggactgaattggttgatctctttatatgaaaatggagtcaatggcattttggctgatgaaatgggccttgggaaaactttacaaacaattgctttgcttggttacctgaaacactaccgaaatattcctggacctcacatggttttagttccaaagtctactttacacaactggatgaatgaatttaaacgatgggtcccatctctccgtgtcatttgttttgtcggagacaaggatgccagagctgcttttattcgtgatgaaatgatgccaggagagtgggatgtttgcgttacttcttatgagatggtaattaaagaaaaatctgtattcaaaaagtttcactggcgatacctggtcattgatgaagctcacagaataaagaatgaaaaatctaagctttcagagattgttcgtgagttcaagtcgactaaccgcttgctcctaactggaacacctttgcagaataacctgcatgaactgtgggccttactcaactttttattgcctgatgtctttaattctgcagatgactttgattcttggtttgacactaaaaattgtcttggtgatcaaaaactcgtggaaagacttcatgcagttttaaaaccatttttgttacgccgtataaaaactgatgtagagaagagtctgccacctaaaaaggaaataaagatttacttggggctgagtaagatgcaacgagaatggtatacaaaaatcctgatgaaagatattgatgttttaaactcttctggcaagatggacaagatgcgactcttaaacattctgatgcagcttcgaaagtgttgtaatcatccatatctgtttgatggtgctgaacctggtccaccttataccactgatgagcatattgtcagcaacagtggtaaaatggtagttctggataaactattggccaaactcaaagaacagggttcaagggttctcattttcagccagatgactcgcttgctggatattttggaagattattgcatgtggcgtggttatgagtattgtcgactggatggacaaaccccgcatgaagaaagagaggataaattcctagaagtggaatttctgggtcaaagggaagcaatagaggcttttaatgctcctaatagtagcaaattcatctttatgctaagtaccagggctggaggtctcggaattaacctggcaagtgctgatgtggttatactatatgattcagactggaacccacaggttgatctacaagctatggatcgagcacatcgtattggtcagaagaaaccagtacgtgtattccgtctcatcactgacaacactgttgaagagaggattgtagaaagagctgagataaaactgagactcgattcaattgttatacaacaaggaagactcattgaccaacagtctaacaagctggcaaaagaggaaatgttacaaatgatacggcatggagccacccatgtttttgcttctaaagagagtgagttgacagatgaagacattacaactattctggaaagaggggaaaagaagactgcagagatgaatgaacgcctgcaaaaaatgggagagtcttctctaagaaattttagaatggacattgaacaaagtttatacaaatttgagggagaagattatagagaaaaacagaagcttggcatggtggaatggattgaacctcctaaacgagaacgcaaagcaaactacgcagtggatgcctactttagagaggctttgcgtgtcagcgagccaaagattccaaaggctccacggcctccaaaacagccaaatgttcaggattttcaatttttcccaccacgcttatttgagctcctggaaaaggaaattctttattatcggaagacaataggctataaggttccaaggaatcctgatatcccaaatccagctctggctcaaagagaagagcaaaaaaagattgatggagctgaacctcttacaccagaagagactgaagaaaaggaaaaacttctcacacaaggtttcacaaactggactaaacgagattttaaccagtttattaaagctaatgagaaatatggaagagatgacattgataacatagctcgagaggtagagggcaaatcccctgaggaggtcatggagtattcagctgtattttgggaacgttgcaatgaattacaggacattgagaaaattatggctcaaattgaacgtggagaagcaagaattcaacgaaggatcagtatcaagaaagccctggatgccaaaattgcaagatacaaggctccatttcatcagttgcgcattcagtatggaaccagcaaaggaaagaactatactgaggaagaagatagattcttgatttgtatgttacacaaaatgggctttgatagagaaaatgtatatgaagaattaagacagtgtgtacgaaatgctccccagtttagatttgactggtttatcaagtctaggactgccatggaattccagagacgctgtaacactctgatttcattgattgagaaagaaaa

SEQ ID NO: 278006 - protein, 331 aa, Artificial Sequence
  derived and/or modified sequence
MLLKHNGKLLLFYLLSYQALASDWFYCSFNRWRIFQILDAARNFHYITILRDPVSRYLSEWRHVQRGATWKASLHVCDGRPPTSEELPSCYTGDDWSGCPLKEFMDCPYNLANNRQVRMLSDLTLVGCYNLSVMPEKQRNKVLLESAKSNLKHMAFFGLTEFQRKTQYLFEKTFNMNFISPFTQYNTTRASSVEINEEIQKRIEGLNFLDMELYSYAKDLFLQRYQFMRQKEHQEARRKRQEQRKFLKGRLLQTHFQSQGQGQSQNPNQNQSQNPNPNANQNLTQNLMQNLTQSLSQKENRESPKQNSGKEQNDNTSNGTNDYIGSVEKWR

SEQ ID NO: 278007 - DNA, 996 bp, Artificial Sequence
  derived and/or modified sequence
atgctgttgaagcacaacggaaaactgctgctcttctatctcctgtcttaccaagcactcgcctctgattggttttattgcagttttaatcgatggcggattttccagatattagacgctgcccgcaactttcactacatcacgatactgcgcgaccctgtttcaaggtatttgagcgagtggcgtcacgtccaaaggggtgctacctggaaggcgtctctacacgtatgtgatggccgacctcccaccagtgaagaacttccgtcttgctacacgggcgatgattggtccggttgtccattgaaggagtttatggattgcccttataatttggccaataacaggcaggttcgaatgctgagcgatctcactttagtcggctgctataatttgtcagtgatgcccgagaaacaacgcaataaggttcttttggagtctgctaagtctaacctgaaacatatggcctttttcgggttgaccgagtttcaaaggaagactcagtatctcttcgaaaaaacatttaacatgaacttcatttcacccttcacccagtacaacaccacccgggcttcaagcgttgagatcaacgaggagattcagaagcggatcgaaggtttgaattttctggacatggaactgtactcttatgccaaggatctattcctccagagataccaatttatgcggcagaaggagcatcaggaagccaggaggaagaggcaggaacagcgcaaatttctgaaagggaggctcttgcagacccactttcagagccagggccaggggcagtctcagaatcctaatcagaaccagtcccaaaaccccaacccaaacgcgaatcaaaatctgactcaaaatctgatgcagaatctcacgcagtctctgtcacagaaagagaatagggaatcaccaaaacagaacagcggcaaggagcagaatgacaacacaagcaatggaaccaacgactacatcggtagtgttgaaaagtggagatag

SEQ ID NO: 278008 - DNA, 1246 bp, Artificial Sequence
  derived and/or modified sequence
atctatgagctgtttccctaaggtttgggaagctggagaaatatgctcttaaagcacaatggaaaacttttattattttatctcctctcctaccaagctcttgctagcgactggttttactgttcctttaacaggtggaggatttttcagattctagatgcagcaaggaacttccactacatcaccatcctccgagacccagtgtcccggtacttgagtgagtggaggcatgtccagagaggggcaacatggaaagcatccctgcatgtctgcgatggaaggcctccaacctccgaagagctgcccagctgctacactggcgatgactggtctggctgccccctcaaagagtttatggactgtccctacaatctagccaacaaccgccaggtgcgcatgctctccgacctgaccctggtaggctgctacaacctctctgtcatgcctgaaaagcaaagaaacaaggtccttctggaaagtgccaagtcaaatctgaagcacatggcgttcttcggcctcactgagtttcagcggaagacccaatatctgtttgagaaaaccttcaacatgaactttatttcgccatttacccagtataataccactagggcctctagtgtagagatcaatgaggaaattcaaaagcgtattgagggactgaattttctggatatggagttgtacagctatgccaaagacctttttttgcagaggtatcagtttatgaggcagaaagagcatcaggaggccaggcgaaagcgtcaggaacaacgcaaatttctgaagggaaggctccttcagacccatttccagagccagggtcagggccagagccagaatccgaatcagaatcagagtcagaacccaaatccgaatgccaatcagaacctgactcagaatctgatgcagaatctgactcagagtttgagccagaaggagaaccgggaaagcccgaagcagaactcaggcaaggagcagaatgataacaccagcaatggcaccaacgactacataggcagtgtagagaaatggcgttaaatggctcaaaaaggcctgtacatacttctcccaaagcgccactgaaaagatggcatagcttaaaagatgaaagtgtccaaacacatcctgcttccttcattggggaagttttaaaaaaaagtttagatgttgcctttacagttgcctttcaattcagtgttatactgtgtgtaggtaaaacaaatctcaatatggaattaaattgtct

SEQ ID NO: 278009 - DNA, 996 bp, Artificial Sequence
  derived and/or modified sequence
atgctgctgaagcacaacgggaagctgctgctcttctacctgctgagctaccaggccctggccagtgactggttctactgcagcttcaaccgctggaggatcttccagatcctggatgctgccaggaacttccactacatcaccatcctgcgggaccctgtgagccgctacctgtctgagtggaggcatgtgcagagaggagccacctggaaggccagcctgcacgtgtgtgatggccggccccccaccagcgaggagctgcccagctgctacacaggagatgactggagcggctgccccctgaaggagttcatggactgcccctacaacctggccaacaaccggcaggtgaggatgctgagtgacctgaccctggtgggctgctacaacctgtctgtgatgcctgagaagcagaggaacaaggtgctgctggagagcgccaagagcaacctgaagcacatggccttcttcggcctgacagagttccagaggaagacccagtacctgtttgagaagaccttcaacatgaacttcatcagccccttcacccagtacaacaccacccgggccagctctgtggagatcaatgaggagatccagaagagaattgagggcctgaacttcctggacatggagctgtacagctatgccaaggacctcttcctgcagcgctaccagttcatgaggcagaaggagcaccaggaggcccggaggaagaggcaggagcagaggaagttcctgaagggccgcctgctgcagacccacttccagagccagggccagggccagagccagaaccccaaccagaaccagagccagaaccccaaccccaatgccaaccagaacctgacccagaacctgatgcagaacctgacccagagcctgagccagaaggaaaatcgggagagccccaagcagaacagcggcaaggagcagaatgacaacaccagcaatggcaccaatgactacatcggctctgtggagaagtggaggtag

SEQ ID NO: 278010 - DNA, 996 bp, Artificial Sequence
  derived and/or modified sequence
atgctgctgaagcacaacggcaagctgctgctgttctacctgctgtcttaccaggcccttgcttccgactggttctattgctccttcaacagatggcgaatatttcagattctcgatgcagcccgcaatttccattacatcacaatcctcagagatcccgtgtcgaggtacctgagcgaatggagacacgtgcagcggggagccacatggaaggcgtccctgcacgtctgcgatgggcgcccgccgacttcagaggagcttccctcttgttatacaggcgacgattggtccggatgccccttgaaggagtttatggattgtccctataacctggccaataataggcaggttagaatgctctctgatttaacactggtgggctgctacaacctcagcgtcatgcccgaaaaacagcggaataaagttctgttggagtctgcaaagagcaatcttaagcacatggccttcttcggtcttacggagttccagcgcaagacccaatacctctttgagaagacgttcaacatgaactttatttctccgtttacacagtacaatacaacacgagcttcatcagtggagatcaacgaggagattcagaagcggatagaaggtctgaactttctcgatatggagttgtactcctatgcgaaagacttattcttgcagagataccagtttatgcgtcagaaggagcatcaggaagccagaaggaaacgtcaggaacagcggaaattcctgaagggtcggcttctacagacccactttcaaagtcagggtcaaggccaaagccagaaccccaaccagaatcagtcacagaatcctaaccccaatgccaaccagaacctgacgcaaaacctgatgcaaaacctgactcagagcctctcccaaaaagaaaatagggagagtcccaagcagaacagcggcaaggagcaaaacgacaacacttccaacggtactaatgactacataggctcagtagagaagtggcgttag

SEQ ID NO: 278011 - DNA, 996 bp, Artificial Sequence
  derived and/or modified sequence
atgctcctgaaacacaatggtaagttgctcttattttaccttctgtcttaccaggcgctggccagcgactggttttactgttctttcaatcgctggcggatcttccaaatcctagatgcagcaagaaatttccactatattaccatccttcgcgacccggtgagccgatacctgagcgagtggcgccacgtgcagagaggggctacatggaaggcaagcctccacgtttgtgatggacgtcccccaacctccgaagagctccctagctgctacactggcgacgactggtccggatgtcctctcaaggagtttatggactgtccgtacaatctggcaaacaacagacaagtcaggatgcttagcgatttgacgctagtggggtgctataacctgagcgtcatgccagagaagcagcgtaataaagttctactggagtcggcaaaatcaaacctgaaacatatggccttcttcggccttacagaatttcagcgtaagactcagtacctgtttgaaaagacttttaacatgaattttatcagtccatttactcagtataacaccacacgtgcgtcctcagtggaaattaatgaggaaatccaaaaacgcatagaaggcctgaactttttagacatggaactctattcctacgccaaggatctctttctgcagaggtaccagttcatgcgccagaaagagcatcaggaggcccgtagaaaaagacaagagcagcgaaaatttctcaaagggagacttctgcagacacactttcagtctcagggtcaggggcagagccagaatccaaaccagaaccagagtcagaaccccaatccgaacgccaatcagaacttgacccagaacctcatgcaaaatcttactcagtcactctctcaaaaagagaaccgcgaatcacctaagcagaattctggaaaagagcaaaacgataacaccagcaatggcacgaatgactacatcgggtccgttgagaaatggcgatag

SEQ ID NO: 278012 - DNA, 996 bp, Artificial Sequence
  derived and/or modified sequence
atgctgctgaagcacaacggcaagctgctgctgttctacctgctgagctaccaggccctggccagcgactggttctactgcagcttcaacagatggagaatcttccagatcctggacgccgccagaaacttccactacatcaccatcctgagagaccccgtgagcagatacctgagcgagtggagacacgtgcagagaggcgccacctggaaggccagcctgcacgtgtgcgacggcagaccccccaccagcgaggagctgcccagctgctacaccggcgacgactggagcggctgccccctgaaggagttcatggactgcccctacaacctggccaacaacagacaggtgagaatgctgagcgacctgaccctggtgggctgctacaacctgagcgtgatgcccgagaagcagagaaacaaggtgctgctggagagcgccaagagcaacctgaagcacatggccttcttcggcctgaccgagttccagagaaagacccagtacctgttcgagaagaccttcaacatgaacttcatcagccccttcacccagtacaacaccaccagagccagcagcgtggagatcaacgaggagatccagaagagaatcgagggcctgaacttcctggacatggagctgtacagctacgccaaggacctgttcctgcagagataccagttcatgagacagaaggagcaccaggaggccagaagaaagagacaggagcagagaaagttcctgaagggcagactgctgcagacccacttccagagccagggccagggccagagccagaaccccaaccagaaccagagccagaaccccaaccccaacgccaaccagaacctgacccagaacctgatgcagaacctgacccagagcctgagccagaaggagaacagagagagccccaagcagaacagcggcaaggagcagaacgacaacaccagcaacggcaccaacgactacatcggcagcgtggagaagtggagatag

SEQ ID NO: 278013 - protein, 425 aa, Artificial Sequence
  derived and/or modified sequence
MEPGCDEFLPPPECPVFEPSWAEFQDPLGYIAKIRPIAEKSGICKIRPPADWQPPFAVEVDNFRFTPRVQRLNELEAQTRVKLNYLDQIAKFWEIQGSSLKIPNVERKILDLYSLSKIVIEEGGYEAICKDRRWARVAQRLHYPPGKNIGSLLRSHYERIIYPYEMFQSGANHVPEPTEEDIEKHPELKKLQIYGPGPKMMGLGLMAKDKDKTVHKKVTCPPTVTVKDEQSGGGNVSSTLLKQHLSLEPCTKTTMQLRKNHSSAQFIDSYICQVCSRGDEDDKLLFCDGCDDNYHIFCLLPPLPEIPRGIWRCPKCILAECKQPPEAFGFEQATQEYSLQSFGEMADSFKSDYFNMPVHMVPTELVEKEFWRLVSSIEEDVTVEYGADIHSKEFGSGFPVSNSKQNLSPEEKEYATSGWNLNVMP

SEQ ID NO: 278014 - DNA, 1278 bp, Artificial Sequence
  derived and/or modified sequence
atggaacctggctgcgatgagttcctcccacctcctgagtgtccagtatttgagccgtcctgggcggagtttcaggaccccctcgggtacatagcaaagattaggccaatcgccgagaaaagcgggatttgcaagataagaccaccggccgactggcagccaccttttgcagtggaagttgacaacttccgcttcaccccccgggtacagcgtctgaacgagctagaggcccagacccgggtgaaactaaactacctggaccagatcgccaaattctgggagattcagggaagcagcttgaagattccgaatgtggagaggaagatactcgatctttacagtctgtccaaaatcgtgatagaggaaggtgggtatgaagccatctgcaaggatcgtagatgggcacgtgtcgcgcaacgtctccactatccaccgggaaaaaatattggctcgctactgcgctcccattatgaacgcatcatctatccgtacgaaatgttccagtctggagctaaccatgtgcctgaaccaaccgaggaggacatagagaaacaccccgagctgaagaagctgcaaatttacggaccaggcccaaagatgatgggactgggactgatggctaaagacaaggataaaaccgtgcataagaaggtaacctgtccacctactgtgactgtgaaagacgaacaatcgggtggggggaatgtgagctctactctgctaaaacaacacctttcgctagagccttgtactaaaacgaccatgcagctcaggaagaaccattcaagcgcccagtttattgattcatacatttgtcaggtgtgctcccgtggggacgaagatgataagctccttttctgcgatgggtgtgatgacaattaccacatcttctgcttgctacctcctctacccgagatccctcgcggcatctggcggtgccctaagtgtattctggctgaatgtaaacagccacccgaggccttcggctttgagcaggccacccaggaatattccttgcagtcctttggggaaatggctgacagcttcaagtcggactatttcaacatgcccgttcacatggtaccaacggaactggtcgagaaggagttctggcgacttgtaagttccattgaagaggatgtgaccgtagagtacggagctgatatccactccaaggaattcggcagtggcttcccagtaagcaactcaaagcagaatctgagtccagaggagaaagagtacgccacttcaggatggaacctgaacgtcatgccctag

SEQ ID NO: 278015 - DNA, 1278 bp, Artificial Sequence
  derived and/or modified sequence
atggagcccggctgtgatgagttcctgcccccaccagaatgtcctgtgtttgagcccagctgggccgagttccaggaccccctgggctacatcgccaagatccggcccatcgccgagaagagcggcatctgcaagatccggcccccagctgactggcagcccccatttgctgtggaggtggacaacttccgcttcaccccccgggtgcagaggctgaatgagctggaggcccagaccagggtgaagctgaactacctggaccagatcgccaagttctgggagatccagggcagcagcctgaagatccccaacgtggagaggaagatcctggacctgtacagcctgagcaagatcgtcatcgaggagggcggctatgaggccatctgcaaggaccggcgctgggcccgggtggcccagaggctgcactacccacctgggaagaacatcggcagcctgctgcggagccactatgagcgcatcatctacccctatgagatgttccagagcggggccaaccacgtgcctgagcccacagaggaggacatcgagaagcaccctgagctgaagaagctgcagatctacggccctggccccaagatgatgggcctgggcctgatggccaaggacaaggacaagacagtgcacaagaaggtgacctgccccccaacagtgacagtgaaggatgagcagagcggcggcggcaatgtgagcagcaccctgctgaagcagcacctgagcctggagccctgcaccaagaccaccatgcagctgaggaagaaccacagcagcgcccagttcatcgacagctacatctgccaggtgtgcagcagaggagatgaagatgacaagctgctcttctgtgatggctgtgatgacaactaccacatcttctgcctgctgccccccctgcctgagatcccccggggcatctggcgctgccccaagtgcatcctggccgagtgcaagcagcccccagaggccttcggctttgagcaggccacccaggagtacagcctgcagagctttggagagatggctgacagcttcaagagtgactacttcaacatgcctgtgcacatggtgcccacagagctggtggagaaggagttctggaggctggtgagcagcattgaagaagatgtgacagtggagtatggagctgacatccacagcaaggagtttggcagcggcttccctgtgagcaacagcaagcagaacctgagccctgaggagaaggagtatgccaccagcggctggaacctgaatgtgatgccctag

SEQ ID NO: 278016 - DNA, 1336 bp, Artificial Sequence
  derived and/or modified sequence
ggtcaagatggtggctgtaaaactaggatccctgacgattgcttagcattaaggcccgacatggaaccggggtgtgacgagttcctgccgccaccggagtgcccggtttttgagcctagctgggctgaattccaagacccgcttggctacattgcgaaaataaggcccatagcagagaagtctggcatctgcaaaatccgcccacccgcggattggcagcctccttttgcagtagaagttgacaatttcagatttactcctcgcgtccaaaggctaaatgaactggaggcccaaactagagtgaaattgaactatttggatcagattgcaaaattctgggaaattcaaggctcctctttaaagattcccaatgtggagcggaagatcttggacctctacagccttagtaagattgtgattgaggaaggtggctatgaagccatctgcaaggatcgtcggtgggctcgagttgcccagcgtctccactacccaccaggcaaaaacattggctccctgctacgatcacattacgaacgcattatttacccctatgaaatgtttcagtctggagccaaccatgtgccagagcctacagaggaggacattgagaagcatccagagctaaagaagttacagatatatgggccaggtcccaaaatgatgggcttgggccttatggctaaggataaggataagactgtgcataagaaagtcacatgccccccaactgttacggtgaaggatgagcaaagtggaggtgggaacgtgtcatcaacattgctcaagcagcacttgagcctagagccctgcactaagacaaccatgcaacttcgaaagaatcacagcagtgcccagtttattgactcatatatttgccaagtatgctcccgtggggatgaagatgataagcttcttttctgtgatggctgtgatgacaattaccacatcttctgcttgttaccaccccttcctgaaatccccagaggcatctggaggtgcccaaaatgtatcttggcggagtgtaaacagcctcctgaagcttttggatttgaacaggctacccaggagtacagtttgcagagttttggtgaaatggctgattccttcaagtccgactacttcaacatgcctgtacatatggtgcctacagaacttgtagagaaggaattctggaggctggtgagcagcattgaggaagacgtgacagttgaatatggagctgatattcattccaaagaatttggcagtggctttcctgtcagcaatagcaaacaaaacttatctcctgaggagaaggagtatgcgaccagtggttggaacctgaatgtgatgccag

SEQ ID NO: 278017 - DNA, 1278 bp, Artificial Sequence
  derived and/or modified sequence
atggagcccggctgcgacgagttcctgcccccccccgagtgccccgttttcgagccatcgtgggcagagttccaggacccactgggttatatcgcaaagatccgaccgatagccgagaagtctggcatctgtaaaatccgcccaccagcagactggcagccaccattcgccgtggaagttgacaatttcagatttacgccacgtgtgcaacgcctgaatgagctggaagctcagacccgggtgaagctcaactaccttgatcaaattgccaagttctgggagatccaaggctcctctctcaagatacccaatgtggagaggaaaattctagatctgtacagtctctctaaaatcgtcatcgaagagggcggctacgaggctatctgtaaagacagacgctgggcccgggtggcacagcggctgcattaccctcccggaaagaatatcggaagtctcctgcgcagccactatgaaagaattatatacccctatgagatgtttcagtccggcgcaaaccatgtgccagagccaacagaggaggacatcgaaaagcatcccgagcttaagaagttgcagatttatggacctggaccgaagatgatgggcctgggcctgatggctaaggataaggataagaccgttcataagaaagtcacctgcccgcccaccgtgactgtgaaagatgaacagagcggtggcggcaatgtgtcgtccaccctcttaaagcaacacctcagcctggagccttgcacaaaaaccaccatgcagctgcgaaagaaccatagctcggcccagtttatagactcatatatctgccaggtatgctcccgcggcgatgaagacgataagttgctcttttgtgacgggtgtgacgacaattaccatattttctgccttctgccgcccctaccggagatcccccggggcatctggcgatgtcctaaatgcatcctcgctgaatgcaaacaacccccggaagccttcggattcgaacaggcaacccaggagtatagtttgcagagcttcggtgagatggctgatagcttcaaatcagactactttaacatgccagtgcacatggtccctaccgaactcgtggaaaaggagttctggcgactcgtcagctcaatcgaagaagacgtcactgtggaatatggggccgacatccatagtaaggagttcggctctggctttccggtgtccaatagtaagcagaacttgtcccctgaggaaaaggaatacgccaccagtggctggaatcttaacgttatgccatag

SEQ ID NO: 278018 - DNA, 1278 bp, Artificial Sequence
  derived and/or modified sequence
atggaacctggttgtgatgaatttctgcccccacccgaatgccctgtcttcgagccctcttgggccgagtttcaagatccgttaggctacattgcaaagattcgccctatcgcggaaaaatctggcatctgcaagattagacctcccgcagattggcaacctccgttcgctgttgaagtagataattttagattcactcctagggtccaacgtcttaacgaattagaggcacaaacgcgcgtgaaactgaattacttagaccagatcgccaaattctgggaaattcagggcagctccctcaagatcccaaacgtggaacgtaagatattggacttgtattctctgtcaaaaattgtgatcgaagaaggcggttacgaagctatctgcaaagaccggcgatgggctagagtcgctcagcggctccactatccacccggtaaaaacatcggaagtctcttgcgctcccactatgagcggatcatttacccctacgaaatgtttcagagtggggctaaccacgtaccagaaccaaccgaagaagacatagagaagcatccagagctcaagaagctgcagatctatgggccaggtccaaaaatgatgggcctcggactgatggcaaaagataaggataagaccgtgcacaaaaaggtcacgtgccccccaacagtcaccgtgaaggacgagcaatctgggggagggaatgtctcgagtacgcttttgaagcagcaccttagtctggagccctgcaccaagacaaccatgcagcttcgtaaaaaccatagctcagctcaatttatagatagttacatatgtcaggtgtgtagcaggggcgatgaggatgacaaactcttgttctgtgacggatgtgatgacaattatcatatcttttgcttgctgccacccctgcctgaaatccccagggggatctggcgatgtcctaagtgcatactcgcagagtgtaaacagccccctgaagctttcggttttgaacaggctactcaagagtacagcctacagtcattcggagagatggccgattcattcaaaagcgattattttaacatgcctgttcacatggtgccgacggaactcgtagagaaggaattttggcggctggtgtcctccattgaagaggacgtaactgtggaatacggagccgacatccattctaaggaattcgggtctgggtttccagtttccaactctaaacagaacctctctcccgaagagaaagaatatgccacaagtggatggaacttgaatgtgatgccatag

SEQ ID NO: 278019 - DNA, 1278 bp, Artificial Sequence
  derived and/or modified sequence
atggagcccggctgcgacgagttcctgcccccccccgagtgccccgtgttcgagcccagctgggccgagttccaggaccccctgggctacatcgccaagatcagacccatcgccgagaagagcggcatctgcaagatcagaccccccgccgactggcagccccccttcgccgtggaggtggacaacttcagattcacccccagagtgcagagactgaacgagctggaggcccagaccagagtgaagctgaactacctggaccagatcgccaagttctgggagatccagggcagcagcctgaagatccccaacgtggagagaaagatcctggacctgtacagcctgagcaagatcgtgatcgaggagggcggctacgaggccatctgcaaggacagaagatgggccagagtggcccagagactgcactacccccccggcaagaacatcggcagcctgctgagaagccactacgagagaatcatctacccctacgagatgttccagagcggcgccaaccacgtgcccgagcccaccgaggaggacatcgagaagcaccccgagctgaagaagctgcagatctacggccccggccccaagatgatgggcctgggcctgatggccaaggacaaggacaagaccgtgcacaagaaggtgacctgcccccccaccgtgaccgtgaaggacgagcagagcggcggcggcaacgtgagcagcaccctgctgaagcagcacctgagcctggagccctgcaccaagaccaccatgcagctgagaaagaaccacagcagcgcccagttcatcgacagctacatctgccaggtgtgcagcagaggcgacgaggacgacaagctgctgttctgcgacggctgcgacgacaactaccacatcttctgcctgctgccccccctgcccgagatccccagaggcatctggagatgccccaagtgcatcctggccgagtgcaagcagccccccgaggccttcggcttcgagcaggccacccaggagtacagcctgcagagcttcggcgagatggccgacagcttcaagagcgactacttcaacatgcccgtgcacatggtgcccaccgagctggtggagaaggagttctggagactggtgagcagcatcgaggaggacgtgaccgtggagtacggcgccgacatccacagcaaggagttcggcagcggcttccccgtgagcaacagcaagcagaacctgagccccgaggagaaggagtacgccaccagcggctggaacctgaacgtgatgccctag

SEQ ID NO: 278020 - protein, 888 aa, Artificial Sequence
  derived and/or modified sequence
MEPGCDEFLPPPECPVFEPSWAEFQDPLGYIAKIRPIAEKSGICKIRPPADWQPPFAVEVDNFRFTPRVQRLNELEAQTRVKLNYLDQIAKFWEIQGSSLKIPNVERKILDLYSLSKIVIEEGGYEAICKDRRWARVAQRLHYPPGKNIGSLLRSHYERIIYPYEMFQSGANHVQCNTHPFDNEVKDKEYKPHSIPLRQSVQPSKFSSYSRRAKRLQPDPEPTEEDIEKHPELKKLQIYGPGPKMMGLGLMAKDKDKTVHKKVTCPPTVTVKDEQSGGGNVSSTLLKQHLSLEPCTKTTMQLRKNHSSAQFIDSYICQVCSRGDEDDKLLFCDGCDDNYHIFCLLPPLPEIPRGIWRCPKCILAECKQPPEAFGFEQATQEYSLQSFGEMADSFKSDYFNMPVHMVPTELVEKEFWRLVSSIEEDVTVEYGADIHSKEFGSGFPVSNSKQNLSPEEKEYATSGWNLNVMPVLDQSVLCHINADISGMKVPWLYVGMVFSAFCWHIEDHWSYSINYLHWGEPKTWYGVPSLAAEHLEEVMKMLTPELFDSQPDLLHQLVTLMNPNTLMSHGVPVVRTNQCAGEFVITFPRAYHSGFNQGYNFAEAVNFCTADWLPAGRQCIEHYRRLRRYCVFSHEELICKMAAFPETLDLNLAVAVHKEMFIMVQEERRLRKALLEKGVTEAEREAFELLPDDERQCIKCKTTCFLSALACYDCPDGLVCLSHINDLCKCSSSRQYLRYRYTLDELPTMLHKLKIRAESFDTWANKVRVALEVEDGRKRSFEELRALESEARERRFPNSELLQRLKNCLSEVEACIAQVLGLVSGQVARMDTPQLTLTELRVLLEQMGSLPCAMHQIGDVKVLSWKWRRYVFPYHLCVYSMQGNILPD

SEQ ID NO: 278021 - DNA, 2667 bp, Artificial Sequence
  derived and/or modified sequence
atggagcctggatgcgatgagtttctgcctcccccagagtgccccgtgttcgaacctagctgggcagagttccaagatcccctgggctacatcgccaaaatccgccccattgcagagaagtcaggcatctgtaaaatcagaccacctgccgactggcagccaccgtttgcggtcgaagtggataactttaggtttacccccagggtgcaacgactcaacgagctggaagcccaaacccgcgtgaagctaaactacctggatcagatagctaagttctgggagattcagggaagcagtcttaagatccccaatgttgagcggaagattctggatttgtacagcctgtctaagatcgtgattgaggagggaggttacgaggcaatctgcaaagatcggaggtgggcacgagtcgcccaacgcctccactatccccctgggaaaaacatagggtcactgttgcggtcacattatgagagaattatttatccctacgagatgttccagagcggagctaatcatgttcaatgcaacacccaccccttcgataacgaggtgaaagacaaggagtacaagccccatagcataccgttacggcaaagtgtgcagcccagcaagttttctagctactccaggcgagccaaacgcctgcagccagaccccgagcctactgaggaggacattgagaagcacccagagctgaagaagctgcaaatttacgggcccggccccaaaatgatgggtctgggtttaatggctaaagacaaggataagaccgtgcacaagaaggtgacctgcccccccaccgttacagtgaaagacgagcagagtggtggggggaatgtttcatccaccctgctgaagcagcacctctctctggagccttgtactaaaacgaccatgcagttaagaaagaaccactctagcgcacaatttatcgactcatatatttgtcaggtgtgctcgcgcggtgacgaggacgacaagcttttgttttgcgacggctgtgatgataattaccacattttttgcttgttaccccctctcccagagattccacggggcatctggcgctgtcctaagtgcatcctggcagaatgcaaacagccgccggaggcattcggattcgagcaagcaacccaagagtacagcttgcaatcgtttggcgagatggcggactcgtttaagagcgactacttcaacatgcccgtgcacatggtgcccaccgagctggtggagaaagaattttggcgcctcgtctcttccatcgaggaggacgtcaccgtcgagtatggcgcagatatccactctaaggaatttggatcaggatttcccgtgtccaatagcaaacaaaatctgagccccgaagagaaagagtatgctacttctggctggaatttgaatgtaatgcctgtgctggaccagagcgtgctatgtcacatcaacgccgacatctccggtatgaaagttccatggctgtatgtcggtatggttttctctgccttctgttggcatatcgaggatcactggtcctacagtataaactaccttcactggggggagcccaaaacctggtatggcgtgccaagcctggccgcggagcatttagaggaggtgatgaagatgctgaccccagaactgtttgactcccagcccgatctcctgcatcaattggtcaccctgatgaaccctaacacactcatgtcccatggcgtgccggttgttagaaccaaccagtgtgccggcgagttcgtgattacctttccacgagcctatcatagtggatttaatcagggatacaattttgccgaggccgtcaatttttgcacggctgattggctgcctgctgggagacagtgcattgagcattatagacgccttcgccggtattgcgtgttttcccatgaagagttgatttgtaagatggccgccttccccgagactctcgatttaaacctggcagtggctgttcacaaggaaatgttcatcatggtgcaggaggagcgcagactgcgtaaggctctgctggagaagggcgtgacagaagcagaacgagaggcctttgagctcctgccagatgatgagcggcaatgcatcaagtgcaaaaccacttgctttctatcagccttagcctgttacgattgcccagacgggctggtttgtctctcccacatcaacgacctttgcaaatgttcttcttccagacagtatctgagataccggtacacgctcgatgagctgccaacgatgctgcacaagctcaagattagggccgagtcttttgacacctgggctaacaaggtcagagtggcgttggaggttgaggatggacgaaagagaagcttcgaggaattgcgggctctggaaagcgaagccagagagaggaggtttccaaactcagagcttctacaacgattaaagaattgtctcagtgaggtggaagcatgtatcgcacaggttttaggtttggtgagcggccaggttgcccgcatggatacacctcagctgacgctaacggagctgagggtccttctcgaacagatgggatccctgccatgcgcaatgcaccagatcggcgacgtaaaggtgttaagctggaagtggaggaggtatgttttcccataccatttatgcgtgtatagcatgcaggggaacatcctacccgactag

SEQ ID NO: 278022 - DNA, 2667 bp, Artificial Sequence
  derived and/or modified sequence
atggagcccggctgtgatgagttcctgcccccaccagaatgtcctgtgtttgagcccagctgggccgagttccaggaccccctgggctacatcgccaagatccggcccatcgccgagaagagcggcatctgcaagatccggcccccagctgactggcagcccccatttgctgtggaggtggacaacttccgcttcaccccccgggtgcagaggctgaatgagctggaggcccagaccagggtgaagctgaactacctggaccagatcgccaagttctgggagatccagggcagcagcctgaagatccccaacgtggagaggaagatcctggacctgtacagcctgagcaagatcgtcatcgaggagggcggctatgaggccatctgcaaggaccggcgctgggcccgggtggcccagaggctgcactacccacctgggaagaacatcggcagcctgctgcggagccactatgagcgcatcatctacccctatgagatgttccagagcggggccaaccacgtgcagtgcaacacccacccctttgacaatgaggtgaaggacaaggagtacaagccccacagcatccccctgcggcagagcgtgcagcccagcaagttcagcagctacagcagaagagccaagaggctgcagcctgaccctgagcccacagaagaagatattgagaagcaccctgagctgaagaagctgcagatctacggccctggccccaagatgatgggcctgggcctgatggccaaggacaaggacaagacagtgcacaagaaggtgacctgcccccccaccgtgacagtgaaggatgagcagagcggcggcggcaatgtgagcagcaccctgctgaagcagcacctgagcctggagccctgcaccaagaccaccatgcagctgaggaagaaccacagcagcgcccagttcatcgacagctacatctgccaggtgtgcagcagaggagatgaagatgacaagctgctcttctgtgatggctgtgatgacaactaccacatcttctgcctgctgccccccctgcctgagatcccccggggcatctggcgctgccccaagtgcatcctggccgagtgcaagcagcccccagaggcctttggatttgagcaggccacccaggagtacagcctgcagagctttggagagatggctgacagcttcaagagtgactacttcaacatgcctgtgcacatggtgcccacagagctggtggagaaggagttctggaggctggtgagcagcattgaggaggatgtgacagtggagtatggagctgacatccacagcaaggagtttggaagtggcttccctgtgagcaacagcaagcagaacctgagccctgaggagaaggagtatgccaccagcggctggaacctgaatgtgatgcctgtgctggaccagagcgtgctgtgccacatcaatgctgacatcagcggcatgaaggtgccctggctgtatgtgggcatggtgttttctgccttctgctggcacatcgaggaccactggagctacagcatcaactacctgcactggggcgagcccaagacctggtatggagtgcccagcctggccgctgagcacctggaggaggtgatgaagatgctgaccccagagctgtttgacagccagcctgacctgctgcaccagctggtgaccctgatgaaccccaacaccctgatgagccatggagtgcctgtggtgaggaccaaccagtgtgccggggagtttgtgatcaccttcccccgggcctaccacagcggcttcaaccagggctacaactttgctgaggccgtgaacttctgcacagctgactggctgcctgctggccggcagtgcatcgagcactaccgccgcctgcggcgctactgtgtgttcagccatgaggagctgatctgcaagatggccgccttccctgagaccctggacctgaacctggccgtggccgtgcacaaggagatgttcatcatggtgcaggaggagcggcggctgaggaaggccctgctggagaagggcgtgacagaggccgagcgggaggcctttgagctgctgcctgatgatgagcggcagtgcatcaagtgcaagaccacctgcttcctgagcgccctggcctgctatgactgcccagatggcctggtgtgcctgagccacatcaatgacctgtgcaagtgcagcagcagccggcagtacctgcgctaccgctacaccctggatgagctgcccaccatgctgcacaagctgaagatccgggcagagagctttgacacctgggccaacaaggtgcgggtggccctggaggtggaggatggcaggaagaggagctttgaggagctgcgggccctggagagcgaggcccgggagcggcgcttccccaacagcgagctgctgcagaggctgaagaactgcctgtctgaggtggaggcctgcatcgcccaggtgctgggcctggtgtctggccaggtggccaggatggacaccccccagctgaccctgacagagctgcgggtgctgctggagcagatgggcagcctgccctgtgccatgcaccagattggagatgtgaaggtgctgtcctggaagtggaggcgctacgtgttcccctaccacctgtgtgtgtacagcatgcagggcaacatcctgcctgactag

SEQ ID NO: 278023 - DNA, 2894 bp, Artificial Sequence
  derived and/or modified sequence
ctgcagggcccggaggtcaagatggtggctgtaaaactaggatccctgacgattgcttagcattaaggcccgacatggaaccggggtgtgacgagttcctgccgccaccggagtgcccggtttttgagcctagctgggctgaattccaagacccgcttggctacattgcgaaaataaggcccatagcagagaagtctggcatctgcaaaatccgcccacccgcggattggcagcctccttttgcagtagaagttgacaatttcagatttactcctcgcgtccaaaggctaaatgaactggaggcccaaactagagtgaaattgaactatttggatcagattgcaaaattctgggaaattcaaggctcctctttaaagattcccaatgtggagcggaagatcttggacctctacagccttagtaagattgtgattgaggaaggtggctatgaagccatctgcaaggatcgtcggtgggctcgagttgcccagcgtctccactacccaccaggcaaaaacattggctccctgctacgatcacattacgaacgcattatttacccctatgaaatgtttcagtctggagccaaccatgtgcaatgtaacacacacccgtttgacaatgaggtaaaagataaggaatacaagccccacagcatcccccttagacagtctgtgcagccttcaaagttcagcagctacagtcgacgggcaaaaaggctacagcctgatccagagcctacagaggaggacattgagaagcatccagagctaaagaagttacagatatatgggccaggtcccaaaatgatgggcttgggccttatggctaaggataaggataagactgtgcataagaaagtcacatgccccccaactgttacggtgaaggatgagcaaagtggaggtgggaacgtgtcatcaacattgctcaagcagcacttgagcctagagccctgcactaagacaaccatgcaacttcgaaagaatcacagcagtgcccagtttattgactcatatatttgccaagtatgctcccgtggggatgaagatgataagcttcttttctgtgatggctgtgatgacaattaccacatcttctgcttgttaccaccccttcctgaaatccccagaggcatctggaggtgcccaaaatgtatcttggcggagtgtaaacagcctcctgaagcttttggatttgaacaggctacccaggagtacagtttgcagagttttggtgaaatggctgattccttcaagtccgactacttcaacatgcctgtacatatggtgcctacagaacttgtagagaaggaattctggaggctggtgagcagcattgaggaagacgtgacagttgaatatggagctgatattcattccaaagaatttggcagtggctttcctgtcagcaatagcaaacaaaacttatctcctgaggagaaggagtatgcgaccagtggttggaacctgaatgtgatgccagtgctagatcagtctgttctctgtcacatcaatgcagacatctcaggcatgaaggtgccctggctgtacgtgggcatggttttctcagcattttgttggcatattgaggatcactggagttactctattaactatctgcattggggtgagccgaagacctggtatggtgtaccctccctggcagcagagcatttggaggaggtgatgaagatgctgacacctgagctgtttgatagccagcctgatctcctacaccagcttgtcactctcatgaatcccaacactttgatgtcccatggtgtgccagttgtccgcacaaaccagtgtgcaggggagtttgtcatcacttttcctcgtgcttaccacagtggttttaaccaaggctacaattttgctgaagctgtcaacttttgtactgctgactggctacctgctggacgccagtgcattgaacactaccgccggctccggcgctattgtgtcttctcccacgaggagctcatctgcaagatggctgccttcccagagacgttggatctcaatctagcagtagctgtgcacaaggagatgttcattatggttcaggaggagcgacgtctacgaaaggcccttttggagaagggcgtcacggaggctgagcgagaggcttttgagctgctcccagatgatgaacgccagtgcatcaagtgcaagaccacgtgcttcttgtcagccctggcctgctacgactgcccagatggccttgtatgcctttcccacatcaatgacctctgcaagtgctctagtagccgacagtacctccggtatcggtacaccttggatgagctccccaccatgctgcataaactgaagattcgggctgagtcttttgacacctgggccaacaaagtgcgagtggccttggaggtggaggatggccgtaaacgcagctttgaagagctaagggcactggagtctgaggctcgtgagaggaggtttcctaatagtgagctgcttcagcgactgaagaactgcctgagtgaggtggaggcttgtattgctcaagtcctggggctggtcagtggtcaggtggccaggatggacactccacagctgaccttgactgaactccgggtccttcttgagcagatgggcagcctgccctgtgccatgcatcagattggggatgtcaaggttctttcctggaagtggcggagatatgtgttcccataccatctctgtgtgtacagcatgcaaggaaatatccttccagactgaaataattaaaaactctaaactgggcctacataagacactggctcttgggaatggggtggagaggactgattggttggttggttgatttccctccagacaccagagtcttagaaagcttactagatggataagattgtattaaagtgggtttgg

SEQ ID NO: 278024 - DNA, 2667 bp, Artificial Sequence
  derived and/or modified sequence
atggagcccggctgcgacgagttcctgcccccccccgagtgccccgtctttgaacctagctgggccgagttccaggacccacttggctatatagccaagatcaggcccatcgcggagaagtcaggcatctgtaaaatcagacccccagccgattggcagccacctttcgccgtcgaggttgataactttcgtttcacgcctcgggttcagcgacttaacgagcttgaagcgcagacgcgggtgaaattgaactatctagaccagattgccaagttctgggaaattcaggggtctagtctgaaaatcccaaacgtcgaacgcaagattcttgatctttattccctgtcaaaaatcgtgatcgaggagggcggctacgaagccatttgtaaggacagacggtgggcccgtgttgcccaaagactgcattacccccctggtaaaaacattgggagtttgctgagatcacactacgaacggatcatttacccatacgaaatgttccaatccggggctaaccacgtgcaatgtaacacacacccttttgacaatgaggtgaaggataaggaatataagcctcatagtataccccttcgccagtcggttcaaccttcaaaatttagctcatattctaggcgcgctaaaaggttgcaacccgacccggaacctacagaagaggacattgagaagcaccctgaattgaaaaagctgcagatttacggcccaggacctaaaatgatgggtttgggcctcatggcaaaggataaggataaaactgtccacaagaaagttacctgtccgcccacagtgaccgtcaaggacgaacagagtggcggagggaacgtaagttctacactgctcaagcagcatctgtccctagagccatgcacgaaaacaaccatgcagcttagaaagaaccattctagcgcccagtttatagactcttatatctgtcaggtgtgtagtagaggggacgaggacgataagttgctgttttgcgatgggtgtgacgataactatcacatcttttgtctgctgccccctctaccagaaattccaaggggtatttggagatgtccgaagtgcatcctagcagaatgcaagcagcccccagaagctttcggtttcgaacaggctacacaggaatactcactgcagagcttcggcgagatggctgattcttttaagagcgattatttcaatatgccagtgcatatggtacctactgagctagtggagaaggagttttggaggttagtgtcatcaatagaggaagacgtgaccgtggaatacggggcagatatccattctaaagaattcggctctggattcccagtttctaactccaaacagaatctgagtcccgaagaaaaagagtatgctactagtggctggaatctgaacgtgatgccagtgctggaccagtctgtcctgtgtcatataaatgctgatatttcgggcatgaaagttccatggctttatgtgggcatggttttcagtgctttttgctggcacatagaggatcactggtcatatagtatcaattaccttcattggggagagcctaaaacatggtatggtgtgccctctctggctgctgaacatctggaggaggtcatgaagatgttaacacccgagctgttcgacagtcagcccgatttgttacaccagctggttaccctgatgaacccaaataccctaatgagccacggcgtccctgttgtgcggacaaaccagtgcgctggggagtttgtgataacattcccacgagcctaccactctggatttaaccagggttacaattttgcagaagcggtcaacttttgtaccgctgactggctgcccgctggtcgacagtgcatcgagcactatcgaaggctccggagatattgcgtgttctcccatgaggagctcatatgtaagatggctgccttccccgagacgctggatctgaatctggccgtggcagtgcacaaagagatgttcatcatggttcaggaagaacggcgcttgcgcaaggccctcctggagaagggcgtgaccgaggctgaacgtgaggcattcgaactgctccctgatgatgaacggcagtgcattaaatgtaagacaacatgcttcctttctgcgctggcgtgctatgactgtcccgacggcctagtgtgcttgagtcacatcaatgacctctgcaagtgcagtagctccaggcaataccttcgttaccggtacaccctggacgaactgccgactatgctgcataaactgaagatacgggccgagtcattcgacacctgggccaacaaggtccgcgtagctctggaggtcgaggatggccggaagcgcagcttcgaggaactgcgtgcattggagagcgaggcacgggagcgcaggtttcctaacagcgagctgcttcaaagattaaaaaactgcctttcggaagtagaggcctgtattgcacaggtactgggcttggtttctggccaagtagcgagaatggacactccgcagctcaccttaaccgagctgcgggtgcttttggaacagatggggtccctgccctgtgcgatgcatcagatcggagatgtgaaagtgctgtcatggaaatggcgccggtatgtcttcccctatcacttatgcgtttacagcatgcagggaaacatcttacccgattag

SEQ ID NO: 278025 - DNA, 2667 bp, Artificial Sequence
  derived and/or modified sequence
atggagcctggctgcgacgaattcttgccaccccctgagtgccccgtgttcgagccatcatgggccgagtttcaggaccccctcggctatattgcgaagattcgccctattgccgaaaaatcaggcatctgcaagatcagaccccctgctgactggcagccgccatttgccgtagaggtggacaatttcaggttcaccccaagagtgcagcgacttaacgaactggaggcccaaacccgtgtgaagctcaattacctcgaccagattgcgaaattttgggagattcaaggcagctcattaaagataccaaatgtggagcgtaaaattctcgatctctactccctctcaaaaatcgtgattgaggagggcggatacgaggccatctgcaaagacaggcggtgggccagagtggcgcagaggctgcactatccaccgggtaaaaacatagggagcctacttcgatcccattacgaaaggattatttatccatacgaaatgttccagtccggagctaatcacgtgcagtgcaacacccatccattcgataacgaagtgaaagataaagagtacaagccccacagtatcccattgcgacagtctgttcaaccctctaaattctcctcctactctaggcgggcaaagcgcctgcagcccgacccagaacctactgaggaggacatcgagaagcaccctgaacttaaaaagttacagatttatggtcctggaccaaaaatgatgggcctaggactgatggcgaaggataaggacaagaccgtgcacaaaaaagtcacatgtcctcctaccgttaccgtgaaggacgagcagtcaggcggtggcaatgtgagttccacgctcctcaagcagcatctatcccttgaaccatgtaccaaaaccaccatgcaactcagaaagaaccatagcagcgctcagttcattgattcctatatttgtcaagtctgtagcagaggagatgaggatgataagctattgttttgtgacggatgtgatgacaactaccacatcttttgtctgttgcctccccttccagaaatcccacgtggcatctggagatgtcctaagtgtattctggcagagtgtaaacagcccccagaagcttttggattcgagcaagctacacaggaatactctctgcagagtttcggagagatggctgactctttcaaaagtgattactttaacatgcccgtgcatatggtgcccacggagctggttgagaaggagttctggcgcctagtcagttccatagaagaggacgtgactgtagagtatggtgctgatatccattctaaggaattcggctcaggttttcccgtgtctaattccaaacagaatctctctcccgaggagaaggaatacgccacaagcgggtggaacctcaatgtgatgcccgttttggaccagtcagttctctgccacataaatgctgatatttcaggcatgaaggtcccatggctgtatgttggcatggtgttttccgcattctgctggcatatcgaggatcattggagctactcaattaattatctgcattggggtgaacccaaaacatggtacggcgtcccttcccttgcggctgagcacctggaagaggtgatgaaaatgcttacgcctgagcttttcgattcgcagccagacctactgcaccagctcgtgaccttgatgaaccccaatacacttatgtctcatggagtccccgtggttcggaccaaccagtgtgccggagagttcgttattacatttccacgggcttaccactctggcttcaatcagggctacaactttgccgaagctgtgaacttctgcaccgcagattggctgcccgctggtcgtcaatgtatcgagcattacagacgacttcgaagatattgtgtgttttcccacgaagagttgatctgcaaaatggctgccttccccgagaccctggacttgaatctcgctgttgctgtccacaaggaaatgttcatcatggtacaagaggaacgtagactgaggaaagcactcctggagaagggcgtcactgaggccgaaagggaggccttcgagctcctgcccgatgatgaaagacagtgcattaaatgtaagaccacttgttttctgtctgctctggcctgctacgactgcccagacgggctggtctgtctgagccacatcaacgatctgtgtaagtgtagttcgtcccgccagtatctgaggtatcgatataccctggacgaactgcccacgatgctccacaagctgaaaatcagagcggaaagttttgacacttgggcgaacaaggtccgagtagcactagaggtcgaggacgggagaaagagaagttttgaagagctgcgggcactcgaatcggaggccagggagcgccgtttccccaattccgagctgctgcagaggctgaaaaactgcctttctgaggtagaggcctgcatcgcacaggtcctcgggttggtgtccgggcaggtggcacggatggacactcctcagttaacacttacagagctacgagtgctgctggagcagatgggaagcctcccttgcgctatgcatcagattggcgacgtgaaggtgttgagctggaaatggaggagatacgtgttcccataccacctgtgtgtgtattcaatgcaggggaatatcctgcccgattag

SEQ ID NO: 278026 - DNA, 2667 bp, Artificial Sequence
  derived and/or modified sequence
atggagcccggctgcgacgagttcctgcccccccccgagtgccccgtgttcgagcccagctgggccgagttccaggaccccctgggctacatcgccaagatcagacccatcgccgagaagagcggcatctgcaagatcagaccccccgccgactggcagccccccttcgccgtggaggtggacaacttcagattcacccccagagtgcagagactgaacgagctggaggcccagaccagagtgaagctgaactacctggaccagatcgccaagttctgggagatccagggcagcagcctgaagatccccaacgtggagagaaagatcctggacctgtacagcctgagcaagatcgtgatcgaggagggcggctacgaggccatctgcaaggacagaagatgggccagagtggcccagagactgcactacccccccggcaagaacatcggcagcctgctgagaagccactacgagagaatcatctacccctacgagatgttccagagcggcgccaaccacgtgcagtgcaacacccaccccttcgacaacgaggtgaaggacaaggagtacaagccccacagcatccccctgagacagagcgtgcagcccagcaagttcagcagctacagcagaagagccaagagactgcagcccgaccccgagcccaccgaggaggacatcgagaagcaccccgagctgaagaagctgcagatctacggccccggccccaagatgatgggcctgggcctgatggccaaggacaaggacaagaccgtgcacaagaaggtgacctgcccccccaccgtgaccgtgaaggacgagcagagcggcggcggcaacgtgagcagcaccctgctgaagcagcacctgagcctggagccctgcaccaagaccaccatgcagctgagaaagaaccacagcagcgcccagttcatcgacagctacatctgccaggtgtgcagcagaggcgacgaggacgacaagctgctgttctgcgacggctgcgacgacaactaccacatcttctgcctgctgccccccctgcccgagatccccagaggcatctggagatgccccaagtgcatcctggccgagtgcaagcagccccccgaggccttcggcttcgagcaggccacccaggagtacagcctgcagagcttcggcgagatggccgacagcttcaagagcgactacttcaacatgcccgtgcacatggtgcccaccgagctggtggagaaggagttctggagactggtgagcagcatcgaggaggacgtgaccgtggagtacggcgccgacatccacagcaaggagttcggcagcggcttccccgtgagcaacagcaagcagaacctgagccccgaggagaaggagtacgccaccagcggctggaacctgaacgtgatgcccgtgctggaccagagcgtgctgtgccacatcaacgccgacatcagcggcatgaaggtgccctggctgtacgtgggcatggtgttcagcgccttctgctggcacatcgaggaccactggagctacagcatcaactacctgcactggggcgagcccaagacctggtacggcgtgcccagcctggccgccgagcacctggaggaggtgatgaagatgctgacccccgagctgttcgacagccagcccgacctgctgcaccagctggtgaccctgatgaaccccaacaccctgatgagccacggcgtgcccgtggtgagaaccaaccagtgcgccggcgagttcgtgatcaccttccccagagcctaccacagcggcttcaaccagggctacaacttcgccgaggccgtgaacttctgcaccgccgactggctgcccgccggcagacagtgcatcgagcactacagaagactgagaagatactgcgtgttcagccacgaggagctgatctgcaagatggccgccttccccgagaccctggacctgaacctggccgtggccgtgcacaaggagatgttcatcatggtgcaggaggagagaagactgagaaaggccctgctggagaagggcgtgaccgaggccgagagagaggccttcgagctgctgcccgacgacgagagacagtgcatcaagtgcaagaccacctgcttcctgagcgccctggcctgctacgactgccccgacggcctggtgtgcctgagccacatcaacgacctgtgcaagtgcagcagcagcagacagtacctgagatacagatacaccctggacgagctgcccaccatgctgcacaagctgaagatcagagccgagagcttcgacacctgggccaacaaggtgagagtggccctggaggtggaggacggcagaaagagaagcttcgaggagctgagagccctggagagcgaggccagagagagaagattccccaacagcgagctgctgcagagactgaagaactgcctgagcgaggtggaggcctgcatcgcccaggtgctgggcctggtgagcggccaggtggccagaatggacaccccccagctgaccctgaccgagctgagagtgctgctggagcagatgggcagcctgccctgcgccatgcaccagatcggcgacgtgaaggtgctgagctggaagtggagaagatacgtgttcccctaccacctgtgcgtgtacagcatgcagggcaacatcctgcccgactag

SEQ ID NO: 278027 - protein, 364 aa, Artificial Sequence
  derived and/or modified sequence
MEIDGDVEIPPNKATVLRGHESEVFICAWNPVSDLLASGSGDSTARIWNLNENSNGGSTQLVLRHCIREGGHDVPSNKDVTSLDWNSDGTLLAMGSYDGFARIWTENGNLASTLGQHKGPIFALKWNKKGNYVLSAGVDKTTIIWDAHTGEAKQQFPFHSAPALDVDWQNNMTFASCSTDMCIHVCRLGCDHPVKTFQGHTNEVNAIKWDPSGMLLASCSDDMTLKIWSMKQDACVHDLQAHSKEIYTIKWSPTGPATSNPNSSIMLASASFDSTVRLWDVEQGVCTHTLMKHQEPVYSVAFSPDGKYLASGSFDKYVHIWNTQSGSLVHSYQGTGGIFEVCWNARGDKVGASASDGSVCVLDL

SEQ ID NO: 278028 - protein, 382 aa, Artificial Sequence
  derived and/or modified sequence
MSAANPETPNSTISREASTQSSSAAASQGWVLPEGKIVPNTVFVGGIDARMDETEIGSCFGRYGSVKEVKIITNRTGVSKGYGFVSFVNDVDVQKIVGSQIHFHGKKLKLGPAIRKQKLCARHVQPRPLVVNPPPPPQFQNVWRNPNTETYLQPQITPNPVTQHVQAYSAYPHSPGQVITGCQLLVYNYQEYPTYPDSAFQVTTGYQLPVYNYQPFPAYPRSPFQVTAGYQLPVYNYQAFPAYPNSPFQVATGYQFPVYNYQPFPAYPSSPFQVTAGYQLPVYNYQAFPAYPNSPFQVATGYQFPVYNYQAFPAYPNSPVQVTTGYQLPVYNYQAFPAYPNSPFQVATGYQFPVYNYQAFPAYPNSPVQVTTGYQLPVYNYQ

SEQ ID NO: 278029 - protein, 606 aa, Artificial Sequence
  derived and/or modified sequence
MSAANPETPNSTISREASTQSSSAAASQGWVLPEGKIVPNTVFVGGIDARMDETEIGSCFGRYGSVKEVKIITNRTGVSKGYGFVSFVNDVDVQKIVGSQIHFHGKKLKLGPAIRKQKLCARHVQPRPLVVNPPPPPQFQNVWRNPNTETYLQPQITPNPVTQHVQAYSAYPHSPGQVITGCQLLVYNYQEYPTYPDSAFQVTTGYQLPVYNYQPFPAYPRSPFQVTAGYQLPVYNYQAFPAYPNSPFQVATGYQFPVYNYQPFPAYPSSPFQVTAGYQLPVYNYQAFPAYPNSPFQVATGYQFPVYNYQPFPAYPSSPFQVTAGYQLPVYNYQAFPAYPNSPFQVATGYQFPVYNYQAFPAYPNSPVQVTTGYQLPVYNYQAFPAYPNSPVQVTTGYQLPVYNYQAFPAYPSSPFQVTTGYQLPVYNYQAFPAYPSSPFQVTTGYQLPVYNYQAFPAYPSSPFQVTTGYQLPVYNYQAFPAYPSSPFQVTTGYQLPVYNYQAFPAYPSSPFQVTTGYQLPVYNYQAFPAYPSSPFQVTTGYQLPVYNYQAFPAYPNSAVQVTTGYQFHVYNYQMPPQCPVGEQRRNLWTEAYKWWYLVCLIQRRD

SEQ ID NO: 278030 - protein, 654 aa, Artificial Sequence
  derived and/or modified sequence
MSAANPETPNSTISREASTQSSSAAASQGWVLPEGKIVPNTVFVGGIDARMDETEIGSCFGRYGSVKEVKIITNRTGVSKGYGFVSFVNDVDVQKIVGSQIHFHGKKLKLGPAIRKQKLCARHVQPRPLVVNPPPPPQFQNVWRNPNTETYLQPQITPNPVTQHVQAYSAYPHSPGQVITGCQLLVYNYQEYPTYPDSAFQVTTGYQLPVYNYQPFPAYPRSPFQVTAGYQLPVYNYQAFPAYPNSPFQVATGYQFPVYNYQPFPAYPSSPFQVTAGYQLPVYNYQAFPAYPNSPFQVATGYQFPVYNYQPFPAYPSSPFQVTAGYQLPVYNYQAFPAYPNSPFQVATGYQFPVYNYQAFPAYPNSPVQVTTGYQLPVYNYQPFPAYPRSPFQVTAGYQLPVYNYQAFPAYPNSPFQVATGYQFPVYNYQAFPAYPNSPVQVTTGYQLPVYNYQAFPAYPSSPFQVTTGYQLPVYNYQAFPAYPSSPFQVTTGYQLPVYNYQAFPAYPSSPFQVTTGYQLPVYNYQAFPAYPSSPFQVTTGYQLPVYNYQAFPAYPSSPFQVTTGYQLPVYNYQAFPAYPSSPFQVTTGYQLPVYNYQAFPAYPNSAVQVTTGYQFHVYNYQMPPQCPVGEQRRNLWTEAYKWWYLVCLIQRRD

SEQ ID NO: 278031 - protein, 987 aa, Artificial Sequence
  derived and/or modified sequence
MNHDFQALALESRGMGELLPTKKFWEPDDSTKDGQKGIFLGDDEWRETAWGASHHSMSQPIMVQRRSGQGFHGNSEVNAILSPRSESGGLGVSMVEYVLSSSPADKLDSRFRKGNFGTRDAETDGPEKGDQKGKASPFEEDQNRDLKQGDDDDSKINGRGLPNGMDADCKDFNRTPGSRQASPTEVVERLGPNTNPSEGLGPLPNPTANKPLVEEFSNPETQNLDAMEQVGLESLQFDYPGNQVPMDSSGATVGLFDYNSQQQLFQRTNALTVQQLTAAQQQQYALAAAQQPHIAGVFSAGLAPAAFVPNPYIISAAPPGTDPYTAAGLAAAATLAGPAVVPPQYYGVPWGVYPANLFQQQAAAAANNTASQQAASQAQPGQQQVLRAGAGQRPLTPNQGQQGQQAESLAAAAAANPTLAFGQGLATGMPGYQVLAPTAYYDQTGALVVGPGARTGLGAPVRLMAPTPVLISSAAAQAAAAAAAGGTASSLTGSTNGLFRPIGTQPPQQQQQQPSTNLQSNSFYGSSSLTNSSQSSSLFSHGPGQPGSTSLGFGSGNSLGAAIGSALSGFGSSGGLTNGSGRYISAAPGAEAKYRSASSTSSLFSSSSQLFPPSRLRYNRSDIMPSGRSRLLEDFRNNRFPNLQLRDLIGHIVEFSQDQHGSRFIQQKLERATPAERQMVFNEILQAAYQLMTDVFGNYVIQKFFEFGSLDQKLALATRIRGHVLPLALQMYGCRVIQKALESISSDQQVISEMVKELDGHVLKCVKDQNGNHVVQKCIECVQPQSLQFIIDAFKGQVFVLSTHPYGCRVIQRILEHCTAEQTLPILEELHQHTEQLVQDQYGNYVIQHVLEHGRPEDKSKIVSEIRGKVLALSQHKFASNVVEKCVTHASRAERALLIDEVCCQNDGPHSALYTMMKDQYANYVVQKMIDMAEPAQRKIIMHKIRPHITTLRKYTYGKHILAKLEKYYLKNSPDLGPIGGPPNGML

SEQ ID NO: 278032 - DNA, 2964 bp, Artificial Sequence
  derived and/or modified sequence
atgaaccatgatttccaggcactggccctggagtcaaggggtatgggagaactactgccaacaaaaaagttttgggaacccgacgactccacaaaagacgggcaaaaggggatcttcctgggagacgatgagtggagggaaacagcctggggtgcctcccaccacagtatgtcccagccaatcatggtgcagaggaggtccggccagggattccacgggaattccgaggtgaatgctatactttctccgcgaagcgagtcaggagggctgggcgtgagtatggttgagtatgtgctgtcctccagcccggccgacaaattggactcaagatttcggaaaggcaattttggaacccgagatgccgagactgatgggccagaaaagggggaccagaagggcaaggcttcgcctttcgaggaagaccaaaacagagatctcaagcagggcgatgatgatgactctaaaatcaatggccggggtctgcccaatgggatggacgcagattgtaaggattttaaccggacgcccgggtcccgccaggctagccctaccgaagtcgtggagcgactgggtcccaacaccaatccgtctgaaggattaggtccactgccgaatcccaccgcgaacaaacctctagtggaggagttctctaatccggaaacccagaacctggacgctatggagcaggtgggtttggagagtctgcagttcgactaccctgggaatcaggtgccaatggacagtagcggtgccaccgttggactcttcgattacaacagtcagcaacagctctttcagcggaccaacgctcttacagtgcagcaattaaccgccgcccagcagcagcagtatgccctggctgccgcacagcaacctcacattgctggtgtgtttagcgcaggcctggccccagccgcatttgttccaaacccctacatcatttccgctgcccctcctggcacagacccatacaccgccgccggcttagcagcagctgcaaccctcgctggtccagccgtcgttcctccacagtattacggagtgccatggggcgtgtatcctgcaaacttgttccaacagcaggcagccgccgctgccaataatactgcgtcccagcaggcagcctctcaagcccagccgggacaacaacaagtcctcagggctggggccggacagagacccttaacacctaaccaaggccaacaaggacagcaggccgaatctctggcagccgctgctgctgcgaaccctacattggcctttggccagggtcttgcaacaggaatgccaggatatcaggtgctagctcccacggcatactatgatcagaccggtgcattggtcgtgggtcccggggctcgcaccggcctcggggccccagtaagactgatggcacctacaccagtgctcataagttccgccgcagcacaagctgccgctgcagcggccgccggtggtaccgcaagctccctgaccgggtctacaaatggcctgtttagacccataggcactcaaccaccacagcaacagcagcaacaaccatctacgaacctgcagtccaatagtttttacggctccagttcccttactaactcttcccagtcttcctccctgttctcccatggcccggggcagccgggctccacaagcctgggatttggctccggcaactcattgggcgccgccattggctccgctctgtccgggttcggatcctcagggggcttaaccaacggctcagggcggtacattagcgccgcacctggcgcagaggccaagtacagatcggcatcttcaacaagttcattgtttagcagcagcagccagctcttccccccttctcgcctgagatacaaccgcagtgatattatgccctcgggcaggtcccggttactggaggattttcgcaacaatcggttccccaacctgcaactgcgggatcttatcggccatatcgtagagttcagtcaggatcagcatggctccaggtttatccaacagaaactagagcgggctacaccagcggagcggcagatggtcttcaacgaaattctgcaggcagcctaccaactgatgactgacgtcttcgggaattatgtgattcagaaattctttgaatttggctccctggaccagaagctggctctggctacccggatccgtggccatgtcctgcctttggcactgcagatgtacggttgtagggttattcaaaaggcacttgagtctatctcaagcgaccagcaagttattagcgagatggtaaaggagctggatggtcacgtcctcaaatgtgttaaggaccaaaatggtaaccacgtagtgcaaaagtgtatcgagtgtgtacagccacaatcactgcagttcatcatcgacgcattcaagggacaggtcttcgtcttgagcactcatccgtatggatgccgagtcatccagaggattctggagcactgtaccgctgaacaaacattgcccatcctcgaagagctgcaccagcataccgagcaacttgtgcaggaccagtatggcaattatgtcatacaacatgtgctggagcatggtcggcctgaggataagtccaagatagtttcagagattagggggaaagtgctggccctatctcaacataagtttgcctccaacgtggttgagaaatgtgtcacgcatgcatccagggccgaaagggctctgctcatcgatgaagtgtgctgtcagaatgacggccctcactcagctctgtacacaatgatgaaggatcaatacgctaattacgttgtccaaaagatgattgatatggctgagccagcccagcgcaagattatcatgcacaagattagaccccacataaccacactgcgcaaatacacatacgggaagcacatcctggccaagctggagaagtactatttgaagaacagtcccgacctggggcccattggcgggcctcccaacgggatgctctag

SEQ ID NO: 278033 - DNA, 2964 bp, Artificial Sequence
  derived and/or modified sequence
atgaaccacgacttccaggccctggccctggagagccggggcatgggagagctgctgcccaccaagaagttctgggagccagatgacagcaccaaggatggccagaagggcatcttcctgggagatgatgagtggagggagacagcctggggcgccagccaccacagcatgagccagcccatcatggtgcagaggagaagtggccagggcttccacggcaacagcgaggtgaatgccatcctgagccccaggtctgagagcggcggcctgggcgtgtccatggtggagtatgtgctgagcagcagccctgctgacaagctggacagccgcttcagaaaaggaaactttggcaccagagatgctgagacagatggccctgagaagggggaccagaagggcaaggccagcccctttgaggaggaccagaacagagacctgaagcagggagatgatgatgacagcaagatcaatggccggggcctgcccaacggcatggatgctgactgcaaggacttcaacagaacacctggcagccggcaggccagccccacagaggtggtggagcggctgggccccaacaccaaccccagcgagggcctgggccccctgcccaaccccacagccaacaagcccctggtggaggagttcagcaaccctgagacccagaacctggatgccatggagcaggtgggcctggagagcctgcagtttgactacccaggcaaccaggtgcccatggacagcagcggggccaccgtgggcctgtttgactacaacagccagcagcagctgttccagaggaccaatgccctgactgtgcagcagctgacagctgcccagcagcagcagtatgccctggccgccgcccagcagccccacatcgccggggtcttctctgctggcctggccccagctgcctttgtgcccaacccctacatcatctctgctgcccctcctggaacagacccctacacagctgctggcctggccgccgccgccaccctggccggccctgctgtggtgcccccccagtactacggcgtgccctggggcgtgtacccagccaacctcttccagcagcaggccgctgctgctgccaacaacacagccagccagcaggccgccagccaggcccagcccggccagcagcaggtgctgcgggccggggccggccagaggcccctgacccccaaccagggccagcagggccagcaggccgagagcctggccgctgctgctgctgccaaccccaccctggccttcggccagggcctggccaccggcatgcctggctaccaggtgctggcccccacagcctactatgaccagacaggagccctggtggtgggccctggggccaggacaggcctgggcgcccctgtgcggctgatggcccccacccctgtgctgatcagcagcgctgctgcccaggccgctgctgctgctgctgctgggggcacagccagcagcctgaccggcagcaccaacggcctcttccggcccatcggcacccagcccccccagcagcagcagcagcagcccagcaccaacctgcagagcaacagcttctacggcagcagcagcctgaccaacagcagccagagcagcagcctcttcagccacggccctggccagcccggcagcaccagcctgggctttggaagtggcaacagcctgggcgccgccatcggcagcgccctgagcggcttcggcagcagcggcggcctgaccaacggcagcggccgctacatctctgctgcccctggagctgaggccaagtaccgcagcgccagcagcaccagcagcctcttcagcagcagcagccagctgttcccccccagccggctgcgctacaacagaagtgacatcatgcccagcggccgcagccggctgctggaggacttcaggaacaaccgcttccccaacctgcagctgcgggacctgattggccacatcgtggagttcagccaggaccagcacggcagccgcttcatccagcagaagctggagcgggccaccccagctgagcggcagatggtgttcaatgagatcctgcaggccgcctaccagctgatgacagatgtgtttggaaattatgtgatccagaagttctttgaatttggcagcctggaccagaagctggccctggccacccgcatccggggccacgtgctgcccctggccctgcagatgtatggctgcagggtcatccagaaggccctggagagcatcagcagtgaccagcaggtgatcagcgagatggtgaaggagctggatggccacgtgctgaagtgtgtgaaggaccagaatggaaatcatgtggtgcagaagtgcattgaatgtgtgcagccccagagcctgcagttcatcattgatgccttcaagggccaggtgtttgtgctgagcacccacccctacggctgcagggtcatccagaggatcctggagcactgcacagctgagcagaccctgcccatcctggaggagctgcaccagcacacagagcagctggtgcaggaccagtatggcaactacgtgatccagcacgtgctggagcacggccggcctgaggacaagagcaagatcgtgtctgagatccggggcaaggtgctggccctgagccagcacaagtttgccagcaatgtggtggagaagtgtgtgacccacgccagcagagctgagcgggccctgctgattgatgaggtgtgctgccagaatgatggcccccacagcgccctgtacaccatgatgaaggaccagtatgccaactacgtggtgcagaagatgattgacatggccgagcccgcccagaggaagatcatcatgcacaagatccggccccacatcaccaccctgaggaagtacacctacggcaagcacatcctggccaagctggagaagtactacctgaagaacagcccagacctgggccccatcggcggcccccccaacggcatgctgtag

SEQ ID NO: 278034 - DNA, 2964 bp, Artificial Sequence
  derived and/or modified sequence
atgaaccacgacttccaggccctggccctggagagccggggcatgggagaactactgcccacaaagaagttctgggaaccagatgattccaccaaagatggccagaaaggaatcttcctcggcgatgatgagtggcgcgaaacggcatggggcgccagtcatcacagcatgtctcaacctattatggtccagcggcgaagtgggcaaggattccatggcaattccgaggtgaacgcgattctgtcacctaggagtgagagcgggggtctcggagttagcatggtcgagtatgtcctgtccagctcacctgccgacaaattagacagtagatttagaaagggcaacttcggcactagagacgctgaaacggacggtcccgaaaagggggaccagaagggcaaggcatctccctttgaggaggaccagaaccgggatctgaaacagggggatgatgacgattcaaagataaacggtcgcggactgcccaacggtatggatgcagactgcaaggattttaatcggacaccagggtccagacaggcaagccccacggaggtagtagaacgtctgggccccaatacaaatccgtccgaaggccttgggcccttaccaaacccaaccgccaataaacctcttgttgaggaattcagtaaccctgaaactcagaatttagacgcaatggaacaggtgggccttgagagcctgcaattcgattacccagggaatcaagttcccatggacagcagtggcgccactgtggggttatttgactataacagtcagcagcaactgtttcagcgaaccaatgcactcaccgtgcagcagctgactgcagcccagcagcaacagtatgcattagctgctgcccaacagccccatattgccggtgtgttctctgcgggcctggctcccgctgccttcgtgcctaatccctacattatcagcgctgcacccccaggaacggacccttacaccgccgcagggctggccgctgctgctacgttggcagggcctgctgttgtacccccccagtactatggagtgccttggggggtgtacccagctaatcttttccaacagcaggctgctgcagccgccaacaacaccgccagccaacaagctgcatcccaggcccagccaggccagcagcaggtgctgagagcaggtgctggacagagaccgttgacgcccaatcagggccaacagggccagcaagctgaaagtctagcagccgctgccgcagccaaccctacactggcatttgggcagggcctcgctaccgggatgccaggctatcaggtgctggcgccaacggcctattacgaccaaacgggggccctcgtggtggggcctggagccaggacggggctgggcgcccccgttcgactgatggctccaactcctgtactgatctcaagcgcggccgcacaggcagctgccgctgcagctgccgggggcactgccagttcattgacagggtcaaccaacggactgtttcgtcctattggaacgcaaccaccccagcagcagcagcagcaaccctcaaccaaccttcagtctaatagcttctatggatcaagcagtctgactaactcctctcagagctcaagtctgtttagtcatggccctggacaacctggctcaacaagcttgggatttggcagcggcaattcactgggggctgcaataggctcggctttatccgggttcggcagctctggcggactcaccaatgggagcggacggtacatcagtgccgcgccaggtgctgaggcaaagtatcggagcgcctcttcaacctcctccttgttctcgagtagtagtcaactctttcctccgtctagactgaggtataataggtctgacataatgccttctgggcgctcacgcctgttggaggatttccgtaacaatcggtttcctaacctccagttgcgcgacctgatcgggcatatagttgaattctcacaagaccaacatggttctagatttattcagcaaaagctggagagagccaccccagccgagagacagatggtcttcaacgagatactgcaggctgcataccagctgatgactgacgtattcggtaattatgtgatacagaaattctttgagttcgggtctctggatcagaaattggccctagcaacacgaattcgcggccatgtgttgccgttggcactgcaaatgtatgggtgcagagtgatccagaaagccttagagtcaatctcatctgaccagcaggtaatctctgagatggtgaaggagctggatgggcatgtgctgaagtgtgtaaaggatcagaacggaaatcacgtggtccaaaaatgtattgagtgtgttcagccacagagcctacagtttataattgacgctttcaaagggcaggtgttcgtgctgtctacccacccctacgggtgcagggtcattcaaagaattttggaacattgcaccgccgagcagactctccccatcttagaagagcttcatcagcacactgagcagctcgtgcaggatcagtacggtaattacgtgatccagcacgtgctggagcatggccgtcctgaagataagagtaagatcgtgtccgagatcagggggaaagtcttggcgctgtcccagcacaagttcgcaagcaacgtggtggagaagtgcgttacacacgcttcaagagccgagagggctctgctgattgatgaagtctgttgccagaatgacgggccgcactccgctctgtacaccatgatgaaagaccaatatgcaaattacgtggtacagaagatgattgacatggccgaaccagcccagagaaagattattatgcataagataagaccccacattaccaccttgaggaagtatacctatggaaagcatatcctcgcaaagttagaaaagtattacttgaagaactcccccgatctgggcccgattggggggccgcccaacggaatgttatag

SEQ ID NO: 278035 - DNA, 2964 bp, Artificial Sequence
  derived and/or modified sequence
atgaatcatgactttcaggcactggcattggagagtagaggcatgggagagttgctgcctactaaaaagttttgggagccggatgatagcactaaggacggccagaaaggtatttttcttggagatgatgaatggagagagactgcttggggggctagccaccacagcatgtcgcagcccatcatggtgcagcggcgttctgggcaagggttccacggaaactccgaagttaatgccattctgtctcctaggtccgagtctgggggactcggtgtgagtatggtagagtacgttttatcgtcatctccagctgataagctggacagccggttcagaaaaggtaattttgggacaagggatgcggagacagacgggcctgagaagggcgaccagaaggggaaagcctctccattcgaagaggatcagaacagagatttgaagcagggcgacgacgacgactccaagattaatgggcgaggtctccctaacggcatggatgccgattgcaaggatttcaaccgcacacccggtagtcggcaagctagtccaacagaggtcgtggagagactcggaccgaatacaaatccatccgaaggccttggtccactccccaaccctaccgccaataaaccactggttgaggagttttccaatcccgagactcaaaatctggatgctatggagcaggttggtctagaatcactgcagtttgattaccctggaaaccaagtccccatggatagttcaggcgctacagtagggttgtttgattacaattcacagcaacagctgttccagcgtaccaacgccctgaccgttcagcaattgacagctgcccagcagcaacagtatgcgctggccgcagctcagcagccacacattgcgggtgttttttctgccggtttagctcccgctgctttcgtccctaatccatatattatatcagcagcaccgccagggactgacccttacaccgccgctggacttgctgcagccgcaacacttgctggacctgccgtcgtgcctccacagtactatggggttccatggggcgtgtatccagccaatctctttcagcagcaggcagccgctgccgcaaataacacagcgtcgcagcaagcagccagtcaggcccaaccaggccagcagcaggtgcttcgcgcaggagctggacagcggccactgacccctaaccagggccagcaggggcagcaagctgaatctcttgccgcagctgctgctgcaaaccccaccctggcatttggtcaaggtttagcaacagggatgcccggttaccaggtcttggctcctacggcttattacgaccaaacgggggcactggtggtgggtcccggagcccgaaccggcctgggcgctcccgtgcggttaatggcaccgactcccgtgctcatcagctcagcagccgctcaggccgcagccgcagctgctgctggcggtacagcaagttcccttacgggctctactaacggacttttccggcctattggtacccagccgccacagcagcagcagcagcagccgagcaccaatttacaaagtaacagcttctatggcagcagtagtctaaccaattcgtcacagtcgagcagcctgttctcacacggcccaggtcagccaggaagtactagcttgggattcggtagtgggaattcactgggtgctgctattggttccgccctaagcggctttggttctagcggtggtcttactaacggcagcggtcgttatatctccgccgcaccaggtgccgaagccaagtaccggagtgccagctccacttcttccctgtttagctccagttcgcaactgtttcccccttctagactccgttataaccgctctgatatcatgccgtccggacgctccaggctgctggaggacttccggaataatcggtttcccaatcttcagcttcgagatctgattggtcacatcgtagaattttctcaggatcaacacggctcgagatttatccagcagaagctagagagggccacacccgcagaaaggcagatggtttttaacgagattctccaggcagcatatcagctcatgacggacgtgtttgggaactatgtcattcagaagttcttcgagttcgggagtctcgatcagaaactggctctggctacccgaattaggggccatgttctacctctggctcttcagatgtatggttgtcgggtcatccagaaggcactggagagtattagttcagatcagcaggtgatttcggaaatggtgaaagaactggacgggcacgttctcaagtgcgtgaaagaccagaatggaaatcatgttgttcagaaatgtatcgagtgcgtgcagcctcaaagcctgcaatttatcattgacgccttcaagggacaggttttcgtgttaagcactcatccatacggctgccgggttatccaacgcatcctcgaacattgcaccgcagaacagacgctgccaatcttggaggaacttcaccagcataccgagcagttggtccaagatcaatatgggaattatgtgatccaacacgtgctggagcatggtcgtcccgaggacaaatcgaaaatagtaagcgaaatccggggtaaggtgcttgctctctctcagcataagtttgcttcaaacgttgttgagaagtgtgtcacccacgccagccgggcagaacgcgcactgctgatcgacgaggtatgttgccagaatgatggaccacacagtgcactgtacactatgatgaaggaccagtatgccaactatgtggtgcagaaaatgatagacatggccgagcccgcacagcgcaagatcattatgcataagatcagaccccacatcaccacgctgagaaaatatacgtatgggaagcacatcctcgctaaactggaaaaatactatctgaagaactcgcccgacttgggcccaatcggcggtccacctaatgggatgctttag

SEQ ID NO: 278036 - DNA, 5880 bp, Artificial Sequence
  derived and/or modified sequence
aacaggtttgatctgtggatgaaatgaatcatgattttcaagctcttgcattagaatctcggggaatgggagagcttttgcctaccaaaaagttttgggaacctgatgattcaacaaaagatggacaaaaaggcatatttcttggggatgatgaatggagagagactgcatggggagcttctcaccattcaatgtcccagcctattatggtacagagaagatctggacagggttttcatggaaacagtgaagtaaatgcaatactgtctccgcgatcagaaagtggaggccttggtgtgagcatggtagaatatgtattaagttcttctcctgctgataaattggattctcgatttaggaagggaaattttggcactagagatgctgaaacagatggacctgagaaaggagatcaaaaaggcaaggcttctccatttgaggaggaccaaaacagagatcttaaacaaggagatgatgatgattctaaaataaatggcagaggtttgccaaatggaatggatgccgattgcaaagattttaatcgtactcctggaagtcgtcaagcctctccaactgaagtagttgagcgcttgggccccaatactaatccctcagaaggactggggcctcttcctaatcctacagctaataaaccacttgttgaagaattttcaaatcctgaaactcagaatctggatgccatggaacaagttggtctggaatccttacagtttgactatcctggtaatcaggtaccaatggactcttcaggagctactgtaggcctttttgactacaattcccagcagcagctctttcagaggactaatgcactaacagttcaacagttaactgcagctcaacagcagcaatatgcattagcagcagctcagcagccacatatagctggtgtattctcagcaggccttgctccagctgcatttgtgccaaatccatacattattagtgctgctcctccagggaccgatccgtatactgcagcaggattggctgcagcagctacattagcaggtccagcagtggttccacctcagtattacggcgttccatggggggtgtatccagccaacttatttcagcagcaagctgcagctgcggcaaataacacagccagtcagcaagcagcatcacaagctcagcctggacagcaacaggttctccgtgctggagcaggtcagcgtcctcttactcccaatcagggtcagcaagggcagcaagcagaatcacttgcggcagctgcagcagcaaatccaacattggcttttggtcagggtcttgctactggcatgccaggctatcaagtactagctccaactgcctattatgatcagactggtgccttagtggttggccctggagcaaggactggccttggagctccagttcggttaatggctccaacacctgttttaattagttcagcagcagcacaagctgcagcagcagcagcagctggaggaactgcaagtagccttacaggcagcacaaatggtctgtttcggccaattggcactcagccaccacagcagcagcaacagcagccaagcactaatctgcaatctaattcattttatggaagcagttctttgactaatagctcccagagtagttctttattttctcatggacctggtcaacctggaagtacatctcttggctttggaagtggtaactctttgggtgctgctataggctcagccctcagtggatttggttcatcaggaggactgacaaatggtagtggtcgatatatctctgcagcacctggagcagaagcaaaatatcgaagtgcttcaagcacttccagtctatttagctccagcagccagctctttcctccttcccggcttcggtataataggtctgatattatgccttctggccgcagtagattattggaagatttcagaaacaaccgcttcccaaaccttcagcttagagacttgattggacatatagttgagttttctcaagaccagcatggttctagattcatacagcaaaaactagagagagctactccagctgagcgacagatggtatttaatgaaattctgcaagcagcctatcaattaatgactgatgtttttggcaactatgttatacagaagttttttgagtttgggagtctggatcaaaaattagccctggctactcgtattcgtggtcatgttctacccttagccttgcagatgtatggctgccgcgttattcagaaagcattagaatctatttcttctgaccagcaggtaattagtgaaatggtaaaggagctggatggtcatgtgctcaaatgtgtgaaagatcagaatggaaaccatgttgtacaaaaatgtatcgaatgtgttcagccacagtcactacagttcatcattgatgctttcaagggacaagtatttgtgctttcaactcatccttatggctgcagagtaattcagcgcatcctagagcattgcactgcagaacagaccttacctatcttagaagaactccaccaacatacagagcagttggtacaggatcagtatggcaattatgttattcagcatgtactggaacacggtcgacctgaagacaagagcaaaattgtttccgaaatcaggggaaaggttttagccctgagtcaacacaaatttgccagcaatgtagtagaaaagtgtgttactcatgcctcccgtgctgagagagctttactgattgacgaggtttgctgccagaatgatggtcctcacagtgccttatacaccatgatgaaggaccagtatgccaattacgtggttcaaaagatgattgatatggctgaacctgctcagagaaagataatcatgcacaagattcgacctcacattactactttgcgcaaatacacatacgggaagcatatactggccaagttggaaaagtattatttgaagaatagcccggacctaggacctattggaggaccaccaaatggaatgctgtaaattacaggagcaagagaaagaagataatttaaccatgtgaaaagaatttttttgtgtgtgaattatcaaaacacaactcaactatgaatcttcaatttttttttaaagcaaaactatttattgactttattcatccatttgtaaattttttaaggttcttgtgtatatttggggggtgggggatgaattataaattatattcagccctgagtggagacctatcagattggattgctggcaaagcacagaatgcctgtatatgatgtaactgtatcaaaaataaaaagctgtcacatattttgtaaatttttaccttgtaaagtcacaaaaatagtttttaaaggaaaaagtacagtattcttttaataaactggctcacagtctggtaggtctacaaccccatagcacaacaggtttatagagatgtatatagaattatagtccttatttttttcctttgcgtgaaaccttttataacagattaacaatcaactgcataaatattattaatattttaaaaagagttaagttgtattttgataattcacaaactatcatgcaaataacgagtaagtagacaagaataaagtggtttgagatgaaaagaacctaacattatttacagtagatgtggttttaatacaattactgccctaaaatgtctctggcaatgtacagaaatattgtatatacttacatatgtaattgttgtaagagttaaatacaaaatcatggtgacacttccaattaagtgcactaaatgaaaagttaagtcacttattaacttttcagtttggtttgcaatgagaaagagtggaaatttgtattttgttttgcttatagaattacagacatgttgaggaagtgttgagctttattttgctttttcatagaggcagaaagtaggaaccagatagagatgaaaaggggccactgaaaagtgaatttgatagctcagcatttaagcatgattacatattcagatagctctttttgctttctataaatatatgcattgtgtgtgtagtaatagatgtaagtttacactttgaaaggaaatcttgtttcaatgtttattataaaagccttgctaatttagtagtgatgctttccttggttgtacaggtgtacatttgtaaaccttcatgctgtaaatggaatttgttttatctctttgggatacatttgcattttagtgtacatttacgtccctgccctctttgacctggcaatatagtgttgtataatgtaaatttatttctccaaatcgagagtgattttttaaaaattttttatctttatatggtttcagaagtatgaaccagctttctttttattattgtgagatcattttgttttataacatagttgttgactgttaatatggacctgctagaatttggatcactttcaattgaagtcagggtattgtgcataatagaaagtattggactgagatatttggttaccatggaggccaatgcttttttcatcttattaaatgtgatgtgacttttttctttgtacagaagagtactgtatttttgaatagcctactcccaagtaagagcaaatctgtatgataacattttttcctctggacataagacataacagtaacacgatgtacatttacaagcggccttatgtacatttcccaacaatctttttaaggcaaaattgtgaccatatgtgtataattaaaatcgtttttaatcctttgcctatgaaaatattttggaaaaaaacttgctgtgtatattcagtttctgaaagataaagaaagtgctttgtattttgttgaagtcagtattttgtataaacatttatgttgacccacttatgttcagtgctgaaaactaaaatgaacatgctattctgtcagctgaatatggaagagatctttttttactagagatctgcagaagaaacgcaatcttctgagcacaatatggaatctaaaggttttatcacttagttgttcatattatgaacctaaaaataatggcataaagtttggggatgccaggcatactttttcatgtttggtgttgagttattttacttttctaacccaacattccttggtgagaccattaaatccaaacacttgtcaccgttccttctcatagtcactctgggtcatcagcatgtcccagtcactgcagcaacgccttgtgtttgtttcatttttttaaaacccacacaaagccgctgtctcactttttcctactttaccaacctcagagtatttcggcccgtatcgaacttttgttctcagtatcagcccatggtttcaggatcaaagctgtcatgttggagattggtaatggctttcctgtctttgtacagttgaattcctagtcttccttcatccttgccctctgttggcacaggcattatctctgcaattttagaaaatgacaagtagagaatactacattgagaaactaaaccctcttcttggggtcctgatactcattcccatttgtcccagtgctgacaacccaatcttcccaatactttcaggcctgctctacaaaagtacctgttcttgtagaaattttacagtctgccattttgggtgcccaccccaatttttaccttttagtaagttggcatgaaattttggtaaaatctgaaaatcacatttcagaataaaacaattgggcaaaactacctaggctttactcttgagtgtctccttttgatagggattgtttctggaccagtttgtctaagtcctggctcttattggttcatatgaaataatgttaacttcacttctttgtatattatgtataaattagaaaatgaaaaatgtgtgaataacattgtatgaaataaacctggtcttgtgtttttctctagataaaatacccctctgtacctc

SEQ ID NO: 278037 - DNA, 2964 bp, Artificial Sequence
  derived and/or modified sequence
atgaaccacgacttccaggccctggccctggagagcagaggcatgggcgagctgctgcccaccaagaagttctgggagcccgacgacagcaccaaggacggccagaagggcatcttcctgggcgacgacgagtggagagagaccgcctggggcgccagccaccacagcatgagccagcccatcatggtgcagagaagaagcggccagggcttccacggcaacagcgaggtgaacgccatcctgagccccagaagcgagagcggcggcctgggcgtgagcatggtggagtacgtgctgagcagcagccccgccgacaagctggacagcagattcagaaagggcaacttcggcaccagagacgccgagaccgacggccccgagaagggcgaccagaagggcaaggccagccccttcgaggaggaccagaacagagacctgaagcagggcgacgacgacgacagcaagatcaacggcagaggcctgcccaacggcatggacgccgactgcaaggacttcaacagaacccccggcagcagacaggccagccccaccgaggtggtggagagactgggccccaacaccaaccccagcgagggcctgggccccctgcccaaccccaccgccaacaagcccctggtggaggagttcagcaaccccgagacccagaacctggacgccatggagcaggtgggcctggagagcctgcagttcgactaccccggcaaccaggtgcccatggacagcagcggcgccaccgtgggcctgttcgactacaacagccagcagcagctgttccagagaaccaacgccctgaccgtgcagcagctgaccgccgcccagcagcagcagtacgccctggccgccgcccagcagccccacatcgccggcgtgttcagcgccggcctggcccccgccgccttcgtgcccaacccctacatcatcagcgccgccccccccggcaccgacccctacaccgccgccggcctggccgccgccgccaccctggccggccccgccgtggtgcccccccagtactacggcgtgccctggggcgtgtaccccgccaacctgttccagcagcaggccgccgccgccgccaacaacaccgccagccagcaggccgccagccaggcccagcccggccagcagcaggtgctgagagccggcgccggccagagacccctgacccccaaccagggccagcagggccagcaggccgagagcctggccgccgccgccgccgccaaccccaccctggccttcggccagggcctggccaccggcatgcccggctaccaggtgctggcccccaccgcctactacgaccagaccggcgccctggtggtgggccccggcgccagaaccggcctgggcgcccccgtgagactgatggcccccacccccgtgctgatcagcagcgccgccgcccaggccgccgccgccgccgccgccggcggcaccgccagcagcctgaccggcagcaccaacggcctgttcagacccatcggcacccagcccccccagcagcagcagcagcagcccagcaccaacctgcagagcaacagcttctacggcagcagcagcctgaccaacagcagccagagcagcagcctgttcagccacggccccggccagcccggcagcaccagcctgggcttcggcagcggcaacagcctgggcgccgccatcggcagcgccctgagcggcttcggcagcagcggcggcctgaccaacggcagcggcagatacatcagcgccgcccccggcgccgaggccaagtacagaagcgccagcagcaccagcagcctgttcagcagcagcagccagctgttcccccccagcagactgagatacaacagaagcgacatcatgcccagcggcagaagcagactgctggaggacttcagaaacaacagattccccaacctgcagctgagagacctgatcggccacatcgtggagttcagccaggaccagcacggcagcagattcatccagcagaagctggagagagccacccccgccgagagacagatggtgttcaacgagatcctgcaggccgcctaccagctgatgaccgacgtgttcggcaactacgtgatccagaagttcttcgagttcggcagcctggaccagaagctggccctggccaccagaatcagaggccacgtgctgcccctggccctgcagatgtacggctgcagagtgatccagaaggccctggagagcatcagcagcgaccagcaggtgatcagcgagatggtgaaggagctggacggccacgtgctgaagtgcgtgaaggaccagaacggcaaccacgtggtgcagaagtgcatcgagtgcgtgcagccccagagcctgcagttcatcatcgacgccttcaagggccaggtgttcgtgctgagcacccacccctacggctgcagagtgatccagagaatcctggagcactgcaccgccgagcagaccctgcccatcctggaggagctgcaccagcacaccgagcagctggtgcaggaccagtacggcaactacgtgatccagcacgtgctggagcacggcagacccgaggacaagagcaagatcgtgagcgagatcagaggcaaggtgctggccctgagccagcacaagttcgccagcaacgtggtggagaagtgcgtgacccacgccagcagagccgagagagccctgctgatcgacgaggtgtgctgccagaacgacggcccccacagcgccctgtacaccatgatgaaggaccagtacgccaactacgtggtgcagaagatgatcgacatggccgagcccgcccagagaaagatcatcatgcacaagatcagaccccacatcaccaccctgagaaagtacacctacggcaagcacatcctggccaagctggagaagtactacctgaagaacagccccgacctgggccccatcggcggcccccccaacggcatgctgtag

SEQ ID NO: 278038 - DNA, 933 bp, Artificial Sequence
  derived and/or modified sequence
atgagaagagccgccctgtggctgtggctgtgcgccctggccctgagcctgcagcccgccctgccccagatcgtggccaccaacctgccccccgaggaccaggacggcagcggcgacgacagcgacaacttcagcggcagcggcgccggcgccctgcaggacatcaccctgagccagcagacccccagcacctggaaggacacccagctgctgaccgccatccccaccagccccgagcccaccggcctggaggccaccgccgccagcaccagcaccctgcccgccggcgagggccccaaggagggcgaggccgtggtgctgcccgaggtggagcccggcctgaccgccagagagcaggaggccacccccagacccagagagaccacccagctgcccaccacccacctggccagcaccaccaccgccaccaccgcccaggagcccgccaccagccacccccacagagacatgcagcccggccaccacgagaccagcacccccgccggccccagccaggccgacctgcacaccccccacaccgaggacggcggccccagcgccaccgagagagccgccgaggacggcgccagcagccagctgcccgccgccgagggcagcggcgagcaggacttcaccttcgagaccagcggcgagaacaccgccgtggtggccgtggagcccgacagaagaaaccagagccccgtggaccagggcgccaccggcgccagccagggcctgctggacagaaaggaggtgctgggcggcgtgatcgccggcggcctggtgggcctgatcttcgccgtgtgcctggtgggcttcatgctgtacagaatgaagaagaaggacgagggcagctacagcctggaggagcccaagcaggccaacggcggcgcctaccagaagcccaccaagcaggaggagttctacgcctag

SEQ ID NO: 278039 - DNA, 933 bp, Artificial Sequence
  derived and/or modified sequence
atgcgccgtgccgcgctatggctgtggctctgcgccctagcactgagcttgcaacccgccctgccccagattgtcgcaacaaacctcccaccggaagatcaggatggaagtggcgatgattccgacaatttctcagggtcaggggctggagctttgcaagacatcaccctatctcaacagacacctagcacttggaaggacacccaactgttaacagccatacccacaagccctgaacctactggactggaagccacagcggcaagcactagtacccttccggctggcgaaggccccaaggaaggcgaggctgtggtgctgcctgaagtggagcctggcctgactgccagggagcaggaagcgaccccacgacctagggaaaccacccagttgcccactactcacctggcctccactacaacagccaccaccgcccaggaaccagctacctcacatcctcacagggatatgcaacccggtcatcacgagacgagcacacccgctggcccctcacaggctgacctgcacacacctcatactgaagatgggggcccctctgcgacggagagggccgccgaggatggggcctcctcacagctgccagccgccgagggctcgggggagcaggacttcactttcgagacctccggtgagaatacagctgttgtggcggtcgaacccgaccgcaggaatcaaagtcctgtggaccaaggagccaccggtgcatcccaggggctgttggatagaaaggaggtgctcggaggggtcatcgctggaggccttgtgggtctgatcttcgccgtctgcctagtaggtttcatgctgtatcgcatgaaaaaaaaagacgaagggagctactccctggaagagccgaaacaggccaacgggggagcataccagaaacccactaagcaggaggagttttacgcatag

SEQ ID NO: 278040 - DNA, 933 bp, Artificial Sequence
  derived and/or modified sequence
atgaggagggcagccttgtggttatggctctgcgcgctggcattgagcctgcagcctgccctgcctcagatcgttgcgactaacctgccccctgaggaccaagacgggtcaggagatgactccgataactttagtgggtctggtgcaggcgccttacaggatatcacactttctcagcagacaccaagtacctggaaagacacccaactgctcacagcaatacctaccagcccagaacccacgggactggaggccaccgccgcctcgacaagcacattgcccgccggagagggtccaaaggaaggcgaggccgtggtactgccagaggtcgagcccgggcttactgccagagagcaggaagccacacctcgaccccgggagaccacccagttgcccacgacccatttggcttccaccacaaccgctacaacagctcaggaacccgccacaagccatccccaccgcgatatgcagccaggccaccacgaaacttctacacctgctggcccatcccaggcagatctgcacactccacataccgaggacgggggtccatccgccactgaaagggcagcagaagatggagcatcctctcagttacccgcagccgaagggtccggagagcaggactttacgtttgaaactagcggtgagaacacagctgtggtggccgtggaacctgaccgacgcaaccagtccccagtagatcagggagctaccggggccagccaaggacttctggaccggaaagaggtccttgggggcgtgatcgcaggaggactggtgggccttatctttgcggtgtgccttgttgggttcatgctgtatcgtatgaagaaaaaggatgaagggtcgtatagcctcgaggagccgaagcaggccaacggaggagcataccagaagccgacgaagcaggaggaattctatgcctag

SEQ ID NO: 278041 - DNA, 933 bp, Artificial Sequence
  derived and/or modified sequence
atgaggcgggccgccctgtggctgtggctgtgtgccctggccctgagcctgcagcctgccctgccccagatcgtggccaccaacctgcccccagaggaccaggacggcagcggagatgacagcgacaacttcagcggcagcggggccggggccctgcaggacatcaccctgagccagcagacccccagcacctggaaggacacccagctgctgacagccatccccaccagccctgagcccaccggcctggaggccacagctgccagcaccagcaccctgcctgctggggagggccccaaggagggggaggccgtggtgctgcctgaggtggagcccggcctgacagcccgggagcaggaggccaccccccggccccgggagaccacccagctgcccaccacccacctggccagcaccaccacagccaccacagcccaggagcccgccaccagccacccccaccgggacatgcagcccggccaccacgagaccagcaccccagctggccccagccaggccgacctgcacaccccccacacagaagatggcggccccagcgccacagaaagagctgctgaagatggagccagcagccagctgcctgctgctgagggcagcggggagcaggacttcacctttgagaccagcggggagaacacagctgtggtggccgtggagccagacagaagaaaccagagccctgtggaccagggcgccaccggggccagccagggcctgctggacaggaaggaggtgctgggcggcgtgattgctgggggcctggtgggcctcatctttgctgtgtgcctggtgggcttcatgctgtacaggatgaagaagaaggatgagggcagctacagcctggaggagcccaagcaggccaatggaggagcctaccagaagcccaccaagcaggaggagttctacgcctag

SEQ ID NO: 278042 - DNA, 933 bp, Artificial Sequence
  derived and/or modified sequence
atgcggcgggccgccctgtggctgtggctgtgcgccctggccctgtccctccaacctgctcttcctcagatcgtggcgactaacctgccgcccgaagatcaggacggatccggcgacgactccgataatttctccggatccggcgctggagccctgcaggatatcactctttctcagcaaacgcccagtacttggaaggatacacaactcctaacagccatccctacttctccggagccaaccggcttagaggcaaccgcagcctcaacatctaccttgccagcaggcgagggcccaaaagagggggaggccgtggttttgccagaagtggaaccgggcttgaccgctagagagcaggaggcaaccccccgccctagggagacaacacagctcccgactactcacctcgcgtccactaccacagccacaaccgcccaagaacccgccacaagccacccgcaccgcgacatgcagcccggccaccatgagacttccacacccgctgggccctcacaagctgacctacacacccctcatacagaggatggcgggccctccgctacagaacgagctgctgaggacggcgcgtcatcacagttgcctgccgcagagggttccggtgagcaggattttaccttcgagacaagtggtgaaaacacagccgtggtagctgttgaacccgatagaagaaatcagtctcccgtggaccagggcgccacaggagcttcacagggtctgctggacagaaaggaagtcttgggcggtgtgattgccggcggactggtgggtctgatatttgctgtttgcctggtcggcttcatgctataccggatgaagaaaaaggatgaaggttcctactcactggaagaacctaagcaggctaatgggggggcctaccagaaacccaccaagcaagaggaattctatgcgtag

SEQ ID NO: 278043 - DNA, 933 bp, Artificial Sequence
  derived and/or modified sequence
atgcggcgggccgccctgtggctgtggctgtgcgccctggccctgagcctccagcctgcccttccacagatcgtggccactaacctccctccagaggaccaggacgggtctggggatgattctgacaatttttcaggctctggcgcaggcgcactacaggatattaccctttcacagcagacaccgagcacctggaaagatacgcaactcctcactgccattccgacatctcccgagccaacaggcctggaagccaccgccgccagcacctcaacactgccggccggagaagggcctaaggaaggcgaggccgttgtactccccgaagttgaacccggcttaaccgctcgtgagcaggaagcaacaccacggccacgggagacaactcagctaccaactacacacctggcttcaacaacaactgccactaccgctcaggagccggccactagtcatccacatagggatatgcagcctgggcaccatgaaacctcaacccccgccggaccgtctcaggcagatctacacacccctcatacagaggatggtggcccctccgccaccgaaagagctgccgaggatggagcctcctcccagctcccagctgcagagggaagtggggagcaggacttcactttcgaaacctcaggcgagaataccgccgtcgtagcagtggagcctgacagacgcaaccagtctcctgttgaccagggcgcaacaggggctagtcagggactactcgacaggaaagaagtactcggcggcgtgattgctggtggactggtcgggttaatcttcgccgtgtgcctcgtaggcttcatgctgtaccggatgaagaagaaggatgagggttcttactctctggaggagccaaagcaggctaacggaggcgcttatcagaagccgaccaaacaagaagaattttatgcttag

SEQ ID NO: 278044 - DNA, 933 bp, Artificial Sequence
  derived and/or modified sequence
atgaggagggctgctctgtggctgtggctctgcgcactggccttgtccttacagccagctctgccccagatcgtggctaccaatctgccacctgaagatcaggatggctccggggacgactcagacaatttttcagggtcaggcgctggcgctctgcaggacatcacgttatctcaacagactcccagcacctggaaggacacccaactgctgaccgctatcccgacctcacccgagccaacaggtctggaagctaccgctgcaagtacaagcacgctgcccgcaggcgaaggacccaaggagggcgaagcggtcgtgcttccagaggtggagcccggtcttacggctcgggaacaggaggccacacctcgtccccgtgagaccacccagcttcccactactcatttggcttccaccacaacagcaaccactgcgcaggagcccgcaactagccatccacacagagatatgcagcccggacatcatgaaacaagcacgcccgctggaccctcgcaagccgacttacacaccccacacacagaggatggaggcccttcagccactgagcgggctgccgaggatggcgcaagctcacagttgcccgctgcggaggggtcaggggagcaggacttcactttcgaaactagcggtgagaacacagccgtagtcgcagtggagcctgatcgcaggaaccagtctccggtggaccagggcgcaacgggcgctagccagggcctgctggacaggaaggaggttctcgggggagtgattgctggcggtctggtgggactgatcttcgcggtttgcctggttgggttcatgctgtaccgcatgaaaaagaaggatgagggtagttactccctcgaagagcctaagcaagcgaatgggggagcctatcagaagcccaccaagcaggaggaattctacgcctag

SEQ ID NO: 278045 - DNA, 933 bp, Artificial Sequence
  derived and/or modified sequence
atgaggcgcgctgccctgtggctgtggctctgtgcgcttgccctgagcttgcagccggctttaccacagattgtcgctaccaacctgccgcctgaggaccaggacggatccggcgacgattctgacaacttcagcggttcaggagccggagctctccaggatattacactctcacagcagacacctagcacatggaaagacacacagctcctgaccgcaatcccaacaagcccagagcccacgggcctggaagctaccgctgcttctacctccaccctcccagcaggagaagggccaaaagagggcgaggccgtagtactgccagaggtggagcccggtctcacagccagggagcaggaggcaacaccaaggcccagagaaacaacccaattgcctacaacgcatcttgcatccactactacggctacaactgcccaggagcccgctacatctcacccccatagagacatgcagcccggtcatcacgaaactagtacacctgccggaccttcacaagcagatctgcatacgccccatacggaagacggaggcccaagtgcaacggagagggccgctgaagatggcgcttctagtcaactgcccgctgctgagggttccggagagcaagattttacatttgagacctcaggcgaaaacactgcggtcgttgcagtcgaacctgatcggagaaatcagtcccccgttgatcagggagctaccggagcgtctcagggactactcgaccggaaagaggtgctgggcggagtaattgccggagggctggtgggccttatcttcgcagtgtgcttggtgggattcatgctctaccgtatgaagaaaaaagacgaaggttcctactctctcgaagagccaaaacaggctaatggcggtgcttaccaaaagcctactaagcaggaagagttttatgcatag

SEQ ID NO: 278046 - DNA, 3147 bp, Artificial Sequence
  derived and/or modified sequence
ggaagggcctgtgggtttattataaggcggagctcggcgggagaggtgcgggccgaatccgagccgagcggagaggaatccggcagtagagagcggactccagccggcggaccctgcagccctcgcctgggacagcggcgcgctgggcaggcgcccaagagagcatcgagcagcggaacccgcgaagccggcccgcagccgcgacccgcgcagcctgccgctctcccgccgccggtccgggcagcatgaggcgcgcggcgctctggctctggctgtgcgcgctggcgctgagcctgcagccggccctgccgcaaattgtggctactaatttgccccctgaagatcaagatggctctggggatgactctgacaacttctccggctcaggtgcaggtgctttgcaagatatcaccttgtcacagcagaccccctccacttggaaggacacgcagctcctgacggctattcccacgtctccagaacccaccggcctggaggctacagctgcctccacctccaccctgccggctggagaggggcccaaggagggagaggctgtagtcctgccagaagtggagcctggcctcaccgcccgggagcaggaggccaccccccgacccagggagaccacacagctcccgaccactcatctggcctcaacgaccacagccaccacggcccaggagcccgccacctcccacccccacagggacatgcagcctggccaccatgagacctcaacccctgcaggacccagccaagctgaccttcacactccccacacagaggatggaggtccttctgccaccgagagggctgctgaggatggagcctccagtcagctcccagcagcagagggctctggggagcaggacttcacctttgaaacctcgggggagaatacggctgtagtggccgtggagcctgaccgccggaaccagtccccagtggatcagggggccacgggggcctcacagggcctcctggacaggaaagaggtgctgggaggggtcattgccggaggcctcgtggggctcatctttgctgtgtgcctggtgggtttcatgctgtaccgcatgaagaagaaggacgaaggcagctactccttggaggagccgaaacaagccaacggcggggcctaccagaagcccaccaaacaggaggaattctatgcctgacgcgggagccatgcgccccctccgccctgccactcactaggcccccacttgcctcttccttgaagaactgcaggccctggcctcccctgccaccaggccacctccccagcattccagcccctctggtcgctcctgcccacggagtcgtggggtgtgctgggagctccactctgcttctctgacttctgcctggagacttagggcaccaggggtttctcgcataggacctttccaccacagccagcacctggcatcgcaccattctgactcggtttctccaaactgaagcagcctctccccaggtccagctctggaggggagggggatccgactgctttggacctaaatggcctcatgtggctggaagatcctgcgggtggggcttggggctcacacacctgtagcacttactggtaggaccaagcatcttgggggggtggccgctgagtggcaggggacaggagtccactttgtttcgtggggaggtctaatctagatatcgacttgtttttgcacatgtttcctctagttctttgttcatagcccagtagaccttgttacttctgaggtaagttaagtaagttgattcggtatccccccatcttgcttccctaatctatggtcgggagacagcatcagggttaagaagactttttttttttttttttaaactaggagaaccaaatctggaagccaaaatgtaggcttagtttgtgtgttgtctcttgagtttgtcgctcatgtgtgcaacagggtatggactatctgtctggtggccccgtttctggtggtctgttggcaggctggccagtccaggctgccgtggggccgccgcctctttcaagcagtcgtgcctgtgtccatgcgctcagggccatgctgaggcctgggccgctgccacgttggagaagcccgtgtgagaagtgaatgctgggactcagccttcagacagagaggactgtagggagggcggcaggggcctggagatcctcctgcagaccacgcccgtcctgcctgtggcgccgtctccaggggctgcttcctcctggaaattgacgaggggtgtcttgggcagagctggctctgagcgcctccatccaaggccaggttctccgttagctcctgtggccccaccctgggccctgggctggaatcaggaatattttccaaagagtgatagtcttttgcttttggcaaaactctacttaatccaatgggtttttccctgtacagtagattttccaaatgtaataaactttaatataaagtagtcctgtgaatgccactgccttcgcttcttgcctctgtgctgtgtgtgacgtgaccggacttttctgcaaacaccaacatgttgggaaacttggctcgaatctctgtgccttcgtctttcccatggggagggattctggttccagggtccctctgtgtatttgcttttttgttttggctgaaattctcctggaggtcggtaggttcagccaaggttttataaggctgatgtcaatttctgtgttgccaagctccaagccccatcttctaaatggcaaaggaaggtggatggccccagcacagcttgacctgaggctgtggtcacagcggaggtgtggagccgaggcctaccccgcagacaccttggacatcctcctcccacccggctgcagaggccagaggcccccagcccagggctcctgcacttacttgcttatttgacaacgtttcagcgactccgttggccactccgagaggtgggccagtctgtggatcagagatgcaccaccaagccaagggaacctgtgtccggtattcgatactgcgactttctgcctggagtgtatgactgcacatgactcgggggtggggaaaggggtcggctgaccatgctcatctgctggtccgtgggacggtgcccaagccagaggctgggttcatttgtgtaacgacaataaacggtacttgtcatttcgggcaa

SEQ ID NO: 278047 - DNA, 3291 bp, Artificial Sequence
  derived and/or modified sequence
ttcagcccctctcccgggctgcgcctccgcactccgggcccgggcagaagggggtgcgcctcggccccaccacccagggagcagccgagctgaaaggccgggaaccgcggcttgcggggaccacagctcccgaaagcgacgttcggccaccggaggagcgggagccaagcaggcggagctcggcgggagaggtgcgggccgaatccgagccgagcggagaggaatccggcagtagagagcggactccagccggcggaccctgcagccctcgcctgggacagcggcgcgctgggcaggcgcccaagagagcatcgagcagcggaacccgcgaagccggcccgcagccgcgacccgcgcagcctgccgctctcccgccgccggtccgggcagcatgaggcgcgcggcgctctggctctggctgtgcgcgctggcgctgagcctgcagccggccctgccgcaaattgtggctactaatttgccccctgaagatcaagatggctctggggatgactctgacaacttctccggctcaggtgcaggtgctttgcaagatatcaccttgtcacagcagaccccctccacttggaaggacacgcagctcctgacggctattcccacgtctccagaacccaccggcctggaggctacagctgcctccacctccaccctgccggctggagaggggcccaaggagggagaggctgtagtcctgccagaagtggagcctggcctcaccgcccgggagcaggaggccaccccccgacccagggagaccacacagctcccgaccactcatctggcctcaacgaccacagccaccacggcccaggagcccgccacctcccacccccacagggacatgcagcctggccaccatgagacctcaacccctgcaggacccagccaagctgaccttcacactccccacacagaggatggaggtccttctgccaccgagagggctgctgaggatggagcctccagtcagctcccagcagcagagggctctggggagcaggacttcacctttgaaacctcgggggagaatacggctgtagtggccgtggagcctgaccgccggaaccagtccccagtggatcagggggccacgggggcctcacagggcctcctggacaggaaagaggtgctgggaggggtcattgccggaggcctcgtggggctcatctttgctgtgtgcctggtgggtttcatgctgtaccgcatgaagaagaaggacgaaggcagctactccttggaggagccgaaacaagccaacggcggggcctaccagaagcccaccaaacaggaggaattctatgcctgacgcgggagccatgcgccccctccgccctgccactcactaggcccccacttgcctcttccttgaagaactgcaggccctggcctcccctgccaccaggccacctccccagcattccagcccctctggtcgctcctgcccacggagtcgtggggtgtgctgggagctccactctgcttctctgacttctgcctggagacttagggcaccaggggtttctcgcataggacctttccaccacagccagcacctggcatcgcaccattctgactcggtttctccaaactgaagcagcctctccccaggtccagctctggaggggagggggatccgactgctttggacctaaatggcctcatgtggctggaagatcctgcgggtggggcttggggctcacacacctgtagcacttactggtaggaccaagcatcttgggggggtggccgctgagtggcaggggacaggagtccactttgtttcgtggggaggtctaatctagatatcgacttgtttttgcacatgtttcctctagttctttgttcatagcccagtagaccttgttacttctgaggtaagttaagtaagttgattcggtatccccccatcttgcttccctaatctatggtcgggagacagcatcagggttaagaagactttttttttttttttttaaactaggagaaccaaatctggaagccaaaatgtaggcttagtttgtgtgttgtctcttgagtttgtcgctcatgtgtgcaacagggtatggactatctgtctggtggccccgtttctggtggtctgttggcaggctggccagtccaggctgccgtggggccgccgcctctttcaagcagtcgtgcctgtgtccatgcgctcagggccatgctgaggcctgggccgctgccacgttggagaagcccgtgtgagaagtgaatgctgggactcagccttcagacagagaggactgtagggagggcggcaggggcctggagatcctcctgcagaccacgcccgtcctgcctgtggcgccgtctccaggggctgcttcctcctggaaattgacgaggggtgtcttgggcagagctggctctgagcgcctccatccaaggccaggttctccgttagctcctgtggccccaccctgggccctgggctggaatcaggaatattttccaaagagtgatagtcttttgcttttggcaaaactctacttaatccaatgggtttttccctgtacagtagattttccaaatgtaataaactttaatataaagtagtcctgtgaatgccactgccttcgcttcttgcctctgtgctgtgtgtgacgtgaccggacttttctgcaaacaccaacatgttgggaaacttggctcgaatctctgtgccttcgtctttcccatggggagggattctggttccagggtccctctgtgtatttgcttttttgttttggctgaaattctcctggaggtcggtaggttcagccaaggttttataaggctgatgtcaatttctgtgttgccaagctccaagccccatcttctaaatggcaaaggaaggtggatggccccagcacagcttgacctgaggctgtggtcacagcggaggtgtggagccgaggcctaccccgcagacaccttggacatcctcctcccacccggctgcagaggccagaggcccccagcccagggctcctgcacttacttgcttatttgacaacgtttcagcgactccgttggccactccgagaggtgggccagtctgtggatcagagatgcaccaccaagccaagggaacctgtgtccggtattcgatactgcgactttctgcctggagtgtatgactgcacatgactcgggggtggggaaaggggtcggctgaccatgctcatctgctggtccgtgggacggtgcccaagccagaggctgggttcatttgtgtaacgacaataaacggtacttgtcatttcgggc

SEQ ID NO: 278048 - protein, 789 aa, Artificial Sequence
  derived and/or modified sequence
MRLPGQGLGAREGPSIPLSSPAPAPASPAPPAWPPRPAVTHGRLRSPTRRAYTSLVLVGCTNLCAVLFARCLDDHLVSLRMSGSRKEFDVKQILKIRWRWFGHQASSPNSTVDSQQGEFWNRGQTGANGGRKFLDPCSLQLPLASIGYRRSSQLDFQNSPSWPMASTSEVPAFEFTAEDCGGAHWLDRPEVDDGTSEEENESDSSSCRTSNSSQTLSSCHTMEPCTSDEFFQALNHAEQTFKKMENYLRHKQLCDVILVAGDRRIPAHRLVLSSVSDYFAAMFTNDVREARQEEIKMEGVEPNSLWSLIQYAYTGRLELKEDNIECLLSTACLLQLSQVVEACCKFLMKQLHPSNCLGIRSFADAQGCTDLHKVAHNYTMEHFMEVIRNQEFVLLPASEIAKLLASDDMNIPNEETILNALLTWVRHDLEQRRKDLSKLLAYIRLPLLAPQFLADMENNVLFRDDIECQKLIMEAMKYHLLPERRPMLQSPRTKPRKSTVGTLFAVGGMDSTKGATSIEKYDLRTNMWTPVANMNGRRLQFGVAVLDDKLYVVGGRDGLKTLNTVECYNPKTKTWSVMPPMSTHRHGLGVAVLEGPMYAVGGHDGWSYLNTVERWDPQARQWNFVATMSTPRSTVGVAVLSGKLYAVGGRDGSSCLKSVECFDPHTNKWTLCAQMSKRRGGVGVTTWNGLLYAIGGHDAPASNLTSRLSDCVERYDPKTDMWTAVASMSISRDAVGVCLLGDKLYAVGGYDGQAYLNTVEAYDPQTNEWTQVAPLCLGRAGACVVTVKL

SEQ ID NO: 278049 - DNA, 2370 bp, Artificial Sequence
  derived and/or modified sequence
atgcgactgcctggacagggcctgggcgctcgggagggcccgagtatccccctgagttcccccgctcctgccccggccagccctgctccaccggcgtggccgccacggccggcagttacacacggtagattgcgcagccccacaaggcgcgcctataccagtttagtgctagtgggctgcacaaacctatgtgctgtgctcttcgcacgctgtttggatgatcacctcgtcagtctgagaatgtccggaagccgcaaagagttcgacgtcaagcagatcctgaagatccgctggagatggtttggacaccaagcgtcttctccaaattcaactgttgactcacagcagggggaattttggaatagaggccagaccggtgcaaacggcggaagaaaattcttagatccttgcagcttgcagctgcctctggcttccattggataccggcgtagctctcagctcgatttccagaattccccctcttggcccatggcctccactagcgaggtccctgcttttgagttcaccgccgaggattgtggcggtgcccactggctcgaccggccagaagtggacgacggcacaagcgaggaagaaaacgaaagtgacagctcaagttgtaggaccagcaactccagccagactctctcgagttgccatactatggaaccctgtactagcgacgagttttttcaagctttgaatcacgcagagcagaccttcaaaaaaatggaaaactatctgcggcacaaacagctatgtgatgttatactcgtagccggggaccgcagaataccagcgcacaggttagtgctttcctccgtgtctgactactttgctgccatgtttacaaatgatgtccgcgaagcccggcaggaagaaataaagatggaaggggtggaacccaacagtctgtggagcctgattcagtacgcatacactggccggttggaactgaaggaagacaacattgagtgcctcttgtctaccgcatgcctccttcaactgtctcaggtcgtcgaagcgtgttgcaaattcctcatgaagcaattgcaccccagcaactgcttaggtatcagatcatttgccgacgcccaaggatgcacagacctgcataaagtggcacataattacaccatggaacacttcatggaagtcattaggaatcaggaattcgtcttactgcctgcctcagaaattgcgaaactgctggcatccgacgatatgaatattccaaatgaagaaacgatcctcaacgctctgctgacctgggtgcggcacgacctggaacagcggaggaaggatcttagcaagctccttgcttacattagactgccgttactggctccacagtttctcgctgatatggagaacaacgtgctgttccgcgacgatattgaatgtcagaaactgattatggaagctatgaaatatcatctcctgccagagcgcagacctatgttgcagtcaccccgcaccaaaccccgaaagtccacggtgggcaccctgtttgccgtgggtgggatggatagcacaaaaggagctacatctatcgagaagtacgacctgagaacgaatatgtggacgccagtggccaatatgaacgggcggcgcctgcagttcggcgtagctgttcttgatgacaaactgtatgtggtcgggggacgtgacgggctgaaaacacttaatacggtggaatgctataaccccaagaccaagacttggtccgtgatgcctccgatgtccacacaccgtcacggattaggcgttgctgttcttgaaggccctatgtatgccgtgggaggccatgatgggtggagctacctcaataccgtagaacgctgggacccccaggcccgccagtggaattttgtcgccaccatgtctactccaagatccaccgtcggcgtcgctgttctgagtggcaagctatacgccgttggaggcagggatgggagtagttgcttaaagagcgtagaatgtttcgatcctcatactaacaagtggacactttgcgcccagatgtccaagcggcgaggcggcgtgggtgtaacaacatggaacggtctcctgtacgcaatcgggggtcacgatgccccagcttccaacttgacatctagattgagtgattgtgtggagcgctatgatccaaaaactgatatgtggaccgccgttgcctcaatgagtatatcaagagacgcggtcggagtctgtctcctgggggacaagttgtacgccgtgggcgggtatgacggtcaggcgtacctaaacacagttgaagcttacgatccacagaccaatgagtggactcaagtggccccgctttgtcttggtcgggctggagcttgtgtggtaacagtaaaactttag

SEQ ID NO: 278050 - DNA, 7656 bp, Artificial Sequence
  derived and/or modified sequence
ggtcccctacccccacctactcgcccgccccctccggggccacccggggactctgaccccccggcctggcgccgcctgacggagcgggagtggctcgctccgggccggccggcgccggggatgaggctgcccggacagggtctaggggcgcgcgaggggccgagcatcccactcagctcgccggccccggcccccgcctcccccgctcctcccgcctggccgccccggcccgccgtgacccacggccgcctccggagcccgacgcgcagggcatatacttctcttgtcttggttggatgcacaaatctgtgtgcagtgctttttgcccgttgcctagacgatcacttggtttctctgaggatgtctggttctcgtaaagagtttgatgtgaaacagattttgaaaatcagatggaggtggtttggtcatcaagcatcatctcctaattctacagttgacagccagcagggagaattttggaaccgaggacagactggagcaaacggtgggagaaagtttttagatccatgtagcctacaattgcctttggcttcaattggttaccgaaggtccagccaactggattttcagaattcaccttcttggccaatggcatccacctctgaagtccctgcatttgagtttacagcagaagattgtggcggtgcacattggctggatagaccagaagtggatgatggcactagtgaagaagaaaatgaatctgattccagttcatgcaggacttccaatagtagtcagacattatcatcctgtcatactatggagccatgtacatcagatgaatttttccaagcccttaatcatgccgagcaaacatttaaaaaaatggaaaactatttgagacataaacagttgtgtgatgtaattttagtcgctggtgatcgcagaattccagctcacagattggtgctctcctctgtctcagactattttgctgccatgtttactaatgatgtcagagaggcaagacaagaagaaataaaaatggaaggtgtagaaccaaattcgttgtggtccttgatccagtatgcttatacaggccgccttgaattaaaagaagataatattgagtgcctgttatctacagcttgccttcttcagctttcacaggttgtagaagcatgctgtaagtttttaatgaaacagcttcatccatccaactgtcttggaattcgttcttttgctgatgcccaaggttgtacagatttgcataaagtggctcacaattatactatggagcatttcatggaagtaatcagaaaccaggaatttgtattattaccagccagcgaaattgcaaagctcttggctagtgatgacatgaacattcctaatgaggagacaatattgaatgcacttcttacttgggtccgtcatgatttggaacagagacggaaagatctaagtaaacttttggcttatattaggctacctcttcttgcaccacagttcctggcagacatggaaaataatgtactttttcgggatgatatagaatgtcagaaactcattatggaagcaatgaagtaccatttattaccagagagacgacccatgttacaaagtcctcggacaaaacctaggaagtcaactgttggtacattatttgcagttgggggaatggattcaacaaaaggagcaacaagcattgaaaagtatgatctccgtacaaatatgtggactccagtagcaaatatgaatgggaggaggctacagttcggtgttgcagtgctagatgacaaactgtatgtggttggaggaagagatggactgaagactttgaatactgtagagtgctacaaccccaaaacaaaaacttggagtgtgatgccacctatgtccacacatagacatggccttggtgtggctgtactggaaggtcccatgtatgccgtaggaggacatgatggctggagctatctgaacacagtggaaagatgggaccctcaggctcgccagtggaattttgttgccactatgtctacccctaggagtacagtaggtgtggcagtactaagtggaaaactttatgcagttggtggtcgtgatggaagttcttgtctcaaatcagtagaatgttttgatcctcatactaataagtggacactgtgtgcacagatgtcaaaaaggagaggtggcgtaggagtgacgacctggaatggactgctgtatgctataggggggcacgatgctcccgcatccaacttgacttccagactctcagactgtgtggaaagatatgatcccaaaacagacatgtggactgcagtagcatccatgagcatcagcagagatgcagtgggggtctgtttacttggtgataagttatatgctgttggggggtatgatggacaggcataccttaatactgtggaggcttatgatccccagacaaatgagtggacccaggttgctccactgtgcctaggaagagctggagcttgtgttgtgactgtaaaattataatttagtgccccgttttctacatgaagacaccgtcttcctttattaatttagtataattattctatcaatggatacatttttagtaaatgtgcattgtcacaatcctgggcacaaagtgcctgatgtcaaaatgaagatagtaaaacaagggaggaagcagtggatggaccaggattaattcctttcatttcttagtaaattaaaacctgcagctggtggattgtgatcacacattcccgaagtaataagtgaggacgaatgcactgctctggaacataacccagtgctaactgggggtttcatttattcagtcaagcacatcttactcacatccagatttattttcctacagtgcaaacacaccagatgaaactttaaaatgttactttttgtaagcttatcataaatgagttgcagtaatttgtttgcttgtttgtttaaccacaaccactattttaatgatatactaaagataacactatttagttttttcagaaacatctgcattatatgtgtgttggttgtggattttgtttctaaaattggcttagtccaataaataaagaaaagcattaaggacttaaagcaacaataaccaaataaaaacttgataggatctttgaagtctatttaaatattcattccattacatctagactcaccaagaactacatgttatgatgttaagttgaagttgaaacatgatgttttgcattaaatttaagatatgcaaatttatgtagagaaaataaatgttatataccctataatctttcacctaattagtatttaattatatggatttgttttatattataaaagatgttttgattttgtcttttgatattgacaaaattgtttggatatccttatgttctcaagtctgtatctgcctcccctgccttatttcttatgttttgccacagttaacccattgtgcttctttgtaatcaaacagtttgtgggagaatgggcttattgaatgtctaaaaaataagtttaaagtgtttgttaccctaagttttttacatttttaaactctaattacatatgtgaatgttattactctcagtgaattgttattgtttgcaaaaatgcactgggcagtaacattttgtgataaatcctataagatataagtcattgagatgtctaagatgctttttattttaaccccagttaataaccaccttacggaaaataatatttgctaatattgtttattgtgaactaggaatcaaagtttttgtatgcatcaatgcacttaatccttataacaaccttatgaggtagttctattccctttttatagctaaggaaattggggtacagagaagttagccccaaggttatatattgcaagtaagtggcagagcagggattcatacaaagaccttctcactcagcagtcttcactcttactattcctgccactaggtagaaaaagaaagatttcggccgggcacagtggctcacgcctataattcccagcactttgggaggctgaggtgggcggatcacgaggtcaggagatggagaccatcctggctaacacagtgaaaccccgtctctactaaaaataaaaaataaaaaaaaattagccaggcgtggtggcgggtgcctgtacgcccagctactcgggaggctgaggcgggagaatggcgtgaacccaggaggaggagcttgcagtgtgccaagatcgcaccactgcactccagcctgggtgacagagcgagactccatcaaaaaaaaataaataaaaaaaaaataaaagatttcattttatgtgaggaattattttaataaaaaaaagagggtttatgctctatagtaataaaatttaccagtaacacccaatcagaaaattttggttccttagtatttagggaagacttttgtttaaatctcttatggaattttacatgttttgatttagaaaagtagatgcaatataatatatttcaagttttatacatattagatgaattgcatggtattttaggcaacttaactataaacaaatttattcatagaagcattgttgccaacaatttagatgacctcgatgaaaaaacacaccaattgacaaaactggctcaaaaggaaataaaaaatccaaacagacctgtaacaagtaaagagattgaaccagtaatcaaaaatctcccaacaaagaaagtccaggactaaatgagtttactggcaaactatgccaaacatataaagaagaattaacactaatccttctcgaactctcccaaaaaatggaagagaaaggagcaccctgtgacattctataaggcggacattaccttaacaccaaagccagacaaagacctcacagggaagctacagaccaatatcccttatgaatatagatgcaaaaaaacttcaaaatactagcaggccaaatccagcagcttattaaaatgatcacacagcatgaccaagtgagatttatcaaagaaatgcagggatggttctacatacaaatgtcaatcgatgtaataatataccatattaatagaatgaaggggaaaaaacagcatgatcacctcaattgataagaaaaagcatttgacaaaaatccaacaccctttcatggtaaaaacactctgcaaactaggaagaaaagggaactttcttaacctgataaagacatccataaaaacccacagctaacaacataatagcaaaacattgaaaatttttcccctaatatcatgaaaattcctgatttccccactgctattcaacattatactagaaggtctagccagagcaattaggcaagaaaaagaaataaaatgaatcccaaataggaagaagtaaaactacatttgcagaaaacatggtcctatatattaaaaatcctaaagaatccacaaaatgattccggctgattttaaaaattcagcaatgttgcaggttgcaagatcaacacacaaaagtctaagaaaaacctgaggggaaattaaaacaatttcatttacaataacatgaaaaagaataaaatacttagaaataaatttgaccaagaaagtgcaagacttggacactgaaaagtacaaaacgttgctgaaagaaattaaagaagacctaaataaatggaagacatcctgtgctggcaggttggaagacttaacattgttaagatggcattactcccaaaattagtctatagatttaatacaatccccattaaaattccagtgacccttttacagaaactgaaaagctgaccctagaatttatatgggattgcaagttactgaaggtactcaagtctgttcaaaacaatcttgaacaagaataaagttgaaggactcacattttccaatttcaaaatttactgcaaagctacttcaatcaaaacagtgttgtgctggtataaaaatatataaagcaatagagtagaatggaaagtccagaaacaaattacgccaatacactatggtcaattgatttttgacaagggttccaggaccattcaatgaagaaagaacagtgtcttcaactaatagtgctaagacaagtgaatattcacatgcaaaagaatgaatttgtacctgtacttcataccatatataaaaattaattcaaaatagatcaaagacctaaatgtaagagctaaaaccataaaactttgagaagaaaatacaggaataaatcttcatgaccttggatttggcaatggtttcttagatatggcaccaaaagcacaagcaacaacagcaaaaaaaaaaaaaaaaaaaaaaaatcaaaattaaaagcttctacatatcaagggacactatgaagaaagtgaaaagacaacccacagaatgggagaaaatatttgtaaatcttacatatctggtaaggaactaatacctagaatatataaggaactccgatgctcgacaacaaaaagacaaaccaattttaaaatgggcaaaggacttaaatagacatttctctaatgaagatatacaaatggccgacaagcacatggaaagcactcaacctcatcagtcattatgcaaatcagcgccacaagaagataccacttcacacctattagaatgacgaaatagacctaggatctaaacctacaggaaaaaaaatgaataatagagaaaataaatgttagagaggatgtggagaaattgaaaaccttcattcgttgttggtgggaatgttaaatggtgtagccactgtggaaaacagtttggcagttcctcaataagttaaaaaaaagaattaccatatgacccagcaagtccactcctgggcatatactgaaaagaactgaaaacaggtgttcaagcaaaaactttcacgcaaatattcattgcagcactagtcacagtagccaaaaaagaggaaacaacccaaatggccatcagctgatgaatgaataaacaaattgtggtatctccacacggcacaatagaatattcagccataaagagaaatgagggactgatacatgctaaagcatggatgagccttgagcgcatttttgccaagtgaaagaaggcagacacaaaaggcaacgtattgcatgagtgcatttatatgaaatatccaaaataggcaaatccatggagacagaaagcagataaatggttgtaagaagctgagagaaaggagtggggagagattgctaaaaaggagtttccttctagggtgatgaaaatgttctggaactacttattggggatgattgcacaacatggtgaaggtactcaatgtcactaatggtaaatttcacatacactttaccataatttttaaaaagctttattagctacattatgttatgatacttaaatgtcataacaatagcattctgtacgcttcactaggataaaaacttcggatttatatgcatctggaagagaaatttttcactgtaatttgcaaataaatgaatttctaaaaatctaacagaaaggctcttaaatcttaatttcaacctaagaagggagtgagaaacaacgagaaccatgaggggagagttaacggggaacttccccaccgtccggtacatggcaggcattccacaaatgttttctgaaagttgaaatagacatcttttcatgaactctgtaatatttgaaattattgataactcttacacaaaaacaaatattcaataaaatgatatttaatttcactgtg

SEQ ID NO: 278051 - DNA, 3425 bp, Artificial Sequence
  derived and/or modified sequence
ctcccgcctggccgccccggcccgccgtgacccacggccgcctccggagcccgacgcgcagggcatatacttctcttgtcttggttggatgcacaaatctgtgtgcagtgctttttgcccgttgcctagacgatcacttggtttctctgaggatgtctggttctcgtaaagagtttgatgtgaaacagattttgaaaatcagatggaggtggtttggtcatcaagcatcatctcctaattctacagttgacagccagcagggagaattttggaaccgaggacagactggagcaaacggtgggagaaagtttttagatccatgtagcctacaattgcctttggcttcaattggttaccgaaggtccagccaactggattttcagaattcaccttcttggccaatggcatccacctctgaagtccctgcatttgagtttacagcagaagattgtggcggtgcacattggctggatagaccagaagtggatgatggcactagtgaagaagaaaatgaatctgattccagttcatgcaggacttccaatagtagtcagacattatcatcctgtcatactatggagccatgtacatcagatgaatttttccaagcccttaatcatgccgagcaaacatttaaaaaaatggaaaactatttgagacataaacagttgtgtgatgtaattttagtcgctggtgatcgcagaattccagctcacagattggtgctctcctctgtctcagactattttgctgccatgtttactaatgatgtcagagaggcaagacaagaagaaataaaaatggaaggtgtagaaccaaattcgttgtggtccttgatccagtatgcttatacaggccgccttgaattaaaagaagataatattgagtgcctgttatctacagcttgccttcttcagctttcacaggttgtagaagcatgctgtaagtttttaatgaaacagcttcatccatccaactgtcttggaattcgttcttttgctgatgcccaaggttgtacagatttgcataaagtggctcacaattatactatggagcatttcatggaagtaatcagaaaccaggaatttgtattattaccagccagcgaaattgcaaagctcttggctagtgatgacatgaacattcctaatgaggagacaatattgaatgcacttcttacttgggtccgtcatgatttggaacagagacggaaagatctaagtaaacttttggcttatattaggctacctcttcttgcaccacagttcctggcagacatggaaaataatgtactttttcgggatgatatagaatgtcagaaactcattatggaagcaatgaagtaccatttattaccagagagacgacccatgttacaaagtcctcggacaaaacctaggaagtcaactgttggtacattatttgcagttgggggaatggattcaacaaaaggagcaacaagcattgaaaagtatgatctccgtacaaatatgtggactccagtagcaaatatgaatgggaggaggctacagttcggtgttgcagtgctagatgacaaactgtatgtggttggaggaagagatggactgaagactttgaatactgtagagtgctacaaccccaaaacaaaaacttggagtgtgatgccacctatgtccacacatagacatggccttggtgtggctgtactggaaggtcccatgtatgccgtaggaggacatgatggctggagctatctgaacacagtggaaagatgggaccctcaggctcgccagtggaattttgttgccactatgtctacccctaggagtacagtaggtgtggcagtactaagtggaaaactttatgcagttggtggtcgtgatggaagttcttgtctcaaatcagtagaatgttttgatcctcatactaataagtggacactgtgtgcacagatgtcaaaaaggagaggtggcgtaggagtgacgacctggaatggactgctgtatgctataggggggcacgatgctcccgcatccaacttgacttccagactctcagactgtgtggaaagatatgatcccaaaacagacatgtggactgcagtagcatccatgagcatcagcagagatgcagtgggggtctgtttacttggtgataagttatatgctgttggggggtatgatggacaggcataccttaatactgtggaggcttatgatccccagacaaatgagtggacccaggttgctccactgtgcctaggaagagctggagcttgtgttgtgactgtaaaattataatttagtgccccgttttctacatgaagacaccgtcttcctttattaatttagtataattattctatcaatggatacatttttagtaaatgtgcattgtcacaatcctgggcacaaagtgcctgatgtcaaaatgaagatagtaaaacaagggaggaagcagtggatggaccaggattaattcctttcatttcttagtaaattaaaacctgcagctggtggattgtgatcacacattcccgaagtaataagtgaggacgaatgcactgctctggaacataacccagtgctaactgggggtttcatttattcagtcaagcacatcttactcacatccagatttattttcctacagtgcaaacacaccagatgaaactttaaaatgttactttttgtaagcttatcataaatgagttgcagtaatttgtttgcttgtttgtttaaccacaaccactattttaatgatatactaaagataacactatttagttttttcagaaacatctgcattatatgtgtgttggttgtggattttgtttctaaaattggcttagtccaataaataaagaaaagcattaaggacttaaagcaacaataaccaaataaaaacttgataggatctttgaagtctatttaaatattcattccattacatctagactcaccaagaactacatgttatgatgttaagttgaagttgaaacatgatgttttgcattaaatttaagatatgcaaatttatgtagagaaaataaatgttatataccctataatctttcacctaattagtatttaattatatggatttgttttatattataaaagatgttttgattttgtcttttgatattgacaaaattgtttggatatccttatgttctcaagtctgtatctgcctcccctgccttatttcttatgttttgccacagttaacccattgtgcttctttgtaatcaaacagtttgtgggagaatgggcttattgaatgtctaaaaaataagtttaaagtgtttgttaccctaagttttttacatttttaaactctaattacatatgtgaatgttattactctcagtgaattgttattgtttgcaaaaatgcactgggcagtaacattttgtgataaatcctataagatataagtca

SEQ ID NO: 278052 - DNA, 2370 bp, Artificial Sequence
  derived and/or modified sequence
atgaggctgcccggccagggcctgggcgcccgggagggccccagcatccccctgagcagccctgccccagccccagccagccctgcccccccagcctggccacccaggcctgctgtgacccacggccgcctgcggagccccacccggcgggcctacaccagcctggtgctggtgggctgcaccaacctgtgtgctgtgctgtttgcccgctgcctggatgaccacctggtgtccctgaggatgagcggcagcaggaaggagtttgatgtgaagcagatcctgaagatccgctggcgctggtttggccaccaggccagcagccccaacagcacagtggacagccagcagggcgagttctggaacagaggccagacaggagccaacggcggcaggaagttcctggacccctgcagcctgcagctgcccctggccagcatcggctacagaagaagcagccagctggacttccagaacagccccagctggcccatggccagcaccagcgaggtgcctgcctttgagttcaccgctgaggactgtggcggggcccactggctggacaggcctgaggtggatgatggcaccagcgaggaggagaatgaaagtgacagcagcagctgcaggaccagcaacagcagccagaccctgagcagctgccacaccatggagccctgcaccagtgatgagttcttccaggccctgaaccacgccgagcagaccttcaagaagatggagaactacctgcggcacaagcagctgtgtgatgtgatcctggtggccggggaccggcgcatcccagcccaccggctggtgctgagctctgtgtctgactactttgctgccatgttcaccaatgatgtgcgggaggcccggcaggaggagatcaagatggagggcgtggagcccaacagcctgtggagcctcatccagtatgcctacacaggccgcctggagctgaaggaggacaacattgaatgtctgctgagcacagcctgcctgctgcagctgagccaggtggtggaggcctgctgcaagttcctgatgaagcagctgcaccccagcaactgcctgggcatccgcagctttgctgatgcccagggctgcacagacctgcacaaggtggcccacaactacaccatggagcacttcatggaggtgatccggaaccaggagtttgtgctgctgcctgccagcgagatcgccaagctgctggccagtgatgacatgaacatccccaatgaggagaccatcctgaatgccctgctgacctgggtgagacatgacctggagcagaggaggaaggacctgagcaagctgctggcctacatccggctgcccctgctggccccccagttcctggccgacatggagaacaacgtgctcttcagagatgacatcgagtgccagaagctgatcatggaggccatgaagtaccacctgctgcctgagcggcggcccatgctgcagagccccaggaccaagcccaggaagagcacagtgggcaccctgtttgctgtgggcggcatggacagcaccaagggggccaccagcattgagaagtatgacctgcggaccaacatgtggacccctgtggccaacatgaatggaagaaggctgcagtttggagtggccgtgctggatgacaagctgtatgtggtgggcggcagagatggcctgaagaccctgaacacagtggagtgctacaaccccaagaccaagacctggagcgtgatgccacccatgagcacccaccgccacggcctgggcgtggccgtgctggagggccccatgtatgctgtgggcggccatgatggctggagctacctgaacacagtggagcgctgggacccccaggcccggcagtggaactttgtggccaccatgagcacccccaggagcacagtgggcgtggccgtgctgagcggcaagctgtatgctgtgggcggcagagatggcagcagctgcctgaagtctgtggagtgctttgacccccacaccaacaagtggaccctgtgtgcccagatgagcaagaggcggggcggcgtgggcgtgaccacctggaatggcctgctgtatgccatcggcggccatgatgccccagccagcaacctgaccagccggctgagtgactgtgtggagagatatgaccccaagacagacatgtggacagctgtggcctccatgagcatcagcagagatgctgtgggcgtgtgcctgctgggggacaagctgtatgctgtgggcggctatgatggccaggcctacctgaacacagtggaggcctatgacccccagaccaatgagtggacccaggtggcccccctgtgcctgggccgggccggggcctgtgtggtgacagtgaagctgtag

SEQ ID NO: 278053 - DNA, 2370 bp, Artificial Sequence
  derived and/or modified sequence
atgcggctgcccggccagggcctgggcgcccgggagggccccagcatccctcttagctcccctgctccggcaccagcaagccccgcaccaccggcctggccacccagacctgccgtcacccacgggagattgcggtccccaacccgtagggcgtatacatcgctcgtcctagtgggatgcaccaatctttgcgccgtgcttttcgcacgttgccttgatgaccatttggtgtctctgcggatgtctgggagcaggaaggaatttgacgtgaagcaaatcttgaagatacggtggcgctggttcggtcatcaggccagctcacctaactccacggttgactctcaacaaggagagttctggaaccgcggccagaccggcgctaacgggggaaggaagttcctggatccctgctccttgcaactgcccctggcgtctattgggtacagaagatcttcccagctcgatttccaaaattccccttcctggcccatggcaagcaccagcgaagtgcccgcctttgagttcacagccgaggattgcggcggtgcccactggctggaccgtccagaagtggacgatgggaccagtgaggaagagaatgaaagtgattcctctagctgtcgtaccagtaactcttcccaaaccttatcgtcatgccataccatggaaccatgtacctcggacgagttcttccaagctctaaaccacgcagaacagacattcaaaaaaatggagaactacctgcggcacaagcaactgtgcgatgtgatcctggtggctggggaccgaagaatccctgcacatagactagtgctctcatctgtgtccgactacttcgctgctatgttcaccaacgatgtgcgtgaggccaggcaggaagagattaaaatggagggcgtagaacctaactccttgtggtctctgattcaatacgcgtataccgggcgcctggaattaaaggaagacaacattgagtgcctgctcagcacagcctgtttgctgcaactgagtcaggtagtggaagcatgctgcaagtttctaatgaaacagctgcatccaagcaattgcctcggtatacgctcatttgctgacgcccaaggctgcactgacctgcacaaagtggctcacaactatacaatggaacacttcatggaagtcattcggaaccaagaattcgtgctcctgcctgcatccgaaatcgccaagctgttggccagcgatgacatgaacatccccaacgaggagactattcttaacgcccttctcacctgggtgcggcatgatctggagcagcgcagaaaggacctgtcgaaactcctggcctacatcaggctgcccctgcttgctccacagtttctggccgacatggaaaacaacgtgcttttcagagacgatattgaatgtcaaaagttgattatggaggcaatgaaataccacctcctcccagaacgaagaccgatgctccagtctcctagaacaaagccaagaaagtcaaccgtggggacgttgtttgctgtcggggggatggatagcaccaagggagcaaccagcatcgaaaaatacgacctgcgaacaaatatgtggacccctgtggccaatatgaatggcagacgattgcagtttggcgttgccgtgttggatgataagctctacgtggtgggcggcagagatggactcaagacgctcaacaccgtagagtgctataatccaaagaccaagacatggtcggttatgccccccatgagcactcatcgtcatggacttggcgtggccgtccttgagggcccaatgtatgcggtaggcggccatgatggatggtcctacctcaacacagtagaacgatgggatccccaggctcgccaatggaatttcgtggcaacaatgagcaccccccggtctacggtgggcgttgctgtcctttcaggtaaactctatgctgtgggggggcgcgatggctcctcgtgcctaaagtctgtggagtgcttcgacccgcacaccaacaaatggacattgtgtgcccagatgtccaaacgtcgcggcggtgtcggtgtgacgacctggaacggtttactctacgctatcggcgggcacgatgcgcctgccagcaatctgacctctcggctctcagattgtgttgaaaggtatgacccaaaaactgatatgtggactgcagtggctagcatgagcatatctagggacgccgttggggtgtgtctgctcggagataaactttatgccgtaggcgggtatgatggtcaggcttaccttaacactgtcgaggcctacgacccacaaacaaacgagtggacccaggtggccccgttgtgcctgggaagagcgggagcttgtgttgtgactgtcaagctatag

SEQ ID NO: 278054 - DNA, 2370 bp, Artificial Sequence
  derived and/or modified sequence
atgcgccttcccggacagggcctcggggctagggaggggccatctatccccctctcttccccagcccctgcaccagccagtcccgcaccccctgcatggcccccacggcctgccgtcactcacggaagacttcgttctccaacaaggcgagcctacacatctctggtgttggtggggtgtacgaatctgtgcgcagtgctgttcgctcggtgcctagacgaccatctggtgagcctgcgaatgagtgggtctagaaaggaattcgacgtaaagcaaatattaaaaatccgttggcgctggttcgggcatcaagcaagttcccctaacagcacggtggatagccagcagggtgaattctggaaccgcggacagacaggagctaatggagggagaaagtttttagacccatgttccctacaacttccccttgcctcaatcggctatagaagatccagccaattagattttcagaactctcccagctggcccatggcctctacttcagaagtgccagcttttgagtttacagccgaggattgtggcggagcacattggctagaccgccctgaagtcgatgacggcacaagtgaagaggaaaatgaaagcgacagcagcagctgccgcactagcaactcttcccagacactaagctcctgccacacaatggaaccgtgtactagcgatgaattttttcaagccttgaatcatgccgagcagacctttaaaaaaatggagaactacctccgacataaacaactgtgtgacgtgattcttgtggctggggaccgccgtatcccggcacacaggttggttctgagttctgtgagcgattacttcgcagccatgttcacgaacgacgttagagaggcacgccaggaggagatcaagatggagggggtagagcctaacagcctgtggagccttatccagtacgcctacacagggcgtcttgagctcaaagaggataacatagaatgtttgctgagcacagcctgtcttttacagctgagtcaggtagtggaggcctgttgcaagttcctgatgaaacagctgcacccttccaattgtctggggattcgctctttcgccgacgcccaaggctgcacagacctgcacaaagtagctcataactataccatggagcattttatggaagtcatccggaatcaggaatttgtactgctgcccgctagtgagatcgccaaactgttagcgtcagacgatatgaacattccaaatgaagaaacaattctcaacgctttgctgacatgggtgcggcacgatctcgagcagcggaggaaggatctatccaaacttctggcttacattcgactgcccctgctggcccctcagttcttggcagatatggagaacaacgtgctctttcgggacgacattgagtgtcaaaaacttattatggaggccatgaagtatcatctgctccctgagcgtcgtcctatgctccagagtccgcgaacaaagcctaggaagagcaccgtcgggacgctctttgccgtaggaggaatggacagcacaaaaggcgctacaagcattgaaaagtacgacctcagaaccaacatgtggacccctgtcgcgaacatgaatggacgtaggctacagtttggcgtggctgtgcttgacgataaactgtatgtcgtgggcggtcgcgacgggctaaaaaccctgaataccgtcgagtgctacaatcctaagaccaaaacatggtctgtcatgcctccaatgtctacgcaccggcatgggcttggtgtagctgttttggaaggccctatgtacgctgttgggggacatgacggctggtcatatctaaatactgtggaacggtgggatccccaagccagacagtggaactttgtggctacaatgtctacacccagatccaccgtcggtgtcgcggtgctatccggcaagttgtacgcagtaggcggacgcgacggttcatcctgtttgaaatccgtggagtgcttcgatccacatactaacaagtggactctctgcgcccagatgtccaagcggaggggcggagttggtgtgacaacctggaatgggctcttgtatgccatcgggggacacgatgcccctgcgtccaatctgacaagccgactaagcgactgtgtcgagcgctacgaccccaagaccgacatgtggactgccgtggcctcgatgagtatcagtcgggatgccgtgggagtttgtctactgggtgataagttgtatgccgtgggtggatacgacggccaagcttacttaaatactgtggaggcttacgatccccagaccaatgaatggacccaagtcgcacccctgtgtctggggcgagccggagcttgcgtggtaacagtgaagctttag

SEQ ID NO: 278055 - DNA, 2370 bp, Artificial Sequence
  derived and/or modified sequence
atgagactgcccggccagggcctgggcgccagagagggccccagcatccccctgagcagccccgcccccgcccccgccagccccgccccccccgcctggccccccagacccgccgtgacccacggcagactgagaagccccaccagaagagcctacaccagcctggtgctggtgggctgcaccaacctgtgcgccgtgctgttcgccagatgcctggacgaccacctggtgagcctgagaatgagcggcagcagaaaggagttcgacgtgaagcagatcctgaagatcagatggagatggttcggccaccaggccagcagccccaacagcaccgtggacagccagcagggcgagttctggaacagaggccagaccggcgccaacggcggcagaaagttcctggacccctgcagcctgcagctgcccctggccagcatcggctacagaagaagcagccagctggacttccagaacagccccagctggcccatggccagcaccagcgaggtgcccgccttcgagttcaccgccgaggactgcggcggcgcccactggctggacagacccgaggtggacgacggcaccagcgaggaggagaacgagagcgacagcagcagctgcagaaccagcaacagcagccagaccctgagcagctgccacaccatggagccctgcaccagcgacgagttcttccaggccctgaaccacgccgagcagaccttcaagaagatggagaactacctgagacacaagcagctgtgcgacgtgatcctggtggccggcgacagaagaatccccgcccacagactggtgctgagcagcgtgagcgactacttcgccgccatgttcaccaacgacgtgagagaggccagacaggaggagatcaagatggagggcgtggagcccaacagcctgtggagcctgatccagtacgcctacaccggcagactggagctgaaggaggacaacatcgagtgcctgctgagcaccgcctgcctgctgcagctgagccaggtggtggaggcctgctgcaagttcctgatgaagcagctgcaccccagcaactgcctgggcatcagaagcttcgccgacgcccagggctgcaccgacctgcacaaggtggcccacaactacaccatggagcacttcatggaggtgatcagaaaccaggagttcgtgctgctgcccgccagcgagatcgccaagctgctggccagcgacgacatgaacatccccaacgaggagaccatcctgaacgccctgctgacctgggtgagacacgacctggagcagagaagaaaggacctgagcaagctgctggcctacatcagactgcccctgctggccccccagttcctggccgacatggagaacaacgtgctgttcagagacgacatcgagtgccagaagctgatcatggaggccatgaagtaccacctgctgcccgagagaagacccatgctgcagagccccagaaccaagcccagaaagagcaccgtgggcaccctgttcgccgtgggcggcatggacagcaccaagggcgccaccagcatcgagaagtacgacctgagaaccaacatgtggacccccgtggccaacatgaacggcagaagactgcagttcggcgtggccgtgctggacgacaagctgtacgtggtgggcggcagagacggcctgaagaccctgaacaccgtggagtgctacaaccccaagaccaagacctggagcgtgatgccccccatgagcacccacagacacggcctgggcgtggccgtgctggagggccccatgtacgccgtgggcggccacgacggctggagctacctgaacaccgtggagagatgggacccccaggccagacagtggaacttcgtggccaccatgagcacccccagaagcaccgtgggcgtggccgtgctgagcggcaagctgtacgccgtgggcggcagagacggcagcagctgcctgaagagcgtggagtgcttcgacccccacaccaacaagtggaccctgtgcgcccagatgagcaagagaagaggcggcgtgggcgtgaccacctggaacggcctgctgtacgccatcggcggccacgacgcccccgccagcaacctgaccagcagactgagcgactgcgtggagagatacgaccccaagaccgacatgtggaccgccgtggccagcatgagcatcagcagagacgccgtgggcgtgtgcctgctgggcgacaagctgtacgccgtgggcggctacgacggccaggcctacctgaacaccgtggaggcctacgacccccagaccaacgagtggacccaggtggcccccctgtgcctgggcagagccggcgcctgcgtggtgaccgtgaagctgtag

SEQ ID NO: 278056 - protein, 494 aa, Artificial Sequence
  derived and/or modified sequence
MFEIKKICCIGAGYVGGPTCSVIAHMCPEIRVTVVDVNESRINAWNSPTLPIYEPGLKEVVESCRGKNLFFSTNIDDAIKEADLVFISVNTPTKTYGMGKGRAADLKYIEACARRIVQNSNGYKIVTEKSTVPVRAAESIRRIFDANTKPNLNLQVLSNPEFLAEGTAIKDLKNPDRVLIGGDETPEGQRAVQALCAVYEHWVPREKILTTNTWSSELSKLAANAFLAQRISSINSISALCEATGADVEEVATAIGMDQRIGNKFLKASVGFGGSCFQKDVLNLVYLCEALNLPEVARYWQQVIDMNDYQRRRFASRIIDSLFNTVTDKKIAILGFAFKKDTGDTRESSSIYISKYLMDEGAHLHIYDPKVPREQIVVDLSHPGVSEDDQVSRLVTISKDPYEACDGAHAVVICTEWDMFKELDYERIHKKMLKPAFIFDGRRVLDGLHNELQTIGFQIETIGKKVSSKRIPYAPSGEIPKFSLQDPPNKKPKV

SEQ ID NO: 278057 - protein, 85 aa, Artificial Sequence
  derived and/or modified sequence
MFEIKKICCIGAGYVGGPTCSVIAHMCPEIRVTVVDVNESRINAWNSPTLPIYEPGLKEVVESCRGKNLFFSTNIDDAIKEADLV

SEQ ID NO: 278058 - protein, 130 aa, Artificial Sequence
  derived and/or modified sequence
MFEIKKICCIGAGYVGGPTCSVIAHMCPEIRVTVVDVNESRINAWNSPTLPIYEPGLKEVVESCRGKNLFFSTNIDDAIKEADLVFISVNTPTKTYGMGKGRAADLKYIEACARRIVQNSNGYKIVTEKS

SEQ ID NO: 278059 - protein, 53 aa, Artificial Sequence
  derived and/or modified sequence
MFEIKKICCIGAGYVGGPTCSVIAHMCPEIRVTVVDVNESRINAWNSPTLPIY

SEQ ID NO: 278060 - protein, 153 aa, Artificial Sequence
  derived and/or modified sequence
MFEIKKICCIGAGYVGGPTCSVIAHMCPEIRVTVVDVNESRINAWNSPTLPIYEPGLKEVVESCRGKNLFFSTNIDDAIKEADLVFISVNTPTKTYGMGKGRAADLKYIEACARRIVQNSNGYKIVTEKSTVPVRAAESIRRIFDANTKPNLN

SEQ ID NO: 278061 - protein, 181 aa, Artificial Sequence
  derived and/or modified sequence
MWSSGLLIQDSTIMFEIKKICCIGAGYVGGPTCSVIAHMCPEIRVTVVDVNESRINAWNSPTLPIYEPGLKEVVESCRGKNLFFSTNIDDAIKEADLVFISVNTPTKTYGMGKGRAADLKYIEACARRIVQNSNGYKIVTEKSTVPVRAAESIRRIFDANTKPNLNLQVLSNPEFLAEGTA

SEQ ID NO: 278062 - DNA, 546 bp, Artificial Sequence
  derived and/or modified sequence
atgtggagcagcggcctgctgatccaggacagcaccatcatgttcgagatcaagaagatctgctgcatcggcgccggctacgtgggcggccccacctgcagcgtgatcgcccacatgtgccccgagatcagagtgaccgtggtggacgtgaacgagagcagaatcaacgcctggaacagccccaccctgcccatctacgagcccggcctgaaggaggtggtggagagctgcagaggcaagaacctgttcttcagcaccaacatcgacgacgccatcaaggaggccgacctggtgttcatcagcgtgaacacccccaccaagacctacggcatgggcaagggcagagccgccgacctgaagtacatcgaggcctgcgccagaagaatcgtgcagaacagcaacggctacaagatcgtgaccgagaagagcaccgtgcccgtgagagccgccgagagcatcagaagaatcttcgacgccaacaccaagcccaacctgaacctgcaggtgctgagcaaccccgagttcctggccgagggcaccgcctag

SEQ ID NO: 278063 - DNA, 546 bp, Artificial Sequence
  derived and/or modified sequence
atgtggtcatctggcctactgatccaggacagtaccattatgtttgagataaagaagatctgttgtattggtgctgggtatgtcggcgggcctacctgttcggtcattgcccatatgtgtccagagatcagagtgaccgttgtagacgtgaacgagtcaagaattaatgcgtggaacagtcccacactccccatctatgagcccggcctcaaggaagtcgtcgagagttgtaggggcaaaaaccttttcttctcaaccaacatcgacgatgcaattaaggaagcggatcttgttttcatttcagttaacacccccaccaagacctacgggatgggtaaaggccgggcagcagatcttaaatatattgaggcctgcgccagaaggatcgtccaaaattccaatgggtacaagatagtgactgagaagtcaactgtgcccgtaagggcggcagagtcaatcagaagaattttcgacgccaatactaagcctaacttgaatctgcaagtgctgagcaacccagaatttctggcggagggaaccgcatag

SEQ ID NO: 278064 - DNA, 546 bp, Artificial Sequence
  derived and/or modified sequence
atgtggagcagcggcctgctgatccaggacagcaccatcatgtttgagatcaagaagatctgctgcattggagctggctacgtgggcggccccacctgcagcgtcatcgcccacatgtgcccagagatccgggtgacagtggtggatgtgaatgaaagccgcatcaatgcctggaacagccccaccctgcccatctatgagcccggcctgaaggaggtggtggagagctgccggggcaagaacctcttcttcagcaccaacattgatgatgccatcaaggaggccgacctggtgttcatctctgtgaacacccccaccaagacctacggcatgggcaagggccgggctgctgacctgaagtacatcgaggcctgtgccaggagaattgtgcagaacagcaatggctacaagatcgtgacagagaagagcacagtgcctgtgcgggctgctgagagcatccgccgcatctttgatgccaacaccaagcccaacctgaacctgcaggtgctgagcaaccctgagttcctggccgagggcacagcctag

SEQ ID NO: 278065 - DNA, 546 bp, Artificial Sequence
  derived and/or modified sequence
atgtggagcagcggcctgctgatccaggacagcaccatcatgttcgaaatcaaaaaaatttgttgtattggagccgggtatgtcggcggaccaacatgtagcgttatcgcccacatgtgtcctgagattcgagtcactgtggtggacgtgaacgaatcccgtatcaacgcttggaattctcccaccctgccaatttacgaaccggggctgaaggaggtcgtggaatcctgcagagggaagaatctcttcttctctacaaacattgacgatgctatcaaagaagctgacctcgtttttatttccgtgaacacaccaaccaagacttatggcatgggcaagggacgggccgccgatttgaagtacatcgaagcgtgtgctcgaaggattgtgcagaactctaacgggtataaaatcgttaccgagaaatcaacagtccccgtccgagccgcagagagcatacgcagaatctttgatgcgaacaccaagcccaatctcaacctgcaggtgctcagtaatcctgagttcttagcagagggtaccgcttag

SEQ ID NO: 278066 - DNA, 546 bp, Artificial Sequence
  derived and/or modified sequence
atgtggtcttcaggacttcttattcaggacagcactattatgttcgaaataaagaagatctgttgtatcggtgctggatacgtggggggacctacttgctcggtgatagcgcacatgtgccctgaaattagagtcactgtcgtggatgtgaacgaatcacgaatcaatgcctggaattcccccaccctgccaatatatgagcccggactgaaagaggtggtagaatcctgccggggtaaaaacctgttcttctcgactaacatagacgatgccatcaaagaagcggacctggtattcatcagtgttaacacgccgaccaagacttatggcatggggaagggcagagccgcagaccttaaatatatcgaggcctgtgcccgaaggatcgtacaaaatagcaacgggtataaaatcgtcacggaaaaatcaactgtgcctgttagagctgccgaatctatccgcagaatcttcgatgctaacacaaaacctaatctgaacctacaagtcttgtctaatccagagttcctcgccgaggggactgcctag

SEQ ID NO: 278067 - DNA, 3216 bp, Artificial Sequence
  derived and/or modified sequence
agtctccccgcccctgagccgtgaaggaaatagggacctggccctgggccttgtgtagcgggagggggagctaggaagcagctgagggcagaatccaggagggcctggctgcgggggaatgaagcctccgccttcgcaggcaaaagcctttaaatacgggctcaggcccgggactcagagtgtaacgcgtggcagcctgagggaggggcgtgcgccgagagggagctcagatcgagcggggcgcgggtggagaagctgcggcggcgcggcccgtaggaaggtgctgtccgaacgatcgggataggagcggtccctgcgcttgctgctgggaagtggtacaatcatgtttgaaattaagaagatctgttgcatcggtgcaggctatgttggaggacccacatgtagtgtcattgctcatatgtgtcctgaaatcagggtaacggttgttgatgtcaatgaatcaagaatcaatgcgtggaattctcctacacttcctatttatgagccaggactaaaagaagtggtagaatcctgtcgaggaaaaaatctttttttttctaccaatattgatgatgccatcaaagaagctgatcttgtatttatttctgtgaatactccaacaaaaacctatggaatggggaaaggccgggcagcagatctgaagtatattgaagcttgtgctagacgcattgtgcaaaactcaaatgggtacaaaattgtgactgagaaaagcacagttccagtgcgggcagcagaaagtatccgtcgcatatttgatgcaaacacaaaacccaacttgaatttacaggtgctgtccaaccctgagtttctggcagagggaacagccatcaaggacctaaagaacccagacagagtactgattggaggggatgaaactccagagggccagagagctgtgcaggccctgtgtgctgtatatgagcactgggttcccagagaaaagatcctcaccactaatacttggtcttcagagctttccaaactggcagcaaatgcttttcttgcccagagaataagcagcattaactccataagtgctctgtgtgaagcaacaggagctgatgtagaagaggtagcaacagcgattggaatggaccagagaattggaaacaagtttctaaaagccagtgttgggtttggtgggagctgtttccaaaaggatgttctgaatttggtttatctctgtgaggctctgaatttgccagaagtagctcgttattggcagcaggtcatagacatgaatgactaccagaggaggaggtttgcttcccggatcatagatagtctgtttaatacagtaactgataagaagatagctattttgggatttgcattcaaaaaggacactggtgatacaagagaatcttctagtatatatattagcaaatatttgatggatgaaggtgcacatctacatatatatgatccaaaagtacctagggaacaaatagttgtggatctttctcatccaggtgtttcagaggatgaccaagtgtcccggctcgtgaccatttccaaggatccatatgaagcatgtgatggtgcccatgctgttgttatttgcactgagtgggacatgtttaaggaattggattatgaacgcattcataaaaaaatgctaaagccagcctttatcttcgatggacggcgtgtcctggatgggctccacaatgaactacaaaccattggcttccagattgaaacaattggcaaaaaggtgtcttcaaagagaattccatatgctccttctggtgaaattccgaagtttagtcttcaagatccacctaacaagaaacctaaagtgtagagattgccatttttatttgtgattttttttttttttttttggtacttcaggatagcaaatatctatctgctattaaatggtaaatgaaccaagtgtttttttttgttttttttttgagacagagtctcactgttgcccaggctggagtgcagtggtgcaatctcggctcactgcaagctctgcttcccaggttcacgccattctcctggctcagcctcccaagtagctgggactacaggcacccgccacagtgcctggctaattttttgtatttttagtagagacagggtttcaccatgtgagccaggatggtctcaatctcctgaccttgtgaaccacccgtctcggcctcccaaagtgctgggattacaggtgtgagccaccacgcctggcccatgaaccaagtgtttttaaggaaacaaaactatttttttaatcatcagatttatactagctatatggatattagcatatctggtaattatgaatctagaatttttttacatatttttataatactgttagctcagttattggatgagtgaaagataatcatgttggttttaatagtgtcaatttttgtaaaataaaaattaaacttcaaactctttactttataaattgtccataggccacactttaatatcacattataaagggaaggacagtcttcattcctcctggttattggtttgtttgtcattaaagatatattttgaatccatgaaattgctatgctaaacagcctttacatgtatggtctggttaaagttcctttgttccttttgttttaataaaatgtgtcactgattttttagctcaaaatcatcactgttaatttccagtcaccccaaatatggttaaaagattttttttttaatcatgaagagaaaattagtagcatttctttctctccccattatttattggttttcctcactaatctttttttttttagtccaaaagccaaaaatatttatcttggttttacattttaatttccattcttaattgtaatttttttctttaaataaggaaaccaatataatctcatgtataaaaacttaaatattttacaagttacatatagcatcattctaaaataagaattttttttgttttctgtctgcttttttcttatgtctcttgttgagttttatattttcagtggttatttttgcttgtgttagatcattattaaaatatatccaatgtccctttgatacttgtgctctgctgagaatgtacagtttgcattaaacatcccaggtctcatccttcaggaattttgcagttcaatgagaagagggagacaaatataaagatgaggacagaagcatctctacagatgaaaattacataaataaaacattctccatcaacaacta

SEQ ID NO: 278068 - DNA, 575 bp, Artificial Sequence
  derived and/or modified sequence
gtaacgcgtggcagcctgagggaggggcgtgcgccgagagggagctcagatcgagcggggcgcgggtggagaagctgcggcggcgcggcccgtaggaaggtgctgtccgaacgatcgggataggagcggtccctgcgcttgctgctgggaagtggtacaatcatgtttgaaattaagaagatctgttgcatcggtgcaggctatgttggaggacccacatgtagtgtcattgctcatatgtgtcctgaaatcagggtaacggttgttgatgtcaatgaatcaagaatcaatgcgtggaattctcctacacttcctatttatgaggactaaaagaagtggtagaatcctgtcgaggaaaaaatctttttttttctaccaatattgatgatgccatcaaagaagctgatcttgtatttatttctgtgaatactccaacaaaaacctatggaatggggaaaggccgggcagcagatctgaagtatattgaagcttgtgctagacgcattgtgcaaaactcaaatgggtacaaaattgtgactgagaaaagcacagttccagtgcgggcagcagaaagt

SEQ ID NO: 278069 - DNA, 433 bp, Artificial Sequence
  derived and/or modified sequence
cgcacagacatcccaaatcccggattgggcctgaggaacatctctgcaaagagcgccaggagggcgtgggggtcccgcctctctcgccagggaccagggagtggacactcactggtccagtcatgaggaactcagcatcctcctgacgggaggcgcctctttcccagaagcgtacaatcatgtttgaaattaagaagatctgttgcatcggtgcaggctatgttggaggacccacatgtagtgtcattgctcatatgtgtcctgaaatcagggtaacggttgttgatgtcaatgaatcaagaatcaatgcgtggaattctcctacacttcctatttatgagccaggactaaaagaagtggtagaatcctgtcgaggaaaaaatctttttttttctaccaatattgatgatgccatcaaagaagctgatcttgt

SEQ ID NO: 278070 - DNA, 3021 bp, Artificial Sequence
  derived and/or modified sequence
atacagagcagtagctgtctatcgacagacctcaaagacacagtgagcctttgagtttcttcaaatcccttaagaaatggagaacagtagtctttcttcaggggggttctggaaatgaaagagctgactgtctgctctgagatgtgcttattagtggccaggatccagtttaagtacaatcatgtttgaaattaagaagatctgttgcatcggtgcaggctatgttggaggacccacatgtagtgtcattgctcatatgtgtcctgaaatcagggtaacggttgttgatgtcaatgaatcaagaatcaatgcgtggaattctcctacacttcctatttatgagccaggactaaaagaagtggtagaatcctgtcgaggaaaaaatctttttttttctaccaatattgatgatgccatcaaagaagctgatcttgtatttatttctgtgaatactccaacaaaaacctatggaatggggaaaggccgggcagcagatctgaagtatattgaagcttgtgctagacgcattgtgcaaaactcaaatgggtacaaaattgtgactgagaaaagcacagttccagtgcgggcagcagaaagtatccgtcgcatatttgatgcaaacacaaaacccaacttgaatttacaggtgctgtccaaccctgagtttctggcagagggaacagccatcaaggacctaaagaacccagacagagtactgattggaggggatgaaactccagagggccagagagctgtgcaggccctgtgtgctgtatatgagcactgggttcccagagaaaagatcctcaccactaatacttggtcttcagagctttccaaactggcagcaaatgcttttcttgcccagagaataagcagcattaactccataagtgctctgtgtgaagcaacaggagctgatgtagaagaggtagcaacagcgattggaatggaccagagaattggaaacaagtttctaaaagccagtgttgggtttggtgggagctgtttccaaaaggatgttctgaatttggtttatctctgtgaggctctgaatttgccagaagtagctcgttattggcagcaggtcatagacatgaatgactaccagaggaggaggtttgcttcccggatcatagatagtctgtttaatacagtaactgataagaagatagctattttgggatttgcattcaaaaaggacactggtgatacaagagaatcttctagtatatatattagcaaatatttgatggatgaaggtgcacatctacatatatatgatccaaaagtacctagggaacaaatagttgtggatctttctcatccaggtgtttcagaggatgaccaagtgtcccggctcgtgaccatttccaaggatccatatgaagcatgtgatggtgcccatgctgttgttatttgcactgagtgggacatgtttaaggaattggattatgaacgcattcataaaaaaatgctaaagccagcctttatcttcgatggacggcgtgtcctggatgggctccacaatgaactacaaaccattggcttccagattgaaacaattggcaaaaaggtgtcttcaaagagaattccatatgctccttctggtgaaattccgaagtttagtcttcaagatccacctaacaagaaacctaaagtgtagagattgccatttttatttgtgattttttttttttttttttggtacttcaggatagcaaatatctatctgctattaaatggtaaatgaaccaagtgtttttttttgttttttttttgagacagagtctcactgttgcccaggctggagtgcagtggtgcaatctcggctcactgcaagctctgcttcccaggttcacgccattctcctggctcagcctcccaagtagctgggactacaggcacccgccacagtgcctggctaattttttgtatttttagtagagacagggtttcaccatgtgagccaggatggtctcaatctcctgaccttgtgaaccacccgtctcggcctcccaaagtgctgggattacaggtgtgagccaccacgcctggcccatgaaccaagtgtttttaaggaaacaaaactatttttttaatcatcagatttatactagctatatggatattagcatatctggtaattatgaatctagaatttttttacatatttttataatactgttagctcagttattggatgagtgaaagataatcatgttggttttaatagtgtcaatttttgtaaaataaaaattaaacttcaaactctttactttataaattgtccataggccacactttaatatcacattataaagggaaggacagtcttcattcctcctggttattggtttgtttgtcattaaagatatattttgaatccatgaaattgctatgctaaacagcctttacatgtatggtctggttaaagttcctttgttccttttgttttaataaaatgtgtcactgattttttagctcaaaatcatcactgttaatttccagtcaccccaaatatggttaaaagattttttttttaatcatgaagagaaaattagtagcatttctttctctccccattatttattggttttcctcactaatctttttttttttagtccaaaagccaaaaatatttatcttggttttacattttaatttccattcttaattgtaatttttttctttaaataaggaaaccaatataatctcatgtataaaaacttaaatattttacaagttacatatagcatcattctaaaataagaattttttttgttttctgtctgcttttttcttatgtctcttgttgagttttatattttcagtggttatttttgcttgtgttagatcattattaaaatatatccaatgtccctttgatacttgtgctctgctgagaatgtacagtttgcattaaacatcccaggtctcatccttcaggaattttgcagttcaatgagaagagggagacaaatataaagatgaggacagaagcatctctacagatgaaaa

SEQ ID NO: 278071 - DNA, 577 bp, Artificial Sequence
  derived and/or modified sequence
gtaacgcgtggcagcctgagggaggggcgtgcgccgagagggagctcagatcgagcggggcgcgggtggagaagctgcggcggcgcggcccgtaggaaggtgctgtccgaacgatcgggataggagcggtccctgcgcttgctgctgggaagtggaacagtcttactgttttccttctagtacaatcatgtttgaaattaagaagatctgttgcatcggtgcaggctatgttggaggacccacatgtagtgtcattgctcatatgtgtcctgaaatcagggtaacggttgttgatgtcaatgaatcaagaatcaatgcgtggaattctcctacacttcctatttatgagccaggactaaaagaagtggtagaatcctgtcgaggaaaaaatctttttttttctaccaatattgatgatgccatcaaagaagctgatcttgtatttatttctgtgaatactccaacaaaaacctatggaatggggaaaggccgggcagcagatctgaagtatattgaagcttgtgctagacgcattgtgcaaaactcaaatgggtacaaaattgtgactgagaaaagc

SEQ ID NO: 278072 - DNA, 534 bp, Artificial Sequence
  derived and/or modified sequence
gtgaaggaaatagggacctggccctgggccttgtgtagcgggagggggagctaggaagcagctgagggcagaatccaggagggcctggctgcgggggaatgaagcctccgccttcgcaggcaaaagcctttaaatacgggctcaggcccgggactcagagtgtaacgcgtggcagcctgagggaggggcgtgcgccgagagggagctcagatcgagcggggcgcgggtggagaagctgcggcggcgcggcccgtaggaaggtgctgtccgaacgatcgggataggagcggtccctgcgcttgctgctgggaagtgggtaagcgccgctcccaggctggccccgccgcccgggcgggatgctcccagtacaatcatgtttgaaattaagaagatctgttgcatcggtgcaggctatgttggaggacccacatgtagtgtcattgctcatatgtgtcctgaaatcagggtaacggttgttgatgtcaatgaatcaagaatcaatgcgtggaattctcctacacttcctatttatga

SEQ ID NO: 278073 - DNA, 549 bp, Artificial Sequence
  derived and/or modified sequence
gccctaaagcctggcagacgcggagcgcacgcggcctttgcctcggccaggacagggcagcggggagagggctgctagacaacaattcttgacccctcctcgacccacgaccgccagtacaatcatgtttgaaattaagaagatctgttgcatcggtgcaggctatgttggaggacccacatgtagtgtcattgctcatatgtgtcctgaaatcagggtaacggttgttgatgtcaatgaatcaagaatcaatgcgtggaattctcctacacttcctatttatgaggactaaaagaagtggtagaatcctgtcgaggaaaaaatctttttttttctaccaatattgatgatgccatcaaagaagctgatcttgtatttatttctgtgaatactccaacaaaaacctatggaatggggaaaggccgggcagcagatctgaagtatattgaagcttgtgctagacgcattgtgcaaaactcaaatgggtacaaaattgtgactgagaaaagcacagttccagtgcgggcagcagaaagtatccgtcgcata

SEQ ID NO: 278074 - DNA, 568 bp, Artificial Sequence
  derived and/or modified sequence
agacgcggagcgcacgcggcctttgcctcggccaggacagggcagcggggagagggctgctagacaacaattcttgacccctcctcgacccacgaccgccagtacaatcatgtttgaaattaagaagatctgttgcatcggtgcaggctatgttggaggacccacatgtagtgtcattgctcatatgtgtcctgaaatcagggtaacggttgttgatgtcaatgaatcaagaatcaatgcgtggaattctcctacacttcctatttatgagccaggactaaaagaagtggtagaatcctgtcgaggaaaaaatctttttttttctaccaatattgatgatgccatcaaagaagctgatcttgtatttatttctgtgaatactccaacaaaaacctatggaatggggaaaggccgggcagcagatctgaagtatattgaagcttgtgctagacgcattgtgcaaaactcaaatgggtacaaaattgtgactgagaaaagcacagttccagtgcgggcagcagaaagtatccgtcgcatatttgatgcaaacacaaaacccaacttgaat

SEQ ID NO: 278075 - DNA, 861 bp, Artificial Sequence
  derived and/or modified sequence
gtagcgggagggggagctaggaagcagctgagggcagaatccaggagggcctggctgcgggggaatgaagcctccgccttcgcaggcaaaagcctttaaatacgggctcaggcccgggactcagagtgtaacgcgtggcagcctgagggaggggcgtgcgccgagagggagctcagatcgagcggggcgcgggtggagaagctgcggcggcgcggcccgtaggaaggtgctgtccgaacgatcgggataggagcggtccctgcgcttgctgctgggaagtggggcgggaaccgcattttggaactgctgtcctggggatgtggtcgtctgggcttcttattcaagactctacaatcatgtttgaaattaagaagatctgttgcatcggtgcaggctatgttggaggacccacatgtagtgtcattgctcatatgtgtcctgaaatcagggtaacggttgttgatgtcaatgaatcaagaatcaatgcgtggaattctcctacacttcctatttatgagccaggactaaaagaagtggtagaatcctgtcgaggaaaaaatctttttttttctaccaatattgatgatgccatcaaagaagctgatcttgtatttatttctgtgaatactccaacaaaaacctatggaatggggaaaggccgggcagcagatctgaagtatattgaagcttgtgctagacgcattgtgcaaaactcaaatgggtacaaaattgtgactgagaaaagcacagttccagtgcgggcagcagaaagtatccgtcgcatatttgatgcaaacacaaaacccaacttgaatttacaggtgctgtccaaccctgagtttctggcagagggaacagcca

SEQ ID NO: 278076 - DNA, 405 bp, Artificial Sequence
  derived and/or modified sequence
atgagcgacgacgccggcgacaccctggccaccggcgacaaggccgaggtgaccgagatgcccaacagcgacagcctgcccgaggacgccgaggtgcactgcgacagcgccgccgtgagccacgagcccacccccgccgaccccagaggcgagggccacgagaacgccgccgtgcagggcgccggcgccgccgccatcggcccccccgtgcagccccaggacgccaacgccctggagccccccctgaacggcgacgtgaccgaggacaccctggccgagtgcatcgacagcgtgagcctggaggccgagcccagaagcgagatccccctgcaggagcagaactacctggccgtggacagcccccccagcggcggcggctgggccggctggggcagctggggctag

SEQ ID NO: 278077 - DNA, 405 bp, Artificial Sequence
  derived and/or modified sequence
atgagcgatgacgccggagatactctggccacaggagacaaagccgaggtcacagagatgcccaactccgactcactcccagaagacgctgaggtccactgtgatagcgcggcagtgagccacgagccgacccccgccgacccgaggggagagggacacgaaaacgccgccgttcagggagcaggcgcggctgctatagggccgccggtgcagcctcaggatgccaatgctcttgagccccctctcaacggcgacgtgacagaggacactctggctgagtgcatcgactcagtaagtctggaagcggagcctcgatccgagattcccttacaggaacagaactacctggctgtagactcacccccttctgggggaggttgggctgggtggggaagctgggggtag

SEQ ID NO: 278078 - DNA, 405 bp, Artificial Sequence
  derived and/or modified sequence
atgtctgatgatgctggggacaccctggccactggagacaaggccgaggtgacagagatgcccaacagcgacagcctgcctgaagatgctgaggtgcactgtgacagcgctgctgtgtcccatgagcccaccccagctgaccccagaggagagggccatgaaaatgctgctgtgcagggcgctggggccgccgccatcggcccccctgtgcagccccaggatgccaatgccctggagccccccctgaatggagatgtgacagaggacaccctggctgaatgtattgattctgtgtccctggaggccgagcccaggtctgagatccccctgcaggagcagaactacctggccgtggacagccccccatctgggggcggctgggccggctggggctcctggggctag

SEQ ID NO: 278079 - DNA, 405 bp, Artificial Sequence
  derived and/or modified sequence
atgagcgacgacgccggcgacaccctggccaccggcgacaaggccgaggttacagagatgcccaactcggatagcctgccggaggacgctgaagtgcattgcgatagtgccgccgttagccatgaacctactcccgccgatcctcgcggggaagggcacgagaatgctgctgttcagggggctggggcagcggcaattggccctcccgtgcagccccaggacgccaacgctctcgaaccgcctctcaacggcgacgtgaccgaggacacacttgcagagtgcatcgactccgtatccctcgaggctgagcctagaagcgaaatcccccttcaggaacagaattacctcgccgtggattcacccccttcaggtggcggttgggctggttggggctcttggggatag

SEQ ID NO: 278080 - DNA, 405 bp, Artificial Sequence
  derived and/or modified sequence
atgtctgatgatgctggagatacgcttgcaaccggagacaaagcggaagtaacggaaatgcctaactctgatagtctaccagaggacgctgaggtgcactgtgactcggctgctgtgtcacatgagcccactcccgctgacccaaggggcgagggtcacgaaaacgccgcagtgcaaggagctggggctgctgccataggtccaccagtgcagcctcaggatgccaatgcgttagagcccccacttaatggggacgtgactgaagatacattagccgagtgcattgatagtgtatctctggaggcggaaccccgttccgagataccactgcaggagcagaattatctggcagtggacagccctccttctggaggaggctgggcaggctggggctcctggggctag

SEQ ID NO: 278081 - DNA, 567 bp, Artificial Sequence
  derived and/or modified sequence
ggccgggcgtccccgcggcgctcctcgtggggcggggcgcaggcggggcggggccccctctccagccgcccgccctccggccgcgtccccgccggccctgcagacgtggcggggcgggacccgctgggcactcccgcgcgtactcggccgcctgagcgatactaaaatgtctgatgatgctggtgacaccttagccactggagacaaagcagaagttactgagatgcctaatagtgattctttacctgaggatgcagaagtgcattgtgattcagctgcagtttcacatgagccaacaccagctgaccccagaggggaggggcatgaaaatgcagctgtgcagggtgcaggggctgccgccattgggccccctgtgcagcctcaggatgccaacgccctggagccccctctcaatggagacgtgactgaggatacacttgctgaatgtattgattccgtcagccttgaggcagaacccagatccgaaatacccctgcaagaacagaattatctggctgtggattcccctccaagtggaggaggatgggcaggctggggatcctgggg

SEQ ID NO: 278082 - DNA, 2206 bp, Artificial Sequence
  derived and/or modified sequence
ctattaatgaaagccaccaggtgactggcagttttcggagtcaaagaagcctgtgtgtaggatctagggagtcaggtttgaaaaaaagatgtcagcgacttaagacccgtgtcacgtgactccctctacttgccagcactgaggctgtggatcaaatttcaactccaggcagtccttccagccatgtgggttcagcggaaagagaagcaaaaccactcttcctaaaatttcttccagacgctttctgagagaatgggggcaggagctctagccatctgtcaaagtaaagcagcggttcggctgaaagaagacatgaaaaagatagtggcagtgccattaaatgaacagaaggattttacctatcagaagttatttggagtcagtctccaagaacttgaacggcaggggctcaccgagaatggcattccagcagtagtgtggaatatagtggaatatttgacgcagcatggacttacccaagaaggtctttttagggtgaatggtaacgtgaaggtggtggaacaacttcgactgaagttcgagagtggagtgcccgtggagctcgggaaggacggtgatgtctgctcagcagccagtctgttgaagctgtttctgagggagctgcctgacagtctgatcacctcagcgttgcagcctcgattcattcaactctttcaggatggcagaaatgatgttcaggagagtagcttaagagacttaataaaagagctgccagacacccactactgcctcctcaagtacctttgccagttcttgacaaaagtagccaagcatcatgtgcagaatcgcatgaatgttcacaatctcgccactgtatttgggccaaattgctttcagtaagttagtggagttttactgttaatatcatcatgtccccctttgtgtttactactgtctgaaattactgggatgtagaagcatatttcagtctgaaaattcagccagcttattttggagaagttgtatcttgttcttgggcatgttagccttgtttttcatcccaatttgaagaaggtagctatgccctttttacaaaactataatttgcaataaatcaaatagccttatttaaaaatctggaaataagttatattttaattaaaaggggcatttaaaaaatctgtaatcagaaatgttgattagcagaaagagaaggagtatgacatagtgaataattttttaaatagtaataaagttcaaattattgccaatagatggaaaattatgaacagactatgccagtatcagaaaaatataacctcagcttcatttactggaaataaaccagtctattttagtagattctttgttgctagccacaggaacttttgtaaagcttaatattttattctccttcttattccataaagctctttaatttttgatacgtgaaatgtgatcctgcaatccagggactttgcttttaactctcctattaatcacctctgatatcaaatacattcttctagttaagagagagagaacatttacactccaaaagctctcagaaactcagcaactttttttttaatagcatatctacttctccacttcattaatatacaggcttattcagctgcccagaactagtaatattacagtcttcagaatgactgtctaaatttagattctggcttagatcctagtgactacagggttccaggtcattcacagcctaatttgggtagaagttctactgtaataactatcctgattgtaattctaaaggtgttaacttttaagtaatggcatttcataggatatgttagggtctcgtgaataaatatctcagatgcaggatccactaattttttgtcttattcagaagctccgtgatagtaaaaagtctatattttttcttatatttgttctgcccagtaaacctttgtttggtgacttacatgtgagaaaggtgtaagtagaaaactgttgaataattctgaaacctagattctagaacaggtaaaaatgaatttgtaaatagaatgcttatttagtaagcattaaacacagatccatacctcattactaacttagacattgggcttgatctggaatttctggtaatctgctccaggtagtcagtcagaatatcagtaagtaatgagtatttattataggttctaattagtatggttttacagtttttctattgttgtaaaatatacataaaataaaatatacc

SEQ ID NO: 278083 - DNA, 609 bp, Artificial Sequence
  derived and/or modified sequence
atgggagcgggcgcccttgccatctgccagtcgaaagccgccgtcagactgaaagaggatatgaaaaagattgtggctgtgccactgaatgaacaaaaggactttacctatcagaagctgttcggagtgagccttcaggagctggaacgccagggattgacagaaaatggaatcccagccgtcgtgtggaatatagtagaatacctgacacagcatggtttaactcaggagggacttttccgcgtgaatggcaatgttaaggtggtggagcaacttcgtcttaaattcgagtcaggagtacccgtagaattgggtaaagatggagatgtgtgtagcgcagcgtcactcttaaagcttttcttgagagagctgcccgattctctaatcaccagtgctcttcagccaaggtttatccagttatttcaagatggcagaaatgacgtgcaggagtctagcctccgcgatctgattaaagagctcccagacacacattactgcctgctgaagtatctttgtcagtttttgaccaaggtggcaaagcaccatgtccaaaatagaatgaatgtgcataatttggcgaccgtgttcgggccgaattgctttcagtag

SEQ ID NO: 278084 - DNA, 609 bp, Artificial Sequence
  derived and/or modified sequence
atgggcgctggggccctggccatctgccagagcaaggctgctgtgcggctgaaggaggacatgaagaagatcgtggccgtgcccctgaatgagcagaaggacttcacctaccagaagctgtttggagtgtccctgcaggagctggagcggcagggcctgacagaaaatggcatcccagctgtggtgtggaacatcgtggagtacctgacccagcacggcctgacccaggagggcctcttccgggtgaatggaaatgtgaaggtggtggagcagctgcggctgaagtttgagagcggcgtgcctgtggagctgggcaaggatggagatgtgtgcagcgctgccagcctgctgaagctgttcctgcgggagctgcctgacagcctcatcaccagcgccctgcagccccgcttcatccagctgttccaggatggaagaaatgatgtgcaggagagcagcctgcgggacctgatcaaggagctgcctgacacccactactgcctgctgaagtacctgtgccagttcctgaccaaggtggccaagcaccacgtgcagaacaggatgaatgtgcacaacctggccaccgtgtttggccccaactgcttccagtag

SEQ ID NO: 278085 - DNA, 609 bp, Artificial Sequence
  derived and/or modified sequence
atgggcgccggcgccctggccatctgccagagcaaggccgccgtgcgcctcaaggaggatatgaaaaaaattgttgccgtgcctctgaacgagcagaaggacttcacctatcagaaactgttcggagtgagcctccaggaactggaaaggcagggactgacagagaacggtattccagctgttgtctggaatattgtagagtacctgacgcagcacggcctcactcaggaaggccttttcagggttaatggcaacgtgaaggtcgtagagcaactgagactgaagtttgagtctggtgtgccagtcgaattaggcaaagacggagacgtctgttccgctgcatcgctgctgaagttgtttttaagagagttgccagattctctcattaccagcgctctgcagccgagatttatccagctttttcaggacgggcgaaacgacgtccaggaatcctctcttagggacttgataaaagaacttcccgacacacattactgtctcttgaagtatctatgtcaattcttaacaaaggtggcaaaacatcacgtacaaaatcgtatgaatgttcacaacctcgcaacagtgtttggaccaaactgcttccagtag

SEQ ID NO: 278086 - DNA, 609 bp, Artificial Sequence
  derived and/or modified sequence
atgggtgccggtgctttagccatttgccagtctaaagctgctgtgcgcctgaaagaggatatgaagaagatcgtggcagtgccgcttaacgagcagaaagactttacctaccagaagctgtttggggtgagcttacaagaattagaacggcagggtctcacggagaatggtataccagctgttgtttggaatatcgtggaatatctgacccagcacgggctgactcaggagggcctattccgtgtcaacggcaacgtgaaagtcgttgaacaacttcggctcaagtttgagtcgggcgttccagtggagcttggcaaggacggcgacgtgtgctctgccgcatcgctcttaaagttatttcttcgggaactgcctgatagcttgatcacatcggctttgcagcctaggtttattcaactgtttcaggatggtaggaatgatgttcaggagtcgtctttgagggacttgatcaaagagctcccagacacacattactgtctcctgaagtatttgtgtcagtttttaaccaaggttgcgaaacaccacgtgcaaaaccgtatgaacgtccacaatttggcaaccgtttttgggcctaattgcttccagtag

SEQ ID NO: 278087 - DNA, 609 bp, Artificial Sequence
  derived and/or modified sequence
atgggcgccggcgccctggccatctgccagagcaaggccgccgtgagactgaaggaggacatgaagaagatcgtggccgtgcccctgaacgagcagaaggacttcacctaccagaagctgttcggcgtgagcctgcaggagctggagagacagggcctgaccgagaacggcatccccgccgtggtgtggaacatcgtggagtacctgacccagcacggcctgacccaggagggcctgttcagagtgaacggcaacgtgaaggtggtggagcagctgagactgaagttcgagagcggcgtgcccgtggagctgggcaaggacggcgacgtgtgcagcgccgccagcctgctgaagctgttcctgagagagctgcccgacagcctgatcaccagcgccctgcagcccagattcatccagctgttccaggacggcagaaacgacgtgcaggagagcagcctgagagacctgatcaaggagctgcccgacacccactactgcctgctgaagtacctgtgccagttcctgaccaaggtggccaagcaccacgtgcagaacagaatgaacgtgcacaacctggccaccgtgttcggccccaactgcttccagtag

SEQ ID NO: 278088 - DNA, 336 bp, Artificial Sequence
  derived and/or modified sequence
atgttaggcatgtatgtgcccgacaggttttctttgaaaagctcacgggttcaggacggcatgggactctacacagcacgtagggttcggaagggcgaaaaattcgggccatttgcaggagaaaagcgcatgcctgaggatctcgacgagaacatggactaccgtctcatgtgggaagttcgtggcagtaagggcgaggtcctgtatatcctggacgctaccaatccgcggcatagcaactggctgcggtttgtgcacgaggcccccagccaagagcagaaaaacctggcggcaatccaggacaaaaatctcggccccgcagagtggaggggatag

SEQ ID NO: 278089 - DNA, 336 bp, Artificial Sequence
  derived and/or modified sequence
atgctgggcatgtatgtgcctgaccgcttcagcctgaagagcagccgggtgcaggacggcatgggcctgtacacagccaggagagtgaggaaaggagagaagtttggcccctttgctggggagaagaggatgcctgaggacctggatgagaacatggactaccgcctgatgtgggaggtgcggggcagcaagggggaggtgctgtacatcctggatgccaccaaccccaggcacagcaactggctgcgctttgtgcatgaggcccccagccaggagcagaagaacctggccgccatccaggacaagaacctgggccctgctgagtggaggggctag

SEQ ID NO: 278090 - DNA, 336 bp, Artificial Sequence
  derived and/or modified sequence
atgctgggcatgtacgtgcccgaccggttcagcctgaagagcagccgggtacaggacgggatgggcctatacacagctcgaagagtgcggaagggagagaaattcggtcccttcgctggcgaaaaaaggatgccagaggacctggacgagaacatggactatcgactgatgtgggaagtgaggggtagtaagggcgaagtcctgtacattcttgatgccactaatccgcgacatagcaattggctcagattcgtgcacgaagcgcctagccaggagcaaaagaatctggcagccattcaggacaaaaacctggggcctgctgaatggagagggtag

SEQ ID NO: 278091 - DNA, 2492 bp, Artificial Sequence
  derived and/or modified sequence
gcgcccaggcccgcgccccccgcgcccccgcagcaggaatggcaggaacggatccgggccgagcccgacccgggacgaggaggggctgagccgcgggggatcctggaatcggcagggaggtggggattctgggaggaaaactccatttcctccttccctgccggtttctcccctctaccctggcaccccaaatttcgatgtgccgcctgccgggcgctaagcgccggtgttgagagaggcggcggccgccgcgcccgggaaaatgctgggcatgtacgtgccggacaggttctccctgaagtcctcccgggttcaggacggcatggggctctacacggcccgcagagtgcgaaagggtgaaaagttcggaccctttgctggagagaagagaatgcctgaagacttggatgaaaatatggattacaggttgatgtgggaggttcgtgggagtaagggagaagttttgtacattttggatgctaccaacccacggcactccaactggcttcgcttcgttcatgaggcaccatctcaggagcagaagaacttggctgccattcaagacaagaatttgggacccgccgaatggcgaggctaaaagagctgtaacacagacaagactgagacctgctccttgcttgccacattgcgagtgaagagaaggagagaagagctgcagcctttcagggatcccagacctgggagctccccaagccagggctgtgactccttctttggggtgctgcagttcctggtgtctccgagcttctggatgccactgtgttccctggtgtcagctgtggaagctacttgcggtgtgcctgtcccagctgcagcctggcagagagctggcacctgtgctggcacctggagctgcccacccttctgcagcagccggcatatctgactgtgcattggccagaccccacactcactctcacaccccttgccgctccatgcagtctcccttggcaggtgtggaatccaggccattagtgtgagctgaacacagcctgccaggtcgagtgagcagaatgagctcagtgggctgaagcaaaaatttgggcaaaggcacgactggccacagaggtttccagccagaaaagcaacaccccaaagatcccataataataggagtgcaaaacctgttgtaaactgtgcatgccagggatctaggttgtgtgttccttatgagaatctagctaatgcctggtgatctgaggtggaacagttttatcccaaaaccatccccagccccatccctgtccatggaaaaactgtcttccacaaaacctgttcctgatgccaaaaaggttgggcactgctattctataccgctgtaggatgactatagttaacaataatatatagtttcaaaaagctagaaggaagacattgaatgttcccaacacaaagaaatgatacatgtttgagatgatggatatgctgattatcttgatctgatcactatacatgatatgtattgtaacatcactaggtaccccatgaatatgtacaattatgtgtcaagataaataagtaataaaataaaaagctttatcttattccccaaaaaaagacagcttgaggaaaggaaaaaggaagattactagcagagttgtaggctattgtctatggtactttactgcatgaagaaggtacagaggctgaatggaagaggggttgtaaaactggagtatgggctttcctttcacatggagctttgtttaacagaagtctagaaagtagatataagaatcattatcatggttagtttatgtcaaaactatacatactgtcttattatacttaattaaatgggtaatcatttgactagtgtgtctatgagttcgtaagttggtacttaatggttatattatttaattcacctcagtggacagagattaaaacagagtcattttctggttccttttcctgtggttaattaagtcctttgagatatggctgtatacactttatggtggtttacacatgtctgttttattagttttgcagacagtagacaggaacaaaaaggggcatagtcattcttgctgtgagttaaccctacacttctccaagcagtagaatgtaaactcaactaggcttttgagaactttccctcagtgacttaattaattccatgcccatttctggactttggaatatagcatgcatctatgtagcttgttttttactttatcaaatttaaaatgctcattatcgaacatttatatttttatattaaacttttgtaagtataacctgcttggtttcaaatatttcacatgcaacatgacattggttggaataatgttatgttgtatgtaaaagtgtaagttgtatgtaaaagattaatatcacaatcctttgaaatactttgcaccttgctattgaataaagttgatgacttttaattctgttgacataatctagaacccatagggaaactctatgataatgttttacttctagaaagtcagtcaataagt

SEQ ID NO: 278092 - DNA, 336 bp, Artificial Sequence
  derived and/or modified sequence
atgctggggatgtatgtgccggatcgattttctcttaaatcctcaagagtgcaggatgggatgggactttacactgcgaggagagttaggaagggtgaaaaatttgggccatttgcaggagagaagcggatgccagaggatcttgacgagaacatggattaccgcttgatgtgggaagttcggggatccaagggggaggtactgtatattttggatgccacaaaccctagacacagcaattggcttagattcgtgcacgaagctccatcccaagaacagaagaacctcgcagctattcaggataagaacctcggacctgcagagtggcggggatag

SEQ ID NO: 278093 - DNA, 336 bp, Artificial Sequence
  derived and/or modified sequence
atgctgggcatgtacgtgcccgacagattcagcctgaagagcagcagagtgcaggacggcatgggcctgtacaccgccagaagagtgagaaagggcgagaagttcggccccttcgccggcgagaagagaatgcccgaggacctggacgagaacatggactacagactgatgtgggaggtgagaggcagcaagggcgaggtgctgtacatcctggacgccaccaaccccagacacagcaactggctgagattcgtgcacgaggcccccagccaggagcagaagaacctggccgccatccaggacaagaacctgggccccgccgagtggagaggctag

SEQ ID NO: 278094 - protein, 156 aa, Artificial Sequence
  derived and/or modified sequence
MASNNHWFQSSQVPSFAQMLKKNLPVQPATKTITTPTGWSSESYGLSKMASKVTQVTGNFPEPLLSKNLSSISNPVLPPKKIPKEFIMKYKRGEINPVSALHQFAQMQRVQLDLKETVTTGNVMGPYFAFCAVVDGIQYKTGLGQNKKESRSNAAK

SEQ ID NO: 278095 - DNA, 471 bp, Artificial Sequence
  derived and/or modified sequence
atggcctccaataatcattggttccagtccagccaggttccaagctttgcacaaatgctaaaaaaaaatctaccagtgcagcctgccactaagaccatcactacccctaccggctggagttcagagtcttatggactctccaagatggccagtaaggtgacacaagtcacgggaaattttcccgaacctcttctctcgaagaacctgagtagcataagcaatcccgtcctcccacccaagaaaataccgaaagagttcatcatgaagtataaacgaggtgaaatcaaccccgtcagtgccctgcaccagtttgctcaaatgcagagagttcagctcgatttgaaagagactgtcaccaccgggaacgtaatgggaccatacttcgctttttgcgcagtcgtggatggcatacagtataagaccgggctcggacagaacaagaaggagtctcgatccaacgccgctaaatag

SEQ ID NO: 278096 - DNA, 627 bp, Artificial Sequence
  derived and/or modified sequence
gttcgctcactggccaagcttcaggacgtgtgaggtagtttttctgtaaacaggaaggccacagtggaggccaagccttccccatgggcaccttctcagattgcgattgtggatgaaatgagggattttcttgaaacaaccctcacgcaggtgagaaaatggctagcaacaatcattggtttcagagttcgcaggtccccagctttgcccagatgctgaaaaagaacctgccagttcaaccagcgacaaagacgataactacacccacaggatggtcctcagaaagttacggcctgtccaagatggcatccaaggttacgcaagtaacgggtaattttccagagccgttgctttccaagaatctttcatctatttcaaatcctgtccttcctccaaaaaaaatacctaaggaatttataatgaaatacaaacgtggagagataaatcctgtgtcagccttgcaccagtttgcacaaatgcagcgagttcagcttgaccttaaggaaactgtgacaacaggtaatgttatgggaccatattttgccttttgtgctgtggtggatggtattcagtacaagactggactgggacaaaataaaaaggagtctagatccaatgcagcaaaat

SEQ ID NO: 278097 - DNA, 471 bp, Artificial Sequence
  derived and/or modified sequence
atggccagcaacaaccactggttccagagcagccaggtgcccagctttgcccagatgctgaagaagaacctgcctgtgcagcctgccaccaagaccatcaccacccccaccggctggagcagcgagagctatggcctgagcaagatggccagcaaggtgacccaggtgactggaaacttccctgagcccctgctgagcaagaacctgagcagcatcagcaaccctgtgctgccccccaagaagatccccaaggagttcatcatgaagtacaagagaggagagatcaaccctgtgtctgccctgcaccagtttgcccagatgcagagggtgcagctggacctgaaggagaccgtgaccactggaaatgtgatgggcccctactttgccttctgtgctgtggtggatggcatccagtacaagacaggcctgggccagaacaagaaggagagccgcagcaatgctgccaagtag

SEQ ID NO: 278098 - DNA, 471 bp, Artificial Sequence
  derived and/or modified sequence
atggccagcaacaaccactggttccagagcagccaggtgcccagctttgcccagatgctcaagaaaaacctcccggttcagcctgcgaccaagactattaccacccctaccggttggtcatcagagtcatatggcctgtccaaaatggcgagcaaggtgacccaagtgacggggaatttcccggaacccctgctgagcaaaaacctgtcatctatttccaacccagtcctgcccccaaaaaaaatccccaaagagtttatcatgaaatacaagcgaggagaaatcaacccagtgagcgcacttcaccagtttgctcagatgcaacgtgtacagctggatctgaaggagaccgtgactacggggaacgtgatgggaccttacttcgcgttctgcgccgtggtggacggcattcagtataagacagggttgggtcagaacaaaaaggagagcaggtcaaatgccgccaagtag

SEQ ID NO: 278099 - DNA, 471 bp, Artificial Sequence
  derived and/or modified sequence
atggcttccaataaccactggtttcagtctagccaagtgccttcctttgctcagatgctgaaaaaaaacctgcccgtgcaacctgccacaaagacaatcactactccaactggttggtcatctgagagctatggactttcgaaaatggcaagtaaggtcacccaggtcactggtaatttcccggaacctttactgtctaaaaacctctccagcatcagtaatcctgtgttaccgccaaagaaaattcctaaagagttcattatgaaatacaagcggggtgagatcaatcccgtgagcgcactgcatcaattcgcacagatgcagcgcgtgcagctcgatctgaaggagaccgtgaccaccggcaatgtgatgggcccatacttcgccttctgtgctgtcgtggacggcatacagtataaaacaggcctgggtcaaaacaagaaggagtcaagatctaacgccgcaaagtag

SEQ ID NO: 278100 - DNA, 471 bp, Artificial Sequence
  derived and/or modified sequence
atggccagcaacaaccactggttccagagcagccaggtgcccagcttcgcccagatgctgaagaagaacctgcccgtgcagcccgccaccaagaccatcaccacccccaccggctggagcagcgagagctacggcctgagcaagatggccagcaaggtgacccaggtgaccggcaacttccccgagcccctgctgagcaagaacctgagcagcatcagcaaccccgtgctgccccccaagaagatccccaaggagttcatcatgaagtacaagagaggcgagatcaaccccgtgagcgccctgcaccagttcgcccagatgcagagagtgcagctggacctgaaggagaccgtgaccaccggcaacgtgatgggcccctacttcgccttctgcgccgtggtggacggcatccagtacaagaccggcctgggccagaacaagaaggagagcagaagcaacgccgccaagtag

SEQ ID NO: 278101 - DNA, 1365 bp, Artificial Sequence
  derived and/or modified sequence
atgggcgacgaggacaagagaatcacctacgaggacagcgagcccagcaccggcatgaactacacccccagcatgcaccaggaggcccaggaggagaccgtgatgaagctgaagggcatcgacgccaacgagcccaccgagggcagcatcctgctgaagagcagcgagaagaagctgcaggagacccccaccgaggccaaccacgtgcagagactgagacagatgctggcctgccccccccacggcctgctggacagagtgatcaccaacgtgaccatcatcgtgctgctgtgggccgtggtgtggagcatcaccggcagcgagtgcctgcccggcggcaacctgttcggcatcatcatcctgttctactgcgccatcatcggcggcaagctgctgggcctgatcaagctgcccaccctgccccccctgcccagcctgctgggcatgctgctggccggcttcctgatcagaaacatccccgtgatcaacgacaacgtgcagatcaagcacaagtggagcagcagcctgagaagcatcgccctgagcatcatcctggtgagagccggcctgggcctggacagcaaggccctgaagaagctgaagggcgtgtgcgtgagactgagcatgggcccctgcatcgtggaggcctgcaccagcgccctgctggcccactacctgctgggcctgccctggcagtggggcttcatcctgggcttcgtgctgggcgccgtgagccccgccgtggtggtgcccagcatgctgctgctgcagggcggcggctacggcgtggagaagggcgtgcccaccctgctgatggccgccggcagcttcgacgacatcctggccatcaccggcttcaacacctgcctgggcatcgccttcagcaccggcagcaccgtgttcaacgtgctgagaggcgtgctggaggtggtgatcggcgtggccaccggcagcgtgctgggcttcttcatccagtacttccccagcagagaccaggacaagctggtgtgcaagagaaccttcctggtgctgggcctgagcgtgctggccgtgttcagcagcgtgcacttcggcttccccggcagcggcggcctgtgcaccctggtgatggccttcctggccggcatgggctggaccagcgagaaggccgaggtggagaagatcatcgccgtggcctgggacatcttccagcccctgctgttcggcctgatcggcgccgaggtgagcatcgccagcctgagacccgagaccgtgggcagcgccgacagcatcaccggcaacttcggcaccgagagacccaagctgctgggcccccccagcacccagctgagattccacttcttccacatccagctgagcacctag

SEQ ID NO: 278102 - DNA, 432 bp, Artificial Sequence
  derived and/or modified sequence
atgggcgacgaggacaagagaatcacctacgaggacagcgagcccagcaccggcatgaactacacccccagcatgcaccaggaggcccaggaggagaccgtgatgaagctgaagggcatcgacgccaacgagcccaccgagggcagcatcctgctgaagagcagcgagaagaagctgcaggagacccccaccgaggccaaccacgtgcagagactgagacagatgctggcctgccccccccacggcctgctggacagagtgatcaccaacgtgaccatcatcgtgctgctgtgggccgtggtgtggagcatcaccggcagcgagtgcctgcccggcggcaacctgttcggcatcatcatcctgttctactgcgccatcatcggcggcaagctgctgggcctgatcaagctgcccaccctgccccccctgtag

SEQ ID NO: 278103 - DNA, 1365 bp, Artificial Sequence
  derived and/or modified sequence
atgggagacgaagacaagcgaataacgtacgaggatagcgagcccagtactggtatgaattacacaccatccatgcatcaggaagctcaggaggaaactgtgatgaagctcaaggggatagacgctaacgagcctacagagggctccatcttactgaaatcttctgagaagaaactccaggaaactccaaccgaagcaaatcatgtgcaacgcctaaggcagatgctcgcctgccccccccatgggttgctggatagagtgatcacgaatgtgaccataatcgttttgttatgggcggtagtatggtctatcacaggttcagagtgcctgcccgggggtaacctgttcgggatcatcatactattttactgtgctatcattgggggcaaactgttgggtttgattaagctcccaactctccctccgctgcctagcctgcttgggatgctgctggccggcttcttaataaggaatattcccgtgataaatgacaacgtacaaattaagcacaaatggtcgtcatctttgcgtagcatagcccttagcattatcctcgtccgagccgggctgggcttagactctaaagccctgaaaaaactaaaaggcgtgtgcgtccgattaagcatgggtccatgcatcgtggaagcatgcacgtctgcgctcctcgcacactacctgctcggcctcccatggcagtggggctttattctcggatttgtccttggcgccgtttcccctgctgttgtagtgccaagcatgctgctgctccagggagggggttatggagttgaaaagggcgtccctacactgctgatggcggccggatcgttcgacgatatactggccatcactgggttcaatacatgcctgggaatcgcattcagcactggaagcaccgtgtttaacgtcctgaggggcgtcctggaggtggtgattggagtggccaccggctctgtcctgggattctttattcagtactttccctcgcgggatcaggacaagcttgtctgcaaacgaactttcttggtccttggcttgagcgtgctggcagtcttctctagcgttcatttcggtttccctggaagcggcggtctctgcaccctggtgatggcttttctcgcagggatggggtggaccagtgagaaggctgaggtggagaagatcatcgctgtagcgtgggatatctttcagccactgttgtttggactcatcggcgccgaagtcagcatcgcctccctcagacccgaaacagttggtagcgctgacagtatcactggcaacttcgggaccgagaggccgaagctcttgggaccaccatccacacagctcagatttcattttttccatattcagctgtctacttag

SEQ ID NO: 278104 - DNA, 432 bp, Artificial Sequence
  derived and/or modified sequence
atgggcgatgaagacaagcggattacatacgaggacagcgagccttccacgggaatgaattacaccccatccatgcatcaggaggcccaggaagaaacagtgatgaaacttaaaggaattgatgcgaatgagccaacagaagggagcatactgcttaagtcatccgagaaaaagctgcaggaaacacctactgaggcaaaccatgtgcagaggttgagacagatgctcgcctgcccaccgcatgggttgctcgatcgggtcatcaccaacgttactatcatagtactcctgtgggccgtcgtttggagcataaccggctctgaatgtttgcctggtggaaatctgttcgggataataattcttttctattgcgccattattggcggtaagctcttgggcctcatcaagctgcccacactgccgccactgtag

SEQ ID NO: 278105 - DNA, 1365 bp, Artificial Sequence
  derived and/or modified sequence
atgggagatgaggacaagaggatcacctatgaagattctgagcccagcacaggcatgaactacacccccagcatgcaccaggaggcccaggaggagaccgtgatgaagctgaagggcattgatgccaatgagcccacagagggcagcatcctgctgaagagcagcgagaagaagctgcaggagacccccacagaggccaaccacgtgcagaggctgcggcagatgctggcctgcccccctcatggcctgctggacagagtcatcaccaacgtgaccatcatcgtgctgctgtgggccgtggtgtggagcatcactggaagtgagtgcctgcccggcggcaacctgtttggcatcatcatcctcttctactgtgccatcattggaggcaagctgctgggcctcatcaagctgcccaccctgccccccctgcccagcctgctgggcatgctgctggccggcttcctgatccggaacatccctgtgatcaatgacaacgtgcagatcaagcacaagtggagcagcagcctgcggagcatcgccctgagcatcatcctggtgcgggccggcctgggcctggacagcaaggccctgaagaagctgaagggcgtgtgtgtgcggctgtccatgggcccctgcatcgtggaggcctgcaccagcgccctgctggcccactacctgctgggcctgccctggcagtggggcttcatcctgggctttgtgctgggcgctgtgtccccagctgtggtggtgcccagcatgctgctgctgcagggcggcggctatggagtggagaagggcgtgcccaccctgctgatggccgccggcagctttgatgacatcctggccatcaccggcttcaacacctgcctgggcatcgccttcagcacaggcagcacagtgttcaacgtgctgcggggcgtgctggaggtggtgattggagtggccaccggctctgtgctgggcttcttcatccagtacttccccagccgggaccaggacaagctggtgtgcaagaggaccttcctggtgctgggcctgtctgtgctggccgtgttcagctctgtgcacttcggcttccctggcagcggcggcctgtgcaccctggtgatggccttcctggccggcatgggctggaccagcgagaaggccgaggtggagaagatcatcgctgtggcctgggacatcttccagcccctgctgtttggcctcatcggggctgaggtgtccatcgccagcctgcggcctgagaccgtgggcagcgctgacagcatcactggaaactttggaacagagcggcccaagctgctgggcccccccagcacccagctgcgcttccacttcttccacatccagctgagcacctag

SEQ ID NO: 278106 - DNA, 432 bp, Artificial Sequence
  derived and/or modified sequence
atgggagatgaggacaagaggatcacctatgaagattctgagcccagcacaggcatgaactacacccccagcatgcaccaggaggcccaggaggagaccgtgatgaagctgaagggcattgatgccaatgagcccacagagggcagcatcctgctgaagagcagcgagaagaagctgcaggagacccccacagaggccaaccacgtgcagaggctgcggcagatgctggcctgcccccctcatggcctgctggacagagtcatcaccaacgtgaccatcatcgtgctgctgtgggccgtggtgtggagcatcactggaagtgagtgcctgcccggcggcaacctgtttggcatcatcatcctcttctactgtgccatcattggaggcaagctgctgggcctcatcaagctgcccaccctgccccccctgtag

SEQ ID NO: 278107 - DNA, 1365 bp, Artificial Sequence
  derived and/or modified sequence
atgggcgacgaggacaagcggatcacctacgaggacagcgagccctcaacgggaatgaactacacaccctctatgcatcaagaagcccaagaggagacagtgatgaagttgaagggtatcgacgctaacgagccaaccgagggatctatccttctcaagtccagcgagaaaaaattacaggaaacacccactgaagcaaatcacgtccagaggctccgccagatgctcgcgtgtcccccacacggactcctcgatcgcgtgattactaacgtaaccatcattgtgctactctgggctgtggtctggagtattactggcagtgagtgtctgcctggaggcaatctgtttggaattatcatcctgttctattgcgcaatcattggcggaaagctcctgggcctaatcaaactgcccacgctgcctccactgccaagcctgttggggatgctgctggccgggtttctgatccgaaatataccagtgattaacgataatgtgcaaatcaagcataagtggtcctcaagcttgcgctccatcgccttaagcatcatcctggtacgagctggacttgggttggatagcaaggccttgaaaaaactgaagggcgtttgcgtgagactctccatgggtccgtgcatcgtggaagcttgtacgagcgcactgttggcacattaccttctggggcttccgtggcagtggggcttcattctgggtttcgtattgggtgctgtgagtcccgctgttgtggtgccttccatgcttctgctacagggcggcggctatggagtcgaaaagggagttcctacgctgctcatggcagcaggctcgttcgatgatatattggccatcaccggcttcaacacttgtttggggatcgccttctccacgggttccacagtgttcaacgtcctgcggggggtgctggaggtcgtgatcggggtggccacaggcagtgtgctaggattttttattcaatacttcccctccagggatcaggataagctggtgtgcaagaggacatttctagttttggggttgagtgtcctcgcagtgttctcatcagtacacttcggtttcccaggatccggtggcctctgtactctggtgatggcttttctcgcgggcatgggatggaccagcgaaaaagccgaggtcgaaaaaattatagctgttgcatgggatatctttcagccgctgctgtttggtctgatcggcgccgaggtcagcatcgcctccctccggccagagaccgtgggatccgccgattcaataacaggcaactttggcacggaaagacccaagctgctgggacctccttcaacgcagctcaggtttcacttctttcatatccaactttctacatag

SEQ ID NO: 278108 - DNA, 432 bp, Artificial Sequence
  derived and/or modified sequence
atgggcgacgaggacaagcggatcacctacgaggacagcgagcccagtaccgggatgaattatacacccagcatgcaccaggaggcgcaggaagaaaccgtgatgaagctcaaggggatcgacgctaatgaaccgacagagggctcaatcctgttaaaatcaagcgagaaaaaactacaagagactcccactgaggccaaccacgtgcagagactgaggcagatgttagcctgcccaccgcacggcttgctagatcgcgtaatcactaatgtcactatcattgtgctgctctgggcggtggtgtggagcataacaggaagcgaatgccttccggggggcaatcttttcggcatcattatacttttttactgcgccatcattggcggcaaactgctgggactgattaaactgccaactttacccccactctag

SEQ ID NO: 278109 - DNA, 1365 bp, Artificial Sequence
  derived and/or modified sequence
atgggggacgaagacaaacggatcacttatgaagactcagaacctagtacaggaatgaattacaccccatccatgcatcaagaggcccaggaagagacagtcatgaagctgaaaggcattgatgctaatgagccaactgagggctctatccttctgaagtcttcagaaaaaaagctccaggaaacaccaaccgaagcaaaccacgttcagagacttcggcagatgctcgcctgtccaccccacggccttcttgaccgggtcatcaccaatgtgacgatcattgtcctactctgggccgttgtgtggtctataacgggctctgaatgcttacccggaggaaatctgtttggaataatcatcctcttttattgcgcaatcatcggcggaaaactgctcggcctcatcaaactcccaacccttccacctctgccttctcttcttgggatgctgcttgcaggtttcctgataagaaacatcccggtgatcaatgataacgtgcaaatcaagcacaaatggagctcaagcttacgaagcatcgccttgtcaattatccttgtacgggctggcttgggccttgactctaaggcactcaagaaactgaaaggagtgtgcgtgagattgagcatgggtccgtgcattgttgaagcctgtacctccgccttattggcgcattacctgctaggacttccatggcagtggggatttattctgggtttcgttcttggtgccgtgagtcctgccgtggtagttccttcaatgctgctgctgcagggtggtggatacggagttgaaaagggcgtgcctacgctcctgatggccgcaggttccttcgacgatatcttggccatcactggattcaatacttgtctgggcattgcattcagcactgggtccactgtgtttaatgttctgagaggagttctggaagtcgttattggcgtcgcaacaggtagcgtgctgggatttttcatccagtatttcccctcccgcgatcaggacaagttggtgtgcaagcggacgtttttggtactgggcctaagcgttctggccgtcttctcctctgttcacttcgggttccctgggagtggtggcctctgcactctggtcatggccttcctggccggaatggggtggaccagcgagaaagcagaagtcgagaagataatagcggtagcctgggatatttttcagcctctgctgttcggactgattggtgccgaggtctcgatcgctagcttaaggccggaaaccgtcggaagtgccgattctattactgggaacttcgggaccgagcgacccaaactccttggtccaccttccacccaactccggttccatttcttccacatacaactgtctacttag

SEQ ID NO: 278110 - DNA, 432 bp, Artificial Sequence
  derived and/or modified sequence
atgggagatgaggacaaacggatcacatatgaggattccgaaccaagcaccgggatgaactacacaccctctatgcatcaggaggcccaggaggagaccgtcatgaagctgaagggcatcgacgctaacgaaccaacagagggttcgattctcctaaaatcgagcgaaaagaagctgcaggaaactccaacggaggcaaaccacgttcagcgcttacgacagatgcttgcttgcccccctcacggactgcttgatagagttattactaatgtgacaataatagtgctcctttgggccgtggtttggagtataaccgggtcagagtgcctgccaggcggaaatttgtttggaattatcatacttttttattgcgccataatcggagggaaattacttggactgattaaattgcccactctgccacccctgtag

SEQ ID NO: 278111 - DNA, 2237 bp, Artificial Sequence
  derived and/or modified sequence
gggcaggtgttaagcgataaaggggggcagaacaagtcttttatccggccatttaattggtcaccttaagaaagaatcctatcttcccaccgcagctgagaagacacttctaagaggtacagctaaaaggtggaggactgatagacaacttagaggttggtttcgggaacgataaaacaagtaacgggctgcccggcctgcgccgcggagtcccgaggagcctgcgctgtgctcctctcgcggtgtctcgtcatctccgggaagactcggcgcctgggtccgcgctctctgggtaagctttccgggaagctttcccgggagctcgctggtcctggccccagaagcctgcggacccgcccagggaggataagcagctgaaagaccgcgcggtgccgctccgaggccccgggacgtgggcccatggtcggcctggcgccacctttccgggggaagccacgcgcaccaggcatcgcacgcggctctgcacccgcgccgccggacctgaaacccggcggagggcacacggggctgccgctgcgggccccggaccaacccatgcttactccggagcctgtaccggcgccgacgggtcggacctccctgcgcggtgtcgcccagcgggttcgtgcgaaaggcggggccgactacacgcggtgccgcgccctgagaccgtttatctgcagtcaacgcagcctcccggctcagcctgggaagatgcgcgaatcgggaaccccagagcgcggtggctagaccgggctccgccgcctcccccacagcccctttcctaatcgttcagacggagcctggtcgacttcgccggagactgccagatctcgttcctcttccctgtgtcatcttcttaattataaataatgggggatgaagataaaagaattacatatgaagattcagaaccatccacaggaatgaattacacgccctccatgcatcaagaagcacaggaggagacagttatgaagctcaaaggtatagatgcaaatgaaccaacagaaggaagtattcttttgaaaagcagtgaaaaaaagctacaagaaacaccaactgaagcaaatcacgtacaaagactgagacaaatgctggcttgccctccacatggtttactggacagggtcataacaaatgttaccatcattgttcttctgtgggctgtagtttggtcaattactggcagtgaatgtcttcctggaggaaacctatttggaattataatcctattctattgtgccatcattggtggtaaacttttggggcttattaagttacctacattgcctccactgccttctcttcttggcatgctgcttgcagggtttctcatcagaaatatcccagtcatcaacgataatgtgcagatcaagcacaagtggtcttcctctttgagaagcatagccctgtctatcattctggttcgtgctggccttggtctggattcaaaggccctgaagaagttaaagggcgtttgtgtaagactgtccatgggtccctgtattgtggaggcgtgcacatctgctcttcttgcccattacctgctgggtttaccatggcaatggggatttatactgggttttgttttaggtgctgtatctccagctgttgtggtgccttcaatgctccttttgcagggaggaggctatggtgttgagaagggtgtcccaaccttgctcatggcagctggcagcttcgatgacattctggccatcactggcttcaacacatgcttgggcatagccttttccacaggctctactgtctttaatgtcctcagaggagttttggaggtggtaattggtgtggcaactggatctgttcttggatttttcattcagtactttccaagccgtgaccaggacaaacttgtgtgtaagagaacattccttgtgttggggttgtctgtgctagctgtgttcagcagtgtgcattttggtttccctggatcaggaggactgtgcacgttggtcatggctttccttgcaggcatgggatggaccagcgaaaaggcagaggttgaaaagataattgcagttgcctgggacatttttcagccccttctttttggactaattggagcagaggtatctattgcatctctcagaccagaaactgtaggaagcgcggattctattactggaaactttgggactgaaaggccaaagcttctgggcccaccatcaacgcagctccgctttcatttctttcacatacaactttccacataa

SEQ ID NO: 278112 - DNA, 648 bp, Artificial Sequence
  derived and/or modified sequence
atttcagatgatctgaagaagggtattggatggaacctatccaataggttcatcacaaaagaggacctgagagacaagaatgaatggtttctgactggtggagaaatttgaggataatctcccttgcttgaaaagcggtgattaagattggcacttgcttacaggagtgaaaaacagatctcgttcctcttccctgtgtcatcttcttaattataaataatgggggatgaagataaaagaattacatatgaagattcagaaccatccacaggaatgaattacacgccctccatgcatcaagaagcacaggaggagacagttatgaagctcaaaggtatagatgcaaatgaaccaacagaaggaagtattcttttgaaaagcagtgaaaaaaagctacaagaaacaccaactgaagcaaatcacgtacaaagactgagacaaatgctggcttgccctccacatggtttactggacagggtcataacaaatgttaccatcattgttcttctgtgggctgtagtttggtcaattactggcagtgaatgtcttcctggaggaaacctatttggaattataatcctattctattgtgccatcattggtggtaaacttttggggcttattaagttacctacattgcctccactg

SEQ ID NO: 278113 - DNA, 99 bp, Artificial Sequence
  derived and/or modified sequence
atggtgaagtgctgcagcgccatcggctgcgccagcagatgcctgcccaacagcaagctgaagggcctgaccttccacgtgttccccaccgacgagtag

SEQ ID NO: 278114 - DNA, 243 bp, Artificial Sequence
  derived and/or modified sequence
atggtgaagtgctgcagcgccatcggctgcgccagcagatgcctgcccaacagcaagctgaagggcctgaccttccacgtgttccccaccgacgagaacatcaagagaaagtgggtgctggccatgaagagactggacgtgaacgccgccggcatctgggagcccaagaagggcgacgtgctgtgcagcagacacttcaagaagaccgacttcgacagaagcgcccccaacatcaagctgtag

SEQ ID NO: 278115 - DNA, 99 bp, Artificial Sequence
  derived and/or modified sequence
atggtaaagtgttgctcagccatcgggtgcgcatcgcgctgtctgccaaactccaagcttaaggggctgaccttccacgtctttcccacggacgagtag

SEQ ID NO: 278116 - DNA, 243 bp, Artificial Sequence
  derived and/or modified sequence
atggtcaagtgctgttcagcaatcggctgcgcatcaaggtgcctgccaaatagtaaacttaaaggcctcaccttccacgtgttccccaccgacgagaacatcaaacgcaagtgggtcctggcgatgaagcgcctggatgtgaacgcggccggcatatgggagcctaaaaagggagatgtactctgtagtcggcatttcaagaagaccgactttgaccgtagtgcccctaacatcaagttgtag

SEQ ID NO: 278117 - DNA, 99 bp, Artificial Sequence
  derived and/or modified sequence
atggtgaagtgctgcagcgccatcggctgtgccagccgctgcctgcccaacagcaagctgaagggcctgaccttccacgtgttccccacagatgaatag

SEQ ID NO: 278118 - DNA, 243 bp, Artificial Sequence
  derived and/or modified sequence
atggtgaagtgctgcagcgccatcggctgtgccagccgctgcctgcccaacagcaagctgaagggcctgaccttccacgtgttccccacagatgagaacatcaagaggaagtgggtgctggccatgaagaggctggatgtgaatgctgctggcatctgggagcccaagaagggagatgtgctgtgcagccgccacttcaagaagacagactttgacagaagtgcccccaacatcaagctgtag

SEQ ID NO: 278119 - DNA, 99 bp, Artificial Sequence
  derived and/or modified sequence
atggtgaagtgctgcagcgccatcggctgcgccagccggtgcctgccgaacagcaagcttaagggacttacattccacgtattccctacagacgagtag

SEQ ID NO: 278120 - DNA, 243 bp, Artificial Sequence
  derived and/or modified sequence
atggtgaagtgctgcagcgccatcggctgcgccagccggtgcctgccgaattctaaactgaaagggttaacctttcatgtgtttccaacagatgaaaatatcaagcggaaatgggtgcttgccatgaaacgcctcgacgtcaacgctgcaggcatctgggagcctaagaaaggcgatgtgctgtgctctcgtcactttaaaaagaccgacttcgataggagcgcgcctaatattaaactgtag

SEQ ID NO: 278121 - DNA, 99 bp, Artificial Sequence
  derived and/or modified sequence
atggtcaagtgttgcagcgctatcggatgcgccagcaggtgcctgcctaatagcaaactcaagggtctgacctttcacgtttttcccactgatgagtag

SEQ ID NO: 278122 - DNA, 243 bp, Artificial Sequence
  derived and/or modified sequence
atggtgaaatgctgcagcgccatcggttgcgcgagtagatgtcttccgaacagcaagctgaagggcttgacctttcacgtctttccaaccgacgagaatatcaagaggaagtgggttctcgctatgaagaggctggacgttaacgccgcaggcatttgggagccaaaaaagggagatgttctttgcagccgacattttaagaagacagacttcgatcggagtgctcctaacatcaagctgtag

SEQ ID NO: 278123 - DNA, 543 bp, Artificial Sequence
  derived and/or modified sequence
atagtgctcgcagccccgctgacctcgctcttgaccgctggcgccatcttcccgggccgtcgccgccatctcctccacctcccctcacattccaccgatccttcccccaggataaaaaccacgcccagagaagctgcgcctctctagcacacccctcccagccccagcggccactagcgacaatatggctcctaagcacgtgacccggggcagacggatttccggttcccggggctacgaggcggaagcgaaggcagacgcagtctccgtcgttgacgttagtcgcagtcttcgctgctaacgtcaccagctaaaccgtgaggacaaaaagtaaggaaaaatagacacactccaccatgacctcatggaactaacaagactggtggaggaggaagacattaataagagcaatcactgcaataaatttttgttatgagttgctaaaatggtgaaatgctgctccgccattggatgtgcttctcgctgcttgccaaattcgaagttaaaaggactgacatttcacgtattccccacagatgaaaa

SEQ ID NO: 278124 - DNA, 313 bp, Artificial Sequence
  derived and/or modified sequence
cagagaccactgtgcaagcctaatcacttcccaagaagggttttgctttaaagttttgttatgagttgctaaaatggtgaaatgctgctccgccattggatgtgcttctcgctgcttgccaaattcgaagttaaaaggactgacatttcacgtattccccacagatgaaaacatcaaaaggaaatgggtattagcaatgaaaagacttgatgtgaatgcagccggcatttgggagcctaaaaaaggagatgtgttgtgttcgaggcactttaagaagacagattttgacagaagtgctccaaatattaaactg

SEQ ID NO: 278125 - DNA, 702 bp, Artificial Sequence
  derived and/or modified sequence
atgtccacagctgctctcatcactctagtaaggagcggcggcaaccaagtgcgccgcagggtgctactctcttctagacttctccaggacgaccgacgcgtgaccccaacatgccatagctcgacgagcgaaccacgctgctcacgcttcgatcccgacgggtccggctctcccgcaacctgggataacttcggaatctgggataatagaatagacgagccaattctgctcccaccctccattaaatatgggaaacccatccctaagatttctctggagaatgtggggtgcgcttctcagattggaaagcgcaaagagaatgaggacagattcgacttcgcccagttaaccgacgaagttctgtattttgctgtgtacgacgggcatggtggaccagctgccgctgacttctgccatacccacatggagaagtgtattatggacctgctgcccaaggaaaagaacctggaaaccttattaacactggcttttctcgaaattgacaaggccttttcatcccatgcgaggctctcagctgacgagaactgtgcatggtctgccgcccttgatctagagcccgtcgacactatctgcggggcttcagtggaacgcgagatctgcctgattctgtcgcaggtaaaggagtcttcaggatcttatccagggctgagggagggatcccatatttctctgagtcactag

SEQ ID NO: 278126 - DNA, 702 bp, Artificial Sequence
  derived and/or modified sequence
atgagcaccgccgctttgattactctggtgaggagcgggggaaatcaagtgcgaagacgcgtactcctcagcagcaggctgctgcaagacgacagaagagttacacccacctgccactcttctaccagcgaacccagatgctcacgttttgacccagacgggagcggaagccccgctacatgggacaattttggcatctgggataatcgaattgacgagcctatactgctgcccccctccattaagtatggcaagcccatccctaagatctctctggaaaacgttgggtgtgcaagccagattggcaaacgcaaagagaatgaggatcggttcgatttcgcccaattgacggacgaggtcctgtattttgccgtctatgatggacatggcggccctgccgccgcggacttttgccacactcatatggagaaatgtattatggatctccttcccaaggagaagaatctggaaacactgctaacgctggcctttcttgaaattgataaagctttttccagccatgctaggctctccgccgatgagaattgtgcttggtctgccgcgctcgatctggaaccagtcgatacaatttgtggagccagtgttgagagggaaatatgtctgattctttcccaagtaaaagagtctagcgggtcctacccaggcctgcgtgagggctcacatatttccctttcccattag

SEQ ID NO: 278127 - DNA, 702 bp, Artificial Sequence
  derived and/or modified sequence
atgagcacagctgccctgatcaccctggtgcgcagcggcggcaaccaggtgagaagaagagtgctgctgagcagccggctgctgcaggatgaccggcgggtgacccccacctgccacagcagcaccagcgagccccgctgcagcagatttgatcctgatggcagcggcagccctgccacctgggacaactttggcatctgggacaacagaattgatgagcccatcctgctgccccccagcatcaagtatggcaagcccatccccaagatcagcctggagaatgtgggctgtgccagccagatcggcaagaggaaagaaaatgaagatagatttgattttgcccagctgacagatgaggtgctgtactttgctgtgtatgatggccatggaggccctgctgctgctgacttctgccacacccacatggagaagtgcatcatggacctgctgcccaaggagaagaacctggagaccctgctgaccctggccttcctggagattgacaaggccttcagcagccacgcccggctgtctgcagatgagaactgtgcctggagcgctgccctggacctggagcctgtggacaccatctgtggggcctctgtggagcgggagatctgcctgatcctgagccaggtgaaggagagcagcggcagctacccaggcctgcgggagggcagccacatcagcctgagccactag

SEQ ID NO: 278128 - DNA, 702 bp, Artificial Sequence
  derived and/or modified sequence
atgagcaccgccgccctgatcaccctggtgcggagcggcggcaaccaagtaagacggagggtcctgctgtctagcaggctgctgcaagacgatcgccgcgtgacaccaacatgtcactcctcgacatcagagccccggtgctcacgattcgaccctgatggctccggatctccagctacctgggacaacttcggaatctgggacaaccggattgatgagcccatacttctgccgccaagtattaagtacgggaaacctatccctaagatttctctggaaaacgttggatgcgcttcacagatcgggaaaaggaaggaaaatgaagaccgctttgatttcgcccagctgaccgacgaggtgctgtacttcgcagtctacgacggtcacggaggccctgccgcagccgacttttgccacacacacatggagaaatgcattatggatctgttacctaaagagaaaaatcttgaaacgttgctcaccctggcttttctggagattgataaagcattctcctcgcacgcgcggctaagtgccgatgagaattgcgcctggtcagccgcactcgacctcgagcctgttgataccatctgtggtgcgagtgtggaaagagaaatttgtctaattctgagccaagtcaaagagtcttcagggtcctaccccggactgagagagggaagtcatatcagtctatcccattag

SEQ ID NO: 278129 - DNA, 702 bp, Artificial Sequence
  derived and/or modified sequence
atgagcaccgccgccctgatcaccctggtgcggagcggcggcaaccaggtgaggcgtagagttctcctgagctctcgtctcctgcaggacgatcgacgggtcactcccacttgccactctagtaccagcgaacctcgatgttcccggttcgaccctgacgggtccggcagtccggccacttgggataacttcgggatctgggataataggattgacgagccaatcttgttgcccccttccattaagtatggcaagcctatccccaagatctcgctggaaaatgttggatgtgcttcccagattggaaaacgaaaggagaacgaggataggtttgacttcgctcaactaacggacgaagttttatatttcgccgtatatgacggccatgggggccctgctgcggccgacttctgccacactcacatggaaaagtgtattatggatctccttccgaaggaaaagaacctggaaaccctcctgaccctggctttccttgaaatcgataaggcgttttcaagtcacgcaaggctgtcagccgatgagaactgcgcatggtccgccgcgctcgacctcgagccagttgacaccatttgtggtgcgtcggttgagagagaaatttgcctgatcctctcacaggtcaaagagtctagcggaagttacccggggttacgtgagggcagccacatctccttgagtcattag

SEQ ID NO: 278130 - DNA, 702 bp, Artificial Sequence
  derived and/or modified sequence
atgtccaccgcagctctgatcacactggtgagaagtgggggtaaccaggtgcgacgtcgagtcctgctgagctctcggctgctgcaggatgaccggagggttacccctacatgccacagcagcactagcgaacctaggtgctcccgcttcgacccggacggcagcgggtctcccgctacatgggacaattttggtatctgggataataggatcgatgaacctatcttgcttccaccctctattaaatatggtaaaccaatcccgaaaattagcttggagaacgtaggttgcgcttctcagatcgggaaaaggaaggaaaacgaagacaggttcgactttgctcagctcaccgatgaggtactgtacttcgccgtttatgatggtcacgggggacccgctgctgctgatttctgccacacacacatggaaaagtgcatcatggatctcttgcccaaggagaagaatctagagactttgcttacacttgctttcctggaaattgataaggctttttcctcccacgcacgtctatctgcagatgaaaattgcgcctggagcgctgctctggatctggaaccagtcgataccatttgtggagcgtctgtcgagcgggagatctgtctcatcctttctcaggtcaaagagagcagtggcagttatccaggcctccgcgaaggaagccacatcagccttagccactag

SEQ ID NO: 278131 - DNA, 702 bp, Artificial Sequence
  derived and/or modified sequence
atgtcgactgcggctctgatcaccttggtacgatcgggtggcaaccaagttaggcgccgagtgctattatccagtcggctcctccaagatgatcgaagagtcacacctacatgtcattctagcacatccgaacccaggtgttcgcggtttgatccggatggcagtggatcccctgccacctgggataacttcggcatctgggataatcggattgacgaaccaatcctactcccaccatcaatcaaatacggcaagcccatacccaagattagtcttgaaaacgttggctgtgcgtcacagatcggaaagaggaaggagaatgaagatcggttcgatttcgcccagttaaccgatgaggtcctatattttgccgtgtacgatggccacgggggacctgcagcagccgatttttgccacactcatatggagaagtgtattatggacttattaccaaaagagaaaaacctggagacgctgctcacattggcatttctggaaatcgataaagccttttcctcacacgctagactgtctgcagacgagaactgcgcctggagcgcagctcttgacctggaacccgtcgacacaatttgcggcgcttccgtagaaagggagatttgtctcattttatcccaggtgaaagaaagttccgggtcctatccgggactgagggagggctcacatatctcattgagccattag

SEQ ID NO: 278132 - DNA, 1092 bp, Artificial Sequence
  derived and/or modified sequence
gtcaaatagcagccgcggggaggctcgttcccatcggcatctgtgactggctgcgatcgagggcccgggcggccggccagccgtctcgccgagtgcggactggccggatctgctgtcagtcagcgggaacagacttctccctctccatctggtcaactgcgggagaaaaattttcgagaatttccagcaggcaaggcagtggccgctttgactgcttgcttcggagatccgagacgacggagaaggcactcttatttaccgaccaagaaagctcctcccccgtcctccgttagctaattaaaacatttttcagggacgtagccatccagagacattccattattgttccattgacctttccctcatcactgagtcctttggagctgagttatgtcaacagctgccttaattactttggtcagaagtggtgggaaccaggtgagaaggagagtgctgctaagctcccgcctgctgcaggacgacaggcgggtgacacccacgtgccacagctccacttcagagcctaggtgttctcggtttgacccagatggtagtgggagtccagctacctgggacaattttgggatctgggataaccgcattgatgagccaattctgctgccacccagcattaagtatggcaagccaattcccaaaatcagcttggaaaatgtggggtgcgcctcacagattggcaaacggaaagagaatgaagatcggtttgacttcgctcagctgacagatgaggtcctgtactttgcagtgtatgatggacacggtggacctgcagcagctgatttctgtcatacccacatggagaaatgtattatggatttgcttcctaaggagaagaacttggaaactctgttgaccttggcttttctagaaatagataaagccttttcgagtcatgcccgcctgtctgctgatgagaactgtgcctggtcagcagctctagacctggagcccgtggacactatatgcggggcttcagtggaaagagagatctgcttaattttgtcccaggtgaaggagtccagcggttcctatcctggactacgggaaggttcccacatctctttgtcccattag

SEQ ID NO: 278133 - DNA, 1091 bp, Artificial Sequence
  derived and/or modified sequence
gagaatttccagcaggcaaggcagtggccgctttgactgcttgcttcggagatccgagacgacggagaaggcactcttatttaccgaccaagaaagctcctcccccgtcctccgttagctaattaaaacatttttcagggacgtagccatccagagacattccattattgttccattgacctttccctcatcactgagtcctttggagctgagttatgtcaacagctgccttaattactttggtcagaagtggtgggaaccaggtgagaaggagagtgctgctaagctcccgcctgctgcaggacgacaggcgggtgacacccacgtgccacagctccacttcagagcctaggtgttctcggtttgacccagatggtagtgggagtccagctacctgggacaattttgggatctgggataaccgcattgatgagccaattctgctgccacccagcattaagtatggcaagccaattcccaaaatcagcttggaaaatgtggggtgcgcctcacagattggcaaacggaaagagaatgaagatcggtttgacttcgctcagctgacagatgaggtcctgtactttgcagtgtatgatggacacggtggacctgcagcagctgatttctgtcatacccacatggagaaatgtattatggatttgcttcctaaggagaagaacttggaaactctgttgaccttggcttttctagaaatagataaagccttttcgagtcatgcccgcctgtctgctgatgagaactgtgcctggtcagcagctctagacctggagcccgtggacactatatgcggggcttcagtggaaagagagatctgcttaattttgtcccaggtgaaggagtccagcggttcctatcctggactacgggaaggttcccacatctctttgtcccattagttgagatgacttgcagtagaaattgtccacaactcttctgacctctgggactactgcaacagtagccctattgcgagatggtattgaactggttgtagccagtgttggggacagccgggctattttgtgtagaaaaggaaaacccatgaagctgaccattgaccatactccaga

SEQ ID NO: 278134 - DNA, 702 bp, Artificial Sequence
  derived and/or modified sequence
atgagcaccgccgccctgatcaccctggtgagaagcggcggcaaccaggtgagaagaagagtgctgctgagcagcagactgctgcaggacgacagaagagtgacccccacctgccacagcagcaccagcgagcccagatgcagcagattcgaccccgacggcagcggcagccccgccacctgggacaacttcggcatctgggacaacagaatcgacgagcccatcctgctgccccccagcatcaagtacggcaagcccatccccaagatcagcctggagaacgtgggctgcgccagccagatcggcaagagaaaggagaacgaggacagattcgacttcgcccagctgaccgacgaggtgctgtacttcgccgtgtacgacggccacggcggccccgccgccgccgacttctgccacacccacatggagaagtgcatcatggacctgctgcccaaggagaagaacctggagaccctgctgaccctggccttcctggagatcgacaaggccttcagcagccacgccagactgagcgccgacgagaactgcgcctggagcgccgccctggacctggagcccgtggacaccatctgcggcgccagcgtggagagagagatctgcctgatcctgagccaggtgaaggagagcagcggcagctaccccggcctgagagagggcagccacatcagcctgagccactag

SEQ ID NO: 278135 - protein, 98 aa, Artificial Sequence
  derived and/or modified sequence
MSEVSCKKRDDYLEWPEYFMAVAFLSAQRSKDPNSQVGACIVNSENKIVGIGYNGMPNGCSDDVLPWRRTAENKLDTKYPYVCHAELNAIMNKNSTDV

SEQ ID NO: 278136 - DNA, 1972 bp, Artificial Sequence
  derived and/or modified sequence
tgaacaccgccggccggaccgcgggctgcgtcacggggaccgggaggcgtacggcgacgcggagcagcgcctttgcggcgtgcgacccgcccccgccgtccctccctccctcccctcagggcttcgggcccccggggccagccgccgtcctgcgaacgcgcggcgcccgggccgctgcccccttccggccccgcggcggccccgcctcctcccccgacttccttccctgagcacggcggcggcggggacgagcaccggcctgcgcgcggagccggcaccggatgacccaacatgagtgaagtttcctgcaagaaacgggacgactatttggaatggccagagtattttatggctgtggccttcttatcagcacagagaagcaaagatccaaattcccaggtcggcgcctgcatcgtgaattcagaaaacaagattgtcgggattgggtacaatgggatgccaaatgggtgcagtgatgacgtgttgccttggagaaggacagcagagaataagctggacaccaaatacccgtacgtgtgccatgcggagctgaatgccatcatgaacaaaaattcgaccgatgtgaaaggctgtagtatgtatgttgccttgttcccttgtaatgaatgcgctaagctcatcatccaggcaggtataaaagaagtgattttcatgtctgataaataccatgatagtgacgaggcaactgctgcgaggctcctgtttaatatggccggggtgacattccggaaattcataccgaagtgcagcaagattgtcattgactttgattcaattaacagcagaccgagtcaaaagcttcagtgagttacatctcattcaatctccagaagattgggattatcgtcttctaagaggttgctaatgcctttcatcttgaagttacacataacttcttactagccagtatggcaaaagtaggcatctaaagaatataaagcctcaaatcttccttactgtctctcttgtcacatggaatctacatgtgtttgaactattgctttagggtttaaaataggggagcctgtggtggcctggtgcacagggctagaacgagagtgcctccccttcttgtgtcctggctggctgggatgctggtggctcttcagaggagcatcagctgtctgtcatctgctgcgatccggcagcctctcttcactgctacatgtgctggaaggacaaataaataattgtggttgtgttcttaatggggacgagcagacacactgatctgaacatctggcccaagtgaagcatggcatatagtgcccttggaagaaaattaggcctcaaatgacagtagcattgaagtgtttgctgcagagttgagggaaacccccagccaccctcccggaatccgagatagggtggcacatctgtcctgacagacgaggagtgtaactgaaccaggaatatttcctccattcctgctctcccactgcacacagggtggtggcacattatccctctggggggtggggacgcctgttgttttggctcaatttgggtttgttggtcacatggagctcttccatttcgtttagctgaataatgagttgttcctagaggagacagcctgtctctccttgttgcccccaaagcccatgccctgccgtggtggcagctggggctgtggatgggaggggtccccaacatggatgtgttgcccctcctccgcatgccaacgcagttcatgtacaaggcccctctgcaactggagagaaaattaattcctatcccgtgagtggattgtgagaaattccacccacgtggagacagcttactgcagcactgttggtgttcggagctcttctgtgccctggctccatgctttcacctacacaagcatcaccttcctaatcaccgcggggcggggagcgtgtggctgtgccccttctctttaatctcatttaatttttattaaacatgctcagtacctgtgttgagaaaa

SEQ ID NO: 278137 - DNA, 578 bp, Artificial Sequence
  derived and/or modified sequence
accggccaagggtccccacggggacgctgcgacacagcgggctcactccagagacccaaaccagacccaacatgagtgaagtttcctgcaagaaacgggacgactatttggaatggccagagtattttatggctgtggccttcttatcagcacagagaagcaaagatccaaattcccaggtcggcgcctgcatcgtgaattcagaaaacaagattgtcgggattgggtacaatgggatgccaaatgggtgcagtgatgacgtgttgccttggagaaggacagcagagaataagctggacaccaaatacccgtacgtgtgccatgcggagctgaatgccatcatgaacaaaaattcgaccgatgtgaaaggctgtagtatgtatgttgccttgttcccttgtaatgaatgcgctaagctcatcatccaggcaggtataaaagaagtgattttcatgtctgataaataccatgatagtgacgaggcaactgctgcgaggctcctgtttaatatggccggggtgacattccggaaattcataccgaagtgcagcaagattgtcattgactttgattcaatt

SEQ ID NO: 278138 - DNA, 896 bp, Artificial Sequence
  derived and/or modified sequence
gctgccgggcgggggcctggggccgcggacgctgggggcgcctcggccgcgctcagcctttagatcggagaatgcgggcggggtgggggcgctcggggtccccgcagtcactccagggtcgatttctcggcgggcgccgcggcctgtgcgaggccgggccccttggagtgccccgggaggtggtgctgggcgtctgaacaccacatcccttcctgcgcccgtgtgtgggttgggaatgccgggtgtaggccctggatcagagctgacggggttgcgagcggcgtggggtgtgcctgggacggtgaccggatgtgtcttcctgaatcgttgtattcgagctccagttctctctgtttctacagctgggcctcagtcctcacagggctctagtgggcgttcagccacaccaggagaaggcgcccaggggattaacaggacccttccctctcctgctcttccctcgccccccatggctccccctccctcctatttagtaggtacttctccagcaccccacagcgatgatggatgctggccctaaagccaggcactgccgccctgcactgtagcagatgcctaaataaagtgtggagcctgaagcagaagttttgggagatgcttgccttcctttagaccacattcctcgcctttctcaagatttctccgtgacccaacatgagtgaagtttcctgcaagaaacgggacgactatttggaatggccagagtattttatggctgtggccttcttatcagcacagagaagcaaagatccaaattcccaggtcggcgcctgcatcgtgaattcagaaaacaagattgtcgggattgggtacaatgggatgccaaatgggtgcagtgatgacgtgttgccttggagaaggacagcagagaataa

SEQ ID NO: 278139 - DNA, 1027 bp, Artificial Sequence
  derived and/or modified sequence
tggcaccgtcccgagcgcgtggcgcggggcgctggctgccgggcgggggcctggggccgcggacgctgggggcgcctcggccgcgctcagcctttagatcggagaatgcgggcggggtgggggcgctcggggtccccgcagtcactccagggtcgatttctcggcgggcgccgcggcctgtgcgaggccgggccccttggagtgccccgggaggtggtgctgggcgtctgaacaccacatcccttcctgcgcccgtgtgtgggttgggaatgccgggtgtaggccctggatcagagctgacggggttgcgagcggcgtggggtgtgcctgggacggtgaccggatgtgtcttcctgaatcgttgtattcgagctccagttctctctgtttctacagctgggcctcagtcctcacagggctctagtgggcgttcagccacaccaggagaaggcgcccaggggattaacaggacccttccctctcctgctcttccctcgccccccatggctccccctccctcctatttagtaggtacttctccagcaccccacagcgatgatggatgctggccctaaagccaggcactgccgccctgcactgtagcagatgcctaaataaagtgtggagcctgaagcagaagttttgggagatgcttgccttcctttagaccacattcctcgcctttctcaagatttctccgtggtacccaccccgtttttgtgttgtcttccttccttgcccttgtttcattccttttgaaagcgaccactcccctgaagtcctaggacccccttcgtgggctctccctgccgtagacagtctctgcttgcccctgggagacagacccaacatgagtgaagtttcctgcaagaaacgggacgactatttggaatggccagagtattttatggctgtggccttcttatcagcacagagaagcaaagatccaaattcccaggtcggcgcctgcatcgtgaattcagaaaacaagattgtcgggattgggtacaatgggatgccaaatggg

SEQ ID NO: 278140 - DNA, 332 bp, Artificial Sequence
  derived and/or modified sequence
gcgaacgcgcggcgcccgggccgctgcccccttccggccccgcggcggccccgcctcctcccccgacttccttccctgagcacggcggcggcggggacgagcaccggcctgcgcgcggagccggcaccggatggcactgccgccctgcactgtagcagatgcctaaataaagtgtggagcctgaagcagaagttttgggagatgcttgccttcctttagaccacattcctcgcctttctcaagatttctccgtgacccaacatgagtgaagtttcctgcaagaaacgggacgactatttggaatggccagagtattttatggctgtggcctt

SEQ ID NO: 278141 - DNA, 592 bp, Artificial Sequence
  derived and/or modified sequence
atcgttgtattcgagctccagttctctctgtttctacagctgggcctcagtcctcacagggctctagtgggcgttcagccacaccaggagaaggcgcccaggggattaacaggacccttccctctcctgctcttccctcgccccccatggctccccctccctcctatttagtaggtacttctccagcaccccacagcgatgatggatgctggccctaaagccagacccaacatgagtgaagtttcctgcaagaaacgggacgactatttggaatggccagagtattttatggctgtggccttcttatcagcacagagaagcaaagatccaaattcccaggtcggcgcctgcatcgtgaattcagaaaacaagattgtcgggattgggtacaatgggatgccaaatgggtgcagtgatgacgtgttgccttggagaaggacagcagagaataagctggacaccaaatacccgtacgtgtgccatgcggagctgaatgccatcatgaacaaaaattcgaccgatgtgaaaggctgtagtatgtatgttgccttgttcccttgtaatgaatgcgctaagctcatcatccaggcag

SEQ ID NO: 278142 - DNA, 794 bp, Artificial Sequence
  derived and/or modified sequence
ctcctcccccgacttccttccctgagcacggcggcggcggggacgagcaccggcctgcgcgcggagccggcaccggatggtgggcgggggccagccgtgcgggcactgccgccctgcactgtagcagatgcctaaataaagtgtggagcctgaagcagaagttttgggagatgcttgccttcctttagaccacattcctcgcctttctcaagatttctccgtgacccaacatgagtgaagtttcctgcaagaaacgggacgactatttggaatggccagagtattttatggctgtggccttcttatcagcacagagaagcaaagatccaaattcccaggtcggcgcctgcatcgtgaattcagaaaacaagattgtcgggattgggtacaatgggatgccaaatgggtgcagtgatgacgtgttgccttggagaaggacagcagagaataagctggacaccaaatacccgtacgtgtgccatgcggagctgaatgccatcatgaacaaaaattcgaccgatgtgaaaggctgtagtatgtatgttgccttgttcccttgtaatgaatgcgctaagctcatcatccaggcaggtataaaagaagtgattttcatgtctgataaataccatgatagtgacgaggcaactgctgcgaggctcctgtttaatatggccggggtgacattccggaaattcataccgaagtgcagcaagattgtcattgactttgattcaattaacagcagaccgagtcaaaagcttcagtgagttacatctcattcaatctccagaaga

SEQ ID NO: 278143 - DNA, 683 bp, Artificial Sequence
  derived and/or modified sequence
agggcttcgggcccccggggccagccgccgtcctgcgaacgcgcggcgcccgggccgctgcccccttccggccccgcggcggccccgcctcctcccccgacttccttccctgagcacggcggcggcggggacgagcaccggcctgcgcgcggagccggcaccggatggtgggcgggggccagccgtgcgggcactgccgccctgcactgtagcagatgcctaaataaagtgtggagcctgaagcagaagttttgggagatgcttgccttcctttagaccacattcctcgcctttctcaagatttctccgtgggagacagacccaacatgagtgaagtttcctgcaagaaacgggacgactatttggaatggccagagtattttatggctgtggccttcttatcagcacagagaagcaaagatccaaattcccaggtcggcgcctgcatcgtgaattcagaaaacaagattgtcgggattgggtacaatgggatgccaaatgggtgcagtgatgacgtgttgccttggagaaggacagcagagaataagctggacaccaaatacccgtacgtgtgccatgcggagctgaatgccatcatgaacaaaaattcgaccgatgtgaaaggctgtagtatgtatgttgccttgttcccttgtaatgaatgcgctaagctcatcatccag

SEQ ID NO: 278144 - DNA, 645 bp, Artificial Sequence
  derived and/or modified sequence
ggttgccaggcctctcagatgtggggcagcgtaatcagtgggtgaccgtggttcccagcacccactctccactgcatccttgtcttaggcactgccgccctgcactgtagcagatgcctaaataaagtgtggagcctgaagcagaagttttgggagatgcttgccttcctttagaccacattcctcgcctttctcaagatttctccgtggtacccaccccgtttttgtgttgtcttccttccttgcccttgtttcattccttttgaaagcgaccactcccctgaagtcctaggacccccttcgtgggctctccctgccgtagacagtctctgcttgcccctgacccaacatgagtgaagtttcctgcaagaaacgggacgactatttggaatggccagagtattttatggctgtggccttcttatcagcacagagaagcaaagatccaaattcccaggtcggcgcctgcatcgtgaattcagaaaacaagattgtcgggattgggtacaatgggatgccaaatgggtgcagtgatgacgtgttgccttggagaaggacagcagagaataagctggacaccaaatacccgtacgtgtgccatgcggagctgaatgccatcatgaacaaaaattcgaccgatgtgaa

SEQ ID NO: 278145 - protein, 765 aa, Artificial Sequence
  derived and/or modified sequence
MASTRSIELEHFEERDKRPRPGSRRGAPSSSGGSSSSGPKGNGLIPSPAHSAHCSFYRTRTLQALSSEKKAKKARFYRNGDRYFKGLVFAISSDRFRSFDALLIELTRSLSDNVNLPQGVRTIYTIDGSRKVTSLDELLEGESYVCASNEPFRKVDYTKNINPNWSVNIKGGTSRALAAASSVKSEVKESKDFIKPKLVTVIRSGVKPRKAVRILLNKKTAHSFEQVLTDITEAIKLDSGVVKRLCTLDGKQVTCLQDFFGDDDVFIACGPEKFRYAQDDFVLDHSECRVLKSSYSRSSAVKYSGSKSPGPSRRSKSPASVNGTPSSQLSTPKSTKSSSSSPTSPGSFRGLKISAHGRSSSNVNGGPELDRCISPEGVNGNRCSESSTLLEKYKIGKVIGDGNFAVVKECIDRSTGKEFALKIIDKAKCCGKEHLIENEVSILRRVKHPNIIMLVEEMETATELFLVMELVKGGDLFDAITSSTKYTERDGSAMVYNLANALRYLHGLSIVHRDIKPENLLVCEYPDGTKSLKLGDFGLATVVEGPLYTVCGTPTYVAPEIIAETGYGLKVDIWAAGVITYILLCGFPPFRSENNLQEDLFDQILAGKLEFPAPYWDNITDSAKELISQMLQVNVEARCTAGQILSHPWVSDDASQENNMQAEVTGKLKQHFNNALPKQNSTTTGVSVIMNTALDKEGQIFCSKHCQDSGRPGMEPISPVPPSVEEIPVPGEAVPAPTPPESPTPHPPPAAPGGERAGTWRRHRD

SEQ ID NO: 278146 - DNA, 2298 bp, Artificial Sequence
  derived and/or modified sequence
atggccagtacaagatccatcgaactggaacattttgaggagagagacaaacgaccccggcccggttcccgacgcggcgccccctcttccagcggaggcagttcctcaagtggtccaaaggggaatggactcataccctctcccgctcattccgcgcactgcagcttttaccgaacacggactcttcaagccctaagcagtgaaaagaaagccaagaaagcccgcttttaccgcaatggtgaccggtattttaaaggccttgtgttcgccatctccagtgatcggttcagaagctttgacgcactcctgatcgaattgacgcggtcgctcagcgataacgttaatttaccccagggcgttcgaactatctacactatagacggatcccgcaaggttacttcactagacgaactgctcgaaggggagtcctatgtctgcgcaagcaacgaaccttttcgcaaagtggactacactaaaaacattaatccaaattggagtgtaaacatcaaggggggaacatctcgtgcgttggccgctgcttcctcagtgaagagcgaggtgaaagaatcaaaggatttcataaaacccaaacttgtaactgtgatccgttccggggtgaagccaaggaaggcggtgcgtatcttactgaacaaaaagactgcccacagttttgagcaggtattaactgacatcacagaagcgatcaaattggactcgggtgtggtgaagcgcctgtgcactctagacggtaaacaggtgacctgtctgcaggacttttttggagatgatgatgtgttcattgcatgtggccctgagaagttcaggtatgcccaggacgacttcgtgcttgaccatagcgaatgcagggttctgaagagctcatactctcggagcagcgctgtaaaatactctggcagcaagagccccggcccctctagacggtctaaatcgcctgccagtgtgaatggtacaccatcatctcagttaagcacacccaaatcaaccaagagttcgtcctcatcccccacaagtccaggttcatttaggggtctgaaaatatccgcccatgggagaagctcatcaaacgtgaatggaggacctgaattagatagatgcatttctcctgaaggggtgaatggaaatagatgtagcgagtccagcaccctgcttgaaaaatacaagataggtaaggttattggagatggcaacttcgctgtcgtaaaggaatgtattgacagatccactggtaaagagttcgctctcaagattatcgacaaggcgaaatgctgtgggaaggaacatctcatcgaaaatgaagtctccattctccgccgagttaaacatcccaatataataatgctcgtcgaagaaatggagaccgccacggaactgtttctcgtaatggagctcgtgaaaggtggggacttattcgacgctattacgtccagcacaaagtacacagagcgggatggctcagcaatggtgtacaatctggctaacgcgttaagatacctgcacgggctgtcaattgtgcatcgggatattaagccagaaaacctcttggtctgtgaataccctgacggaacgaaaagcttgaaattgggagatttcggactggcaactgtcgtggaaggccctctctataccgtgtgcggcacccccacgtacgttgctcccgagatcatcgccgaaactggatatgggctgaaggtcgacatttgggcggccggcgttattacatacatactgttatgtgggttcccaccttttcggagcgagaataacctccaggaagatctgttcgaccagatcttagctggaaaattggagtttcccgctccctactgggataatattacggattctgccaaggagctgatttctcagatgctgcaggtcaacgtagaagctcggtgtacagcgggccagatcctgtcgcacccgtgggtgagcgacgacgcctctcaggaaaacaatatgcaggcagaggtgaccggcaaactgaaacagcactttaataacgcccttcctaagcagaattcaaccacgaccggtgtgagcgtgatcatgaatacggccctggataaggaaggccaaatcttctgcagcaagcactgtcaagattctgggcgacctggtatggaaccaataagtcccgtgccacccagcgtggaggagattcctgtaccgggcgaggcagtccccgctccaacacctccagaatctcccacacctcatcctcccccagcagctccgggtggggaaagagcaggaacatggcggaggcaccgagactag

SEQ ID NO: 278147 - DNA, 2298 bp, Artificial Sequence
  derived and/or modified sequence
atggccagcaccaggagcattgagctggagcactttgaggagcgggacaagaggcccaggcctggcagccggcggggggcccccagcagcagcggcggcagcagcagcagcggccccaagggaaatggcctcatccccagccctgcccacagcgcccactgcagcttctaccgcaccaggaccctgcaggccctgagcagcgagaagaaggccaagaaggcccgcttctacagaaatggagaccgctacttcaagggcctggtgtttgccatcagcagtgaccgcttccgcagctttgatgccctgctgattgagctgaccaggagcctgagtgacaacgtgaacctgccccagggcgtgaggaccatctacaccattgatggcagcaggaaggtgaccagcctggatgagctgctggagggggagagctatgtgtgtgccagcaatgagcccttcaggaaggtggactacaccaagaacatcaaccccaactggagcgtgaacatcaagggcggcaccagccgggccctggccgccgccagctctgtgaagtctgaggtgaaggagagcaaggacttcatcaagcccaagctggtgaccgtcatccgcagcggcgtgaagcccaggaaggctgtgcgcatcctgctgaacaagaagacagcccacagctttgagcaggtgctgacagacatcacagaggccatcaagctggacagcggcgtggtgaagaggctgtgcaccctggatggcaagcaggtgacctgcctgcaggacttctttggagatgatgatgtgttcatcgcctgtggccctgagaagttccgctatgcccaggatgactttgtgctggaccacagtgaatgtcgggtgctgaagagcagctacagccgcagcagcgctgtgaagtacagcggcagcaagagccctggccccagcagaagaagcaagagccctgcctctgtgaatggcacccccagcagccagctgagcacccccaagagcaccaagagcagcagcagcagccccaccagccctggcagcttccggggcctgaagatcagcgcccacggccgcagcagcagcaatgtgaatggaggccctgagctggaccgctgcatcagccctgagggcgtgaatggaaaccgctgcagcgagagcagcaccctgctggagaagtacaagattggcaaggtgattggagatggcaactttgctgtggtgaaggaatgtattgacaggagcacaggcaaggagtttgccctgaagatcatcgacaaggccaagtgctgcggcaaggagcacctgattgaaaatgaggtgtccatcctgcggcgggtgaagcaccccaacatcatcatgctggtggaggagatggagacagccacagagctgttcctggtgatggagctggtgaagggcggggacctgtttgatgccatcaccagcagcaccaagtacacagaaagagatggcagcgccatggtgtacaacctggccaatgccctgcgctacctgcacggcctgagcatcgtgcaccgggacatcaagccagagaacctgctggtgtgtgagtacccagatggcaccaagagcctgaagctgggggactttggcctggccaccgtggtggagggccccctgtacacagtgtgtggcacccccacctacgtggcccctgagatcatcgccgagaccggctacggcctgaaggtggacatctgggccgccggggtcatcacctacatcctgctgtgtggcttcccccccttccgctctgagaacaacctgcaggaggacctgtttgaccagatcctggccggcaagctggagttccctgccccctactgggacaacatcacagacagcgccaaggagctgatcagccagatgctgcaggtgaatgtggaggcccgctgcacagctggccagatcctgagccacccctgggtgtctgatgatgccagccaggagaacaacatgcaggccgaggtgacaggcaagctgaagcagcacttcaacaatgccctgcccaagcagaacagcaccaccaccggggtgtctgtcatcatgaacacagccctggacaaggagggccagatcttctgcagcaagcactgccaggacagcggccggcccggcatggagcccatcagccctgtgcccccatctgtggaggagatccctgtgcctggagaggccgtgcctgcccccaccccacctgagagccccaccccccaccccccacctgctgcccctggaggagagagagctggcacctggaggaggcaccgggactag

SEQ ID NO: 278148 - DNA, 2298 bp, Artificial Sequence
  derived and/or modified sequence
atggccagcacccggagcatcgagctggagcacttcgaggagcgggataaacgacctagacctggaagcagacggggcgcgccatcatcaagcggaggctcctcaagctctggcccgaagggcaatgggctcattccatcacccgcccactctgcacactgttctttctatcgtactcggacacttcaggccctatcttcggagaagaaagctaagaaagccagattctataggaacggagatcggtatttcaaaggactggtcttcgccataagctccgatcgctttcggtccttcgacgctcttcttattgagctgacaaggtccctctccgacaacgttaaccttccacagggcgtccgtactatatataccatagacggcagccgaaaagtgacctccctggacgagctcttggaaggagagtcatatgtgtgcgctagtaacgagccctttcgaaaggtggactacacgaagaacatcaacccgaactggagcgtcaatattaagggcggaacatcacgagcattggctgcagcctcttccgtaaaaagcgaagtgaaggaatccaaagactttattaagccgaagctggtgacagttattcgctcaggtgtgaaaccccgtaaggccgtgaggattcttttgaacaagaaaacagctcatagttttgagcaagttctgaccgatatcactgaggcaataaagctcgactctggtgtcgtgaagagactttgcaccctagatggtaagcaggttacgtgcctgcaagatttcttcggcgatgatgatgtgttcatagcgtgtggccctgagaagttcaggtatgctcaagacgactttgtgctcgaccactccgaatgtagagtgttaaagagttcatatagccgatcttcagccgtgaagtatagcgggtccaaatcccctggtccttcccgcaggtccaagtcccctgccagcgtcaatggcacacctagttcacagctatccacaccgaaatccactaaaagcagtagtagttcccctacgtcccccgggtcattccgagggcttaagatcagcgctcacgggcggagctcgtctaatgtcaacgggggccctgaactggaccggtgcataagtccagagggggtgaacggcaatcggtgcagtgagagtagcacacttctggaaaagtacaaaatcggcaaagttatcggggatgggaatttcgcagttgtgaaggagtgcattgatcggtccacaggcaaggaattcgccctgaaaatcatcgataaagcaaagtgctgtggaaaagaacatctgatcgagaatgaagtttccatcctgaggcgcgtgaagcaccctaatatcattatgcttgttgaggaaatggaaaccgcaacggaactgttcctggtgatggaactggtgaaaggcggggacttattcgacgcgattaccagctctacaaaatatactgaacgcgatgggagtgccatggtatacaatctggcgaacgctctgcgctatctgcacggcctgtcaatcgttcacagggacatcaaaccagaaaacctccttgtttgcgaataccctgacggtactaagagcctgaagctcggagacttcggactggccacagtcgtcgaaggaccactttacaccgtctgcgggactcccacctatgtagcccctgagattattgcggaaactgggtacggcctcaaggtcgacatctgggctgccggggtgattacctatatcctgctgtgtggtttccccccttttagatctgaaaacaatctgcaagaggacctcttcgatcagattctggcaggaaaacttgaatttccggctccatattgggataacattactgacagcgccaaggaactaatcagtcagatgcttcaggtcaatgtggaagctcgatgcactgcaggacagatcttgtcacacccctgggtctctgacgatgcaagtcaggaaaacaacatgcaggcagaagtaaccggaaagcttaaacagcacttcaacaacgctctgccaaaacagaacagcaccacaaccggagtttcagtgattatgaacactgccctggacaaggagggccagatcttttgcagcaaacattgccaagactcaggtcggccgggcatggaacccatcagccccgttcctcctagtgtagaggaaattcccgttcctggggaagctgtgcccgcacccactccaccggagagcccaacaccccatcctcctcccgcagcgcctggaggcgagagagccgggacttggcgccgccatagggactag

SEQ ID NO: 278149 - DNA, 2298 bp, Artificial Sequence
  derived and/or modified sequence
atggccagtacacggtctattgagctcgagcatttcgaggagcgtgataaaaggcccagaccaggatcaagacgtggagctccaagctcctccggtggctccagctcatccggtcccaagggaaacggactaatcccgtcccccgcacactcagcccactgctcattttaccgcacccggacacttcaagcacttagtagcgagaaaaaagctaagaaagctcggttctacagaaacggggaccgctacttcaaggggctggtcttcgccatttcaagcgaccgctttcggagcttcgacgctctcctgatcgagcttactcgctctctgagcgacaatgttaacctgccacagggggttcgaaccatatatacaattgatggctcaagaaaagtaacatcgttagatgagctgctggagggcgagtcttacgtctgcgctagcaatgaaccattccggaaagtggactacaccaaaaacataaacccaaactggtcagtgaatatcaagggaggcacctcacgagcgcttgccgcagccagctccgtgaagtccgaggttaaagagtcgaaagactttattaagccaaagctcgtcactgtgataagatccggggtaaagccacgaaaggcagtgcgcatactgctgaataaaaagactgctcactcattcgaacaggtcctcacagatattactgaggccataaagctggattctggggttgtgaagcgcctttgcacgctagacggtaaacaggttacttgcctgcaggacttcttcggagatgacgacgtgtttattgcctgcggtcccgagaagtttcggtatgctcaggacgattttgtcctcgatcactctgaatgcagggtgctgaaaagttcatactcccgttcttctgctgtcaaatattctgggtctaaaagtccaggaccatctagacgatcgaaatctcctgctagtgtcaacggcacacccagcagtcagctgagtactccaaagtcaaccaagagttcctctagcagtcctacctcgcctgggtctttcaggggactaaagatcagcgctcacggcaggtcttctagcaacgtcaatggcggacccgagctggaccgctgtatctcccctgaaggcgtcaacggaaaccggtgctccgagagctccaccctactggagaaatacaaaatcggtaaagtcatcggagacggaaatttcgccgttgtgaaagagtgcattgacagatcgacaggaaaggagtttgcccttaaaattatcgacaaagccaagtgctgcgggaaggagcacctgattgagaacgaggtgagcatcttaagacgagtaaaacatcccaacatcataatgttggtggaggaaatggaaaccgcgactgagctttttctggtaatggagctcgtaaaggggggagacctgtttgatgccattaccagctccaccaagtacaccgagagggacggttctgcaatggtctacaacctcgcgaacgctctgaggtatttgcacggcttaagtattgtgcaccgggatataaagcctgagaacctattggtgtgcgagtaccctgacggcacgaaatccctaaagctgggcgactttggcctcgcaacagttgtggaaggcccattgtatacggtctgcggaactcctacgtatgtggcacccgagatcattgccgagacaggatacgggctcaaggtcgacatctgggccgcaggtgtcatcacctacatcctgctgtgcgggtttcccccattcagaagcgaaaacaacctacaggaggatctgtttgaccaaattctggcaggtaagctggagttcccagctccttattgggacaatattaccgacagcgctaaggaattaattagccaaatgcttcaggtcaacgtggaagccagatgcacagcgggtcagattctatcacacccgtgggtctctgacgatgcttcacaagagaacaacatgcaagccgaggtaaccggtaagttgaaacaacattttaataatgccctccccaagcagaattcgactacgaccggcgtaagtgttattatgaacactgcactggataaggaaggccagatcttttgcagcaagcactgccaggatagcgggcgacctggaatggagcctattagcccagtgccgccttctgtcgaggagatccccgtccccggagaggctgtgccagccccaacacctccagaaagtccaactccccatcctccaccagcagcaccaggcggtgagagagcgggaacctggcgcaggcacagagattag

SEQ ID NO: 278150 - DNA, 2298 bp, Artificial Sequence
  derived and/or modified sequence
atggccagcaccagaagcatcgagctggagcacttcgaggagagagacaagagacccagacccggcagcagaagaggcgcccccagcagcagcggcggcagcagcagcagcggccccaagggcaacggcctgatccccagccccgcccacagcgcccactgcagcttctacagaaccagaaccctgcaggccctgagcagcgagaagaaggccaagaaggccagattctacagaaacggcgacagatacttcaagggcctggtgttcgccatcagcagcgacagattcagaagcttcgacgccctgctgatcgagctgaccagaagcctgagcgacaacgtgaacctgccccagggcgtgagaaccatctacaccatcgacggcagcagaaaggtgaccagcctggacgagctgctggagggcgagagctacgtgtgcgccagcaacgagcccttcagaaaggtggactacaccaagaacatcaaccccaactggagcgtgaacatcaagggcggcaccagcagagccctggccgccgccagcagcgtgaagagcgaggtgaaggagagcaaggacttcatcaagcccaagctggtgaccgtgatcagaagcggcgtgaagcccagaaaggccgtgagaatcctgctgaacaagaagaccgcccacagcttcgagcaggtgctgaccgacatcaccgaggccatcaagctggacagcggcgtggtgaagagactgtgcaccctggacggcaagcaggtgacctgcctgcaggacttcttcggcgacgacgacgtgttcatcgcctgcggccccgagaagttcagatacgcccaggacgacttcgtgctggaccacagcgagtgcagagtgctgaagagcagctacagcagaagcagcgccgtgaagtacagcggcagcaagagccccggccccagcagaagaagcaagagccccgccagcgtgaacggcacccccagcagccagctgagcacccccaagagcaccaagagcagcagcagcagccccaccagccccggcagcttcagaggcctgaagatcagcgcccacggcagaagcagcagcaacgtgaacggcggccccgagctggacagatgcatcagccccgagggcgtgaacggcaacagatgcagcgagagcagcaccctgctggagaagtacaagatcggcaaggtgatcggcgacggcaacttcgccgtggtgaaggagtgcatcgacagaagcaccggcaaggagttcgccctgaagatcatcgacaaggccaagtgctgcggcaaggagcacctgatcgagaacgaggtgagcatcctgagaagagtgaagcaccccaacatcatcatgctggtggaggagatggagaccgccaccgagctgttcctggtgatggagctggtgaagggcggcgacctgttcgacgccatcaccagcagcaccaagtacaccgagagagacggcagcgccatggtgtacaacctggccaacgccctgagatacctgcacggcctgagcatcgtgcacagagacatcaagcccgagaacctgctggtgtgcgagtaccccgacggcaccaagagcctgaagctgggcgacttcggcctggccaccgtggtggagggccccctgtacaccgtgtgcggcacccccacctacgtggcccccgagatcatcgccgagaccggctacggcctgaaggtggacatctgggccgccggcgtgatcacctacatcctgctgtgcggcttcccccccttcagaagcgagaacaacctgcaggaggacctgttcgaccagatcctggccggcaagctggagttccccgccccctactgggacaacatcaccgacagcgccaaggagctgatcagccagatgctgcaggtgaacgtggaggccagatgcaccgccggccagatcctgagccacccctgggtgagcgacgacgccagccaggagaacaacatgcaggccgaggtgaccggcaagctgaagcagcacttcaacaacgccctgcccaagcagaacagcaccaccaccggcgtgagcgtgatcatgaacaccgccctggacaaggagggccagatcttctgcagcaagcactgccaggacagcggcagacccggcatggagcccatcagccccgtgccccccagcgtggaggagatccccgtgcccggcgaggccgtgcccgcccccaccccccccgagagccccaccccccaccccccccccgccgcccccggcggcgagagagccggcacctggagaagacacagagactag

SEQ ID NO: 278151 - DNA, 2298 bp, Artificial Sequence
  derived and/or modified sequence
atggccagcaccaggagtatcgagctggagcactttgaggaacgggacaaaaggccgcggccggggtcgcggagaggggcccccagctcctccgggggcagcagcagctcgggccccaaggggaacgggctcatccccagtccggcgcacagtgcccactgcagcttctaccgcacgcggaccctgcaggccctcagctcggagaagaaggccaagaaggcgcgcttctaccggaacggggaccgctacttcaagggcctggtgtttgccatctccagcgaccgcttccggtccttcgatgcgctcctcatagagctcacccgctccctgtcggacaacgtgaacctgccccagggtgtccgcactatctacaccatcgacggcagccggaaggtcaccagcctggacgagctgctggaaggtgagagttacgtgtgtgcatccaatgaaccatttcgtaaagtcgattacaccaaaaatattaatccaaactggtctgtgaacatcaagggtgggacatcccgagcgctggctgctgcctcctctgtgaaaagtgaagtaaaagaaagtaaagatttcatcaaacccaagttagtgactgtgattcgaagtggagtgaagcctagaaaagccgtgcggatccttctgaataaaaagactgctcattcctttgaacaagtcttaacagatatcaccgaagccattaaactagactcaggagtcgtcaagaggctctgcaccctggatggaaagcaggttacttgtctgcaagacttttttggtgatgacgatgtttttattgcatgtggaccagaaaaatttcgttatgcccaagatgactttgtcctggatcatagtgaatgtcgtgtcctgaagtcatcttattctcgatcctcagctgttaagtattctggatccaaaagccctgggccctctcgacgcagcaaatcaccagcttcagttaatggaactcccagcagccaactttctactcctaaatctacgaaatcctccagttcctctccaactagtccaggaagtttcagaggattaaagatttctgctcatggcagatcttcttccaatgtaaacggtggacctgagcttgaccgttgcataagtcctgaaggtgtgaatggaaacagatgctctgaatcatcaactcttcttgagaaatacaaaattggaaaggtcattggtgatggcaattttgcagtagtcaaagagtgtatagacaggtccactggaaaggagtttgccctaaagattatagacaaagccaaatgttgtggaaaggaacacctgattgagaatgaagtgtcaatactgcgccgagtgaaacatcccaatatcattatgctggtcgaggagatggaaacagcaactgagctctttctggtgatggaattggtcaaaggtggagatctctttgatgcaattacttcgtcgaccaagtacactgagagagatggcagtgccatggtgtacaacttagccaatgccctcaggtatctccatggcctcagcatcgtgcacagagacatcaaaccagagaatctcttggtgtgtgaatatcctgatggaaccaagtctttgaaactgggagactttgggcttgcgactgtggtagaaggccctttatacacagtctgtggcacacccacttatgtggctccagaaatcattgctgaaactggctatggcctgaaggtggacatttgggcagctggtgtgatcacatacatacttctctgtggattcccaccattccgaagtgagaacaatctccaggaagatctcttcgaccagatcttggctgggaagctggagtttccggccccctactgggataacatcacggactctgccaaggaattaatcagtcaaatgcttcaggtaaatgttgaagctcggtgtaccgcgggacaaatcctgagtcacccctgggtgtcagatgatgcctcccaggagaataacatgcaagctgaggtgacaggtaaactaaaacagcactttaataatgcgctccccaaacagaacagcactaccaccggggtctccgtcatcatgaacacggctctagataaggaggggcagattttctgcagcaagcactgtcaagacagcggcaggcctgggatggagcccatctctccagttcctccctcagtggaggagatccctgtgcctggggaagcagtcccggcccccacccctccggaatctcccaccccccaccctcctcccgctgccccgggtggtgagcgggcaggaacctggcgccgccaccgagactga

SEQ ID NO: 278152 - protein, 593 aa, Artificial Sequence
  derived and/or modified sequence
MTSAVVDSGGTILELSSNGVENQEESEKVSEYPAVIVEPVPSARLEQGYAAQVLVYDDETYMMQDVAEEQEVETENVETVEASVHSSNAHCTDKTIEAAEALLHMESPTCLRDSRSPVEVFVPPCVSTPEFIHAAMRPDVITETVVEVSTEESEPMDTSPIPTSPDSHEPMKKKKVGRKPKTQQSPISNGSPELGIKKKPREGKGNTTYLWEFLLDLLQDKNTCPRYIKWTQREKGIFKLVDSKAVSKLWGKHKNKPDMNYETMGRALRYYYQRGILAKVEGQRLVYQFKDMPKNIVVIDDDKSETCNEDLAGTTDEKSLERVSLSAESLLKAASSVRSGKNSSPINCSRAEKGVARVVNITSPGHDASSRSPTTTASVSATAAPRTVRVAMQVPVVMTSLGQKISTVAVQSVNAGAPLITSTSPTTATSPKVVIQTIPTVMPASTENGDKITMQPAKIITIPATQLAQCQLQTKSNLTGSGSINIVGTPLAVRALTPVSIAHGTPVMRLSMPTQQASGQTPPRVISAVIKGPEVKSEAVAKKQEHDVKTLQLVEEKPADGNKTVTHVVVVSAPSAIALPVTMKTEGLVTCEK

SEQ ID NO: 278153 - DNA, 1782 bp, Artificial Sequence
  derived and/or modified sequence
atgaccagcgccgtggtggacagcggcggcaccatcctggagctgagcagcaacggcgtggagaaccaggaggagagcgagaaggtgagcgagtaccccgccgtgatcgtggagcccgtgcccagcgccagactggagcagggctacgccgcccaggtgctggtgtacgacgacgagacctacatgatgcaggacgtggccgaggagcaggaggtggagaccgagaacgtggagaccgtggaggccagcgtgcacagcagcaacgcccactgcaccgacaagaccatcgaggccgccgaggccctgctgcacatggagagccccacctgcctgagagacagcagaagccccgtggaggtgttcgtgcccccctgcgtgagcacccccgagttcatccacgccgccatgagacccgacgtgatcaccgagaccgtggtggaggtgagcaccgaggagagcgagcccatggacaccagccccatccccaccagccccgacagccacgagcccatgaagaagaagaaggtgggcagaaagcccaagacccagcagagccccatcagcaacggcagccccgagctgggcatcaagaagaagcccagagagggcaagggcaacaccacctacctgtgggagttcctgctggacctgctgcaggacaagaacacctgccccagatacatcaagtggacccagagagagaagggcatcttcaagctggtggacagcaaggccgtgagcaagctgtggggcaagcacaagaacaagcccgacatgaactacgagaccatgggcagagccctgagatactactaccagagaggcatcctggccaaggtggagggccagagactggtgtaccagttcaaggacatgcccaagaacatcgtggtgatcgacgacgacaagagcgagacctgcaacgaggacctggccggcaccaccgacgagaagagcctggagagagtgagcctgagcgccgagagcctgctgaaggccgccagcagcgtgagaagcggcaagaacagcagccccatcaactgcagcagagccgagaagggcgtggccagagtggtgaacatcaccagccccggccacgacgccagcagcagaagccccaccaccaccgccagcgtgagcgccaccgccgcccccagaaccgtgagagtggccatgcaggtgcccgtggtgatgaccagcctgggccagaagatcagcaccgtggccgtgcagagcgtgaacgccggcgcccccctgatcaccagcaccagccccaccaccgccaccagccccaaggtggtgatccagaccatccccaccgtgatgcccgccagcaccgagaacggcgacaagatcaccatgcagcccgccaagatcatcaccatccccgccacccagctggcccagtgccagctgcagaccaagagcaacctgaccggcagcggcagcatcaacatcgtgggcacccccctggccgtgagagccctgacccccgtgagcatcgcccacggcacccccgtgatgagactgagcatgcccacccagcaggccagcggccagaccccccccagagtgatcagcgccgtgatcaagggccccgaggtgaagagcgaggccgtggccaagaagcaggagcacgacgtgaagaccctgcagctggtggaggagaagcccgccgacggcaacaagaccgtgacccacgtggtggtggtgagcgcccccagcgccatcgccctgcccgtgaccatgaagaccgagggcctggtgacctgcgagaagtag

SEQ ID NO: 278154 - DNA, 1782 bp, Artificial Sequence
  derived and/or modified sequence
atgacatccgccgtagtggatagtggtggtaccatcttagagctgagctctaacggggtggagaatcaagaagagagcgaaaaggtttccgaatatccagctgtaatcgtcgagccagtgccaagcgctcgtttagagcagggctacgcagcacaggtgttggtttatgacgatgagacatacatgatgcaagacgtcgccgaggaacaagaggtggaaacagaaaatgtcgagaccgttgaagcctccgtacactctagtaacgcccactgcacagataaaacgatcgaagccgctgaggctctcctgcacatggaatcaccaacttgtctccgggatagtcgcagccccgtagaagtctttgtgcccccttgcgtctcgacccctgagttcattcacgccgccatgcgtcccgacgtaattaccgagactgtggttgaagtgagcactgaagagtctgaacctatggatacctccccgatccctaccagcccagactcccatgaacctatgaagaaaaagaaggtgggtcgtaaacccaagacccagcagagccccataagcaatggatcccctgagctgggcattaagaaaaagcctagagaaggtaagggaaacaccacctacctgtgggaatttctgttagatctgttgcaggataaaaatacatgcccaagatatataaagtggactcagcgcgagaagggtatctttaaattggtcgattccaaggccgtctctaagctgtggggaaagcacaaaaacaaaccagatatgaattacgaaactatgggacgtgctctgaggtactattatcagcgaggcattctcgcaaaggtggagggacagcgcctcgtgtaccagtttaaggacatgcccaaaaacatcgtagtgatcgatgatgacaaatcagagacctgcaatgaggacctggccggcacgactgatgagaagtccctggagcgtgtatcactgtcagctgagtccctccttaaggccgccagcagcgtgaggagtggcaaaaacagctcaccaatcaactgtagtagggccgagaagggggtggcccgtgttgttaatattacaagccctgggcatgacgcttccagccgcagcccaacaactacggcgtcagtgagcgcaacagcggcacctcgcaccgttcgagtggcgatgcaagttcccgttgtgatgacctccctcgggcagaaaatttccaccgtggctgtccagtccgtgaatgccggagctcccctaattactagcacttcccccaccactgcaacctcccccaaggtcgtcatccagacaatacctacagtgatgccagcctcgacggaaaacggagataagattacgatgcagcccgctaagataattacaattccagcaacccagctcgcccaatgccaactccagacaaaatcaaacttaacaggatccggatccataaacattgttggtactccgctcgccgtgcgggcactaactcctgtgtcaattgcccacggcacccccgtgatgcgactgagcatgcccacacagcaggcctccggacagactccgcctcgcgtgatttctgctgtaattaagggcccagaagtgaagtcagaagcagtagctaagaaacaggaacacgatgtgaaaactttgcagctggtcgaagaaaagcctgccgacgggaataagaccgtgactcacgtggtagtggtgagtgctccatctgccatagctctccctgtgacaatgaaaacagagggactggtcacgtgtgagaagtag

SEQ ID NO: 278155 - DNA, 3254 bp, Artificial Sequence
  derived and/or modified sequence
aaaatagtgaaggatgcttagactacttaacatacaaactgctttctggttaatcatctttagaagactggatttctggatatctactccactccatctctattgacttttaaaacatgataatgcaaacctataacactggcaaccatcagtgaacctttaatttcattgattaatagcgtttgaagcttcctcagggaataacaatgacatcagcagtggttgacagtggaggtactattttggagctttccagcaatggagtagaaaatcaagaggaaagtgaaaaggtttctgaatatccagcagtgattgtggagccagttccaagtgccagattagagcagggctatgcagcccaggttctggtttatgatgatgagacttatatgatgcaagatgtggcagaagaacaagaagttgagaccgagaatgtggaaacagtggaagcatcagttcacagcagtaatgcacactgtacagataagacaattgaagctgctgaagccctgcttcatatggaatctcctacctgcttgagggattcaagaagtcctgtggaagtgtttgttcctccttgtgtatcaactccagaattcatccatgctgctatgaggccagatgtcattacagaaactgtagtggaggtgtcaactgaagagtctgaacccatggatacctctcctattccaacatcaccagatagccatgaaccaatgaaaaagaaaaaagttggccgtaaaccaaagacccagcaatcaccaatttccaatgggtctcctgagttaggtataaagaagaaaccaagagaaggaaaaggaaacacaacctatttgtgggagtttcttttagatctacttcaagataaaaatacttgtcccaggtatattaaatggactcagagagaaaaaggcatattcaagctggtggattcaaaggctgtctctaagctttggggaaagcataagaacaaaccagacatgaactatgaaaccatgggacgagctttgagatactactaccaaaggggaattcttgcaaaggttgaaggacagaggcttgtatatcagttcaaggatatgccgaaaaacatagtggtcatagatgatgacaaaagtgaaacctgtaatgaagatttagcaggaactactgatgaaaaatcattagaacgagtgtcactgtctgcagaaagtctcctgaaagcagcatcctctgttcgcagtggaaaaaattcatcccctataaactgctccagagcagagaagggtgtagctagagttgtgaatatcacttcccctgggcacgatgcttcatccaggtctcctactaccactgcatctgtgtcagcaacagcagctccaaggacagttcgtgtggcaatgcaggtacctgttgtaatgacatcattgggtcagaaaatttcaactgtggcagttcagtcagttaatgcaggtgcaccattaataaccagcactagtccaacaacagcgacctctccaaaggtagtcattcagacaatccctactgtgatgccagcttctactgaaaatggagacaaaatcaccatgcagcctgccaaaattattaccatcccagctacacagcttgcacagtgtcaactgcagacaaagtcaaatctgactggatcaggaagcattaacattgttggaaccccattggctgtgagagcacttacccctgtttcaatagcccatggtacacctgtaatgagactatcaatgcctactcagcaggcatctggccagactcctcctcgagttatcagtgcagtcataaaggggccagaggttaaatcggaagcagtggcaaaaaagcaagaacatgatgtgaaaactttgcagctagtagaagaaaaaccagcagatggaaataagacagtgacccacgtagtggttgtcagtgcgccttcagctattgcccttcctgtaactatgaaaacagaaggactagtgacatgtgagaaataaaatagcagctccaccatggacttcaggctgttagtggcagtactgacataaacatttgcaagggaagtcatcaagaaaagtcaaagaagactttaaaacatttttaatgcatatacaaaaacaatcagacttactggaaataaattacctatcccatgtttcagtgggaaatgaactacatattgagatgctgacagaaaactgcctcttacagtaggaaacaactgaacccatcaataagaaaaaggatcgaaagggaccaagcagctcactacgatatcaagttacactaagacttggaacactaacattctgtaagaggttatatagttttcagtgggaggggttgggatgggtaatctcattgttacatatagcaatttttgatgcattttatatgcataccagcaattattactgtgttcgcacagttctcacttaactggtgctatgtgaagactctgctaatataggtattttagaatgtgaattgaagaatggatcccaaaaacttcagaaagaggatagcaaaaaaagatctagtgcgattttatatatatatatatatatatatacatacatatatatatatcatatagcttaagctgatttaaaacaaaggccttagactaattttcgattttctttcttgaaataagctaatggcttgtttgtgtaaagcttttttattaaaagaaaaattttaaaaatcttgtacctagcacagtattgttatagaatatacatgtaacattttatatggtagtttaagtctgtcagtttcttaattgtggacaaattaacagttggctctggccttttgctgtaacatgcctgtgtcactcacttagccttggcatttgtgcagacataccattttcagttctgctgtcacttggaagttcaggctcagcatgaatttttggcaggtagctctaatacctggagttttctttgtttttttttcttttttttagttgaagtttatgagggaaataccagtgttcagttttgaactataatagtttgtatattcaacatttgaagtatattctattttgttgtactcttgtttcaaagtgtattcaagtaggttttctgaaatatagaaatgaaatttatcttctgttttggtctctggtgatattttaaacaatatttaaaagtcagtatagaagtgttttagttaggaagtgataaaacatctctcttctccttcccaactactgcatgaagaaattctacttccattatattaatatttgg

SEQ ID NO: 278156 - DNA, 1782 bp, Artificial Sequence
  derived and/or modified sequence
atgaccagcgctgtggtggacagcggcggcaccatcctggagctgagcagcaatggagtggagaaccaggaggagagcgagaaggtgtctgagtacccagctgtgattgtggagcctgtgcccagcgcccggctggagcagggctacgccgcccaggtgctggtgtatgatgatgagacctacatgatgcaggatgtggccgaggagcaggaggtggagacagaaaatgtggagaccgtggaggcctctgtgcacagcagcaatgcccactgcacagacaagaccatcgaggccgctgaggccctgctgcacatggagagccccacctgcctgcgggacagccgcagccctgtggaggtgtttgtgcccccctgtgtgtccaccccagagttcatccacgccgccatgaggccagatgtgatcacagagaccgtggtggaggtgtccacagaggagagcgagcccatggacaccagccccatccccaccagcccagacagccatgagcccatgaagaagaagaaggtgggcaggaagcccaagacccagcagagccccatcagcaatggcagccctgagctgggcatcaagaagaagccccgggagggcaagggcaacaccacctacctgtgggagttcctgctggacctgctgcaggacaagaacacctgcccccgctacatcaagtggacccagcgggagaagggcatcttcaagctggtggacagcaaggctgtgtccaagctgtggggcaagcacaagaacaagccagacatgaactatgagaccatgggccgggccctgcgctactactaccagaggggcatcctggccaaggtggagggccagaggctggtgtaccagttcaaggacatgcccaagaacatcgtggtgattgatgatgacaagtctgagacctgcaatgaagacctggccggcaccacagatgagaagagcctggagcgggtgtccctgtctgctgagagcctgctgaaggccgccagctctgtgcgcagcggcaagaacagcagccccatcaactgcagcagagctgagaagggcgtggcccgggtggtgaacatcaccagccctggccatgatgccagcagccgcagccccaccaccacagcctctgtgtctgccacagctgcccccaggacagtgcgggtggccatgcaggtgcctgtggtgatgaccagcctgggccagaagatcagcacagtggccgtgcagagcgtgaatgctggggcccccctcatcaccagcaccagccccaccacagccaccagccccaaggtggtgatccagaccatccccaccgtgatgcctgccagcacagaaaatggagacaagatcaccatgcagcctgccaagatcatcaccatcccagccacccagctggcccagtgccagctgcagaccaagagcaacctgactggaagtggcagcatcaacatcgtgggcacccccctggccgtgcgggccctgacccctgtgtccatcgcccacggcacccctgtgatgaggctgtccatgcccacccagcaggccagcggccagaccccacccagggtcatctctgctgtgatcaagggccctgaggtgaagtctgaggccgtggccaagaagcaggagcatgatgtgaagaccctgcagctggtggaggagaagccagcagatggcaacaagacagtgacccacgtggtggtggtgtctgcccccagcgccatcgccctgcctgtgaccatgaagacagagggcctggtgacctgtgagaagtag

SEQ ID NO: 278157 - DNA, 1782 bp, Artificial Sequence
  derived and/or modified sequence
atgaccagcgccgtggtggacagcggcggcaccatcctggagctgtcctccaacggagtggagaaccaggaggaatcagagaaagtgtccgaatatcctgctgtgatcgtggaacccgtcccatccgcgcgactggagcagggttacgcagcacaggtcctcgtctatgacgacgagacctacatgatgcaggatgtggctgaggaacaggaggtggagacggagaacgtggaaacagtggaagccagtgtgcatagctctaacgctcactgcaccgacaaaaccatcgaagccgcagaggcgcttctgcacatggagagtccaacatgcctgagagacagccgctcgccggtcgaggttttcgtgccgccctgcgtgagtaccccggagttcatccacgctgcgatgcgcccagacgtgataaccgagacggtggtggaagtatccacggaggagagtgaacccatggatacatccccaattcctacgtccccagactctcacgagccaatgaagaagaagaaagtgggcagaaagcctaaaacgcaacagtcaccgattagtaacggctctccggagcttgggataaagaaaaagccccgagagggcaagggcaatacgacgtacctgtgggagttccttctggaccttctccaggataagaacacatgtcccaggtacataaaatggactcagcgggagaaaggcatattcaagcttgtggatagcaaggcagtgtccaagctttggggtaaacacaagaacaagcccgacatgaactacgagaccatggggagagccctgaggtactactatcaacgcggtattctcgccaaagtggagggacagagactggtttaccagttcaaggacatgcctaagaatattgtggtgatagatgatgataagagcgaaacctgcaatgaagacctggccggaaccaccgacgagaagtccctggaacgcgtttccttaagtgccgaatctcttctgaaagccgcctcctccgtccgctcgggtaaaaatagcagtcctatcaattgctctcgcgccgaaaagggcgtagcccgagttgtgaacatcacttcccccggccacgatgcctccagccgctctcctacgacgaccgcctctgtgtctgcaaccgccgcaccgcgcactgtgagggtagctatgcaggtccccgtggtaatgacctctctggggcagaaaatctctacggtcgcggtgcagtctgttaatgcgggcgctcccctgatcacaagtacgtctcctacaacagctacatccccaaaagtggttattcagaccatcccaacggtcatgcctgcatcaacagagaatggggacaaaatcaccatgcagcctgctaagattatcactatccctgctactcaactagctcagtgtcagttacaaactaagtctaatcttaccggttctggctccatcaatattgtgggcacgccccttgccgtcagagccctgaccccggtctcgatcgcccacggcacgccagtcatgaggctgagcatgccaacccagcaggcttccgggcagacccctcctagagttatatctgcagtcattaagggccccgaggtcaagtcagaagctgtcgctaagaagcaagagcacgacgtgaagacattacagcttgtggaagagaagccagccgatgggaacaaaaccgtgacccacgttgtggtagtctccgccccttcagctattgccctgccagtgacgatgaagacagaagggcttgtaacatgcgaaaagtag

SEQ ID NO: 278158 - DNA, 1782 bp, Artificial Sequence
  derived and/or modified sequence
atgacctcagctgtggtggatagtggaggcacaatactcgaattatcaagtaatggtgtagaaaatcaggaagagtccgagaaagtgtccgaatacccagccgtgatcgtcgagcccgtacctagtgccaggctggaacaaggctatgcagcccaggtgttggtctacgacgatgaaacctacatgatgcaggacgttgccgaagaacaagaggtagagactgagaacgtggaaacagtcgaggcctccgtgcattccagtaacgctcactgcaccgataaaactatcgaggccgctgaggctctgttgcacatggaatcacccacttgcctccgcgattccaggagcccagtggaggtctttgtcccgccttgtgtttctactcccgagttcattcacgctgccatgcgcccagatgtgattaccgagacggtggtcgaggtcagcaccgaagaatctgaaccaatggataccagccctattcctacctcaccagactcgcatgaaccaatgaaaaaaaaaaaggttggcagaaagccgaagacacagcagtctcccatttcaaatggctccccagaacttgggatcaagaagaagcccagagaagggaaaggaaataccacctacctctgggagtttctgctagaccttttgcaagacaagaacacttgtcctcgatacattaaatggactcaacgagagaaaggcatctttaagttggttgactcgaaagccgtgagtaagctctggggcaagcataagaataaacccgacatgaactatgagacaatgggcagagccttacgctattactatcaacggggtatcctcgcaaaagtcgagggacagcggttagtgtaccagttcaaggatatgcccaagaacattgtggtgattgatgacgacaagagcgagacctgcaacgaggatttggcaggtaccaccgatgagaaaagcctggagcgggtgtcgctgagcgcagagtcattattgaaagccgcaagttccgtgaggagtgggaagaacagctcccctataaactgcagccgggcagaaaagggggtagccagggtagttaacattacttctcccggtcacgatgccagcagcagatcgcctacgactaccgcatccgtgtctgcaacagccgctccgaggactgtcagggtcgccatgcaggttcccgtggtcatgacatcactggggcaaaagatcagtaccgttgcagttcagtccgtcaacgccggagctccgctgattacaagcacgagccctaccacggccaccagtcctaaggtggtcatccagacaatccccacagtgatgccagcttctacagagaacggagataaaattaccatgcagccagctaaaatcattactattcccgcaactcagctcgctcaatgccagctgcagacaaaatcaaatcttaccggcagtggctctataaatatcgtgggaaccccactcgccgtgcgagcgctgacaccagtgagcattgcgcacggcactcctgttatgcggcttagcatgcccacccagcaggcttcggggcagactccaccaagagtgatcagtgccgtgattaagggccctgaagtcaaaagtgaagctgtagctaagaaacaagaacatgatgtcaaaacactgcagttagtggaggagaaaccagcagacgggaataagaccgtcactcatgtggtcgtggtgagcgcaccctccgctatcgcgctgccggtaaccatgaaaacagaaggactggtcacttgtgaaaaatag

SEQ ID NO: 278159 - protein, 396 aa, Artificial Sequence
  derived and/or modified sequence
MSVIVFKGNTTYLWEFLLDLLQDKNTCPRYIKWTQREKGIFKLVDSKAVSKLWGKHKNKPDMNYETMGRALRYYYQRGILAKVEGQRLVYQFKDMPKNIVVIDDDKSETCNEDLAGTTDEKSLERVSLSAESLLKAASSVRSGKNSSPINCSRAEKGVARVVNITSPGHDASSRSPTTTASVSATAAPRTVRVAMQVPVVMTSLGQKISTVAVQSVNAGAPLITSTSPTTATSPKVVIQTIPTVMPASTENGDKITMQPAKIITIPATQLAQCQLQTKSNLTGSGSINIVGTPLAVRALTPVSIAHGTPVMRLSMPTQQASGQTPPRVISAVIKGPEVKSEAVAKKQEHDVKTLQLVEEKPADGNKTVTHVVVVSAPSAIALPVTMKTEGLVTCEK

SEQ ID NO: 278160 - DNA, 1191 bp, Artificial Sequence
  derived and/or modified sequence
atgagcgtgatcgtgttcaagggcaacaccacctacctgtgggagttcctgctggacctgctgcaggacaagaacacctgccccagatacatcaagtggacccagagagagaagggcatcttcaagctggtggacagcaaggccgtgagcaagctgtggggcaagcacaagaacaagcccgacatgaactacgagaccatgggcagagccctgagatactactaccagagaggcatcctggccaaggtggagggccagagactggtgtaccagttcaaggacatgcccaagaacatcgtggtgatcgacgacgacaagagcgagacctgcaacgaggacctggccggcaccaccgacgagaagagcctggagagagtgagcctgagcgccgagagcctgctgaaggccgccagcagcgtgagaagcggcaagaacagcagccccatcaactgcagcagagccgagaagggcgtggccagagtggtgaacatcaccagccccggccacgacgccagcagcagaagccccaccaccaccgccagcgtgagcgccaccgccgcccccagaaccgtgagagtggccatgcaggtgcccgtggtgatgaccagcctgggccagaagatcagcaccgtggccgtgcagagcgtgaacgccggcgcccccctgatcaccagcaccagccccaccaccgccaccagccccaaggtggtgatccagaccatccccaccgtgatgcccgccagcaccgagaacggcgacaagatcaccatgcagcccgccaagatcatcaccatccccgccacccagctggcccagtgccagctgcagaccaagagcaacctgaccggcagcggcagcatcaacatcgtgggcacccccctggccgtgagagccctgacccccgtgagcatcgcccacggcacccccgtgatgagactgagcatgcccacccagcaggccagcggccagaccccccccagagtgatcagcgccgtgatcaagggccccgaggtgaagagcgaggccgtggccaagaagcaggagcacgacgtgaagaccctgcagctggtggaggagaagcccgccgacggcaacaagaccgtgacccacgtggtggtggtgagcgcccccagcgccatcgccctgcccgtgaccatgaagaccgagggcctggtgacctgcgagaagtag

SEQ ID NO: 278161 - DNA, 1191 bp, Artificial Sequence
  derived and/or modified sequence
atgagtgtgatcgtctttaagggaaacactacctacctctgggaatttttgctggacctgttgcaggataagaatacgtgtcctagatatataaagtggacccaaagggagaagggaatatttaaactggtcgattctaaagccgtttctaagctctgggggaagcataagaacaagcctgacatgaactatgaaacaatgggtcgggccctgcggtattactatcaaaggggcatcctcgcgaaggttgagggacagagactagtctaccagtttaaagatatgcccaaaaacatcgttgtgattgacgacgacaagagcgaaacttgtaatgaagacttggccggtactactgacgaaaaatctctagagcgagtcagcctctctgcggagtctctgctgaaggcagcttcatccgttaggagtgggaagaattcctcccctatcaactgttcgcgggcagaaaagggagtcgctcgcgttgttaacatcacaagtccaggacacgacgcctcttcccgctcacccactaccactgctagcgtctccgccacggcagcaccgcggaccgttcgggtcgccatgcaggtcccagtggtgatgacctctctgggccagaagattagtacggtagcagtgcagtccgtaaatgccggggcccctctgataacttcaacttccccaactacagctaccagcccgaaagtggtgattcagaccatcccaaccgtgatgcccgctagcaccgaaaatggcgataagattactatgcagcctgctaagataattactatacctgctactcaattggctcaatgccagctacagaccaagtctaatctcaccggatccggatccattaacattgtggggacaccccttgcagtgagagcgctgacccccgtcagcattgctcacggaacacctgtgatgaggctgtcgatgccaacccaacaagcttccggtcaaaccccccctcgagtgatctcagccgtgatcaaaggtccagaggttaaatccgaagccgtcgctaagaaacaagaacatgacgtcaaaaccctgcagctggtggaggagaagccggctgacgggaacaagactgtcacccatgtggtggtggtctcagccccgtccgcaatcgcactgccagtaaccatgaaaactgaaggactggtaacatgcgaaaaatag

SEQ ID NO: 278162 - DNA, 1835 bp, Artificial Sequence
  derived and/or modified sequence
attttaaggaattaccatatttttccattttaggacctcagaatttaagatataagtatatataatgaaatcctttaaacattatcttccgtctattgggtgtaatcagtagaaagcgattagaaaatttttttaaatctgtttttagaggcagtaatgttcttttttctttcttttttcctgtgacagggtttcactctgtcgcccaggctgggcgacagagcaagactccgtctccaaaaaaaaaaaaagtagaaacaagtatattcaggatttttatgatacaatgaaggacactttatttgcttttaattatgtatttaattatgttaatgaattttaatcaatgtctgtcattgtttttaaaggaaacacaacctatttgtgggagtttcttttagatctacttcaagataaaaatacttgtcccaggtatattaaatggactcagagagaaaaaggcatattcaagctggtggattcaaaggctgtctctaagctttggggaaagcataagaacaaaccagacatgaactatgaaaccatgggacgagctttgagatactactaccaaaggggaattcttgcaaaggttgaaggacagaggcttgtatatcagttcaaggatatgccgaaaaacatagtggtcatagatgatgacaaaagtgaaacctgtaatgaagatttagcaggaactactgatgaaaaatcattagaacgagtgtcactgtctgcagaaagtctcctgaaagcagcatcctctgttcgcagtggaaaaaattcatcccctataaactgctccagagcagagaagggtgtagctagagttgtgaatatcacttcccctgggcacgatgcttcatccaggtctcctactaccactgcatctgtgtcagcaacagcagctccaaggacagttcgtgtggcaatgcaggtacctgttgtaatgacatcattgggtcagaaaatttcaactgtggcagttcagtcagttaatgcaggtgcaccattaataaccagcactagtccaacaacagcgacctctccaaaggtagtcattcagacaatccctactgtgatgccagcttctactgaaaatggagacaaaatcaccatgcagcctgccaaaattattaccatcccagctacacagcttgcacagtgtcaactgcagacaaagtcaaatctgactggatcaggaagcattaacattgttggaaccccattggctgtgagagcacttacccctgtttcaatagcccatggtacacctgtaatgagactatcaatgcctactcagcaggcatctggccagactcctcctcgagttatcagtgcagtcataaaggggccagaggttaaatcggaagcagtggcaaaaaagcaagaacatgatgtgaaaactttgcagctagtagaagaaaaaccagcagatggaaataagacagtgacccacgtagtggttgtcagtgcgccttcagctattgcccttcctgtaactatgaaaacagaaggactagtgacatgtgagaaataaaatagcagctccaccatggacttcaggctgttagtggcagtactgacataaacatttgcaagggaagtcatcaagaaaagtcaaagaagactttaaaacatttttaatgcatatacaaaaacaatcagacttactggaaataaattacctatcccatgtttcagtgggaaatgaactacatattgagatgctgacagaaaactgcctcttacagtaggaaacaactgaacccatcaataagaaaaaggatcgaaagggaccaagcagctcactacgatatcaagttacactaagactt

SEQ ID NO: 278163 - DNA, 1191 bp, Artificial Sequence
  derived and/or modified sequence
atgtctgtcatcgtgttcaagggcaacaccacctacctgtgggagttcctgctggacctgctgcaggacaagaacacctgcccccgctacatcaagtggacccagcgggagaagggcatcttcaagctggtggacagcaaggctgtgtccaagctgtggggcaagcacaagaacaagccagacatgaactatgagaccatgggccgggccctgcgctactactaccagaggggcatcctggccaaggtggagggccagaggctggtgtaccagttcaaggacatgcccaagaacatcgtggtgattgatgatgacaagtctgagacctgcaatgaagacctggccggcaccacagatgagaagagcctggagcgggtgtccctgtctgctgagagcctgctgaaggccgccagctctgtgcgcagcggcaagaacagcagccccatcaactgcagcagagctgagaagggcgtggcccgggtggtgaacatcaccagccctggccatgatgccagcagccgcagccccaccaccacagcctctgtgtctgccacagctgcccccaggacagtgcgggtggccatgcaggtgcctgtggtgatgaccagcctgggccagaagatcagcacagtggccgtgcagagcgtgaatgctggggcccccctcatcaccagcaccagccccaccacagccaccagccccaaggtggtgatccagaccatccccaccgtgatgcctgccagcacagaaaatggagacaagatcaccatgcagcctgccaagatcatcaccatcccagccacccagctggcccagtgccagctgcagaccaagagcaacctgaccggcagcggcagcatcaacatcgtgggcacccccctggccgtgcgggccctgacccctgtgtccatcgcccacggcacccctgtgatgaggctgtccatgcccacccagcaggccagcggccagaccccacccagggtcatctctgctgtgatcaagggccctgaggtgaagtctgaggccgtggccaagaagcaggagcatgatgtgaagaccctgcagctggtggaggagaagccagcagatggcaacaagacagtgacccacgtggtggtggtgtctgcccccagcgccatcgccctgcctgtgaccatgaagacagagggcctggtgacctgtgagaagtag

SEQ ID NO: 278164 - DNA, 1191 bp, Artificial Sequence
  derived and/or modified sequence
atgagcgtgatcgtgttcaagggcaacaccacctacctgtgggagttcctccttgacctcttgcaggataaaaacacatgtcctagatatatcaagtggacacaacgcgaaaaagggatttttaagctcgtcgacagcaaagcagtgtcgaagctgtggggtaagcacaaaaataagccagacatgaattacgagaccatgggccgggcactgagatattactatcaaagggggattctggcgaaagtggagggccagagactggtctatcagttcaaggacatgccaaagaacatcgttgtgattgatgacgataagtccgaaacctgcaacgaagatctcgccggaactactgatgaaaagagccttgagagagtttccctgagcgccgagtcactgttaaaagctgcatcatctgttaggagcggaaagaatagtagccccatcaattgtagtcgggcggaaaagggagttgctcgggtggtgaacatcacctctcccggtcacgatgcctcgtcacgtagccccaccactaccgcgagcgtctcagctactgccgccccacgaacagtcagggtggccatgcaggtgcctgtggtgatgaccagccttggacaaaagatctctaccgtagcagtccagtctgtcaatgccggtgcccctctgatcacctcaacaagccctaccacagccacgagcccaaaggtcgtgattcagacaatcccaactgtgatgcctgcttctacggagaatggcgacaagattaccatgcagccggcaaaaattatcacaatccccgcaacacaacttgcacagtgccagctccaaaccaagagcaacttaacagggagtggatccatcaacatagtgggtactccactcgcagttcgggctctgactcccgtgtcgattgcccacggaacacctgtcatgaggcttagtatgcctacccagcaagcttctggccagaccccccccagggttattagcgcggtgataaaaggcccagaagtcaaatccgaggccgtggccaagaaacaggaacacgatgtgaaaactctgcagctggtggaggagaaaccggcggacgggaataaaactgtgactcatgtagtggttgtctccgccccgtctgctattgcgttgcccgtgactatgaaaactgaggggctcgtcacttgcgaaaaatag

SEQ ID NO: 278165 - DNA, 1191 bp, Artificial Sequence
  derived and/or modified sequence
atgagtgtcatcgtcttcaaagggaatactacatatttgtgggagtttttgctagacctgctgcaggacaaaaacacctgcccccgttatattaagtggacccaacgtgagaaagggatctttaagctggtggatagtaaggctgtttctaagctctggggtaaacataagaataaacccgatatgaattatgagaccatgggcagggccttacgttattattaccagcgcggaatcctggctaaggtggagggacaaagattggtgtatcagtttaaggatatgcccaagaacatcgtcgtgatcgacgatgataagagtgagacatgtaacgaggacttggctggcacgacggatgaaaaaagtttggagcgggtcagtttaagcgccgagtctctcctgaaagccgctagcagcgtgcgctcagggaaaaatagcagtcctattaattgctcccgggcagagaaaggcgtcgccagagttgtgaacattacgtcacccggacacgacgccagctctaggagtcccacaactaccgctagcgtaagcgcaaccgcagcccctcggacagtgcgggtagccatgcaggttccagttgtcatgaccagcctgggacagaagatcagtaccgtggccgtacaatctgtgaatgcgggagccccattgatcacttccacctccccaactactgccacaagtcctaaagtggtgatccagaccataccaacagtgatgcctgcttcaactgagaacggcgataaaattacaatgcaacctgcaaagattatcaccatcccagctacacagctggcccagtgccaacttcagaccaagagcaatttaaccggctccggctccatcaacatcgttgggacacctctcgcagtgagagctctcaccccagtgtccatcgcccacggcacaccagtcatgagactttctatgccaacgcaacaggcctcagggcaaacgccgccaagagtcattagcgctgtcatcaagggcccagaagtgaaaagtgaggccgtagccaagaagcaggaacacgacgtgaaaacactgcaacttgtcgaagagaagcccgcagatgggaataaaacagtgactcacgtcgtcgtcgtatccgccccaagcgccatcgccttgcccgtcacaatgaagaccgagggcctcgtcacgtgcgagaaatag

SEQ ID NO: 278166 - protein, 336 aa, Artificial Sequence
  derived and/or modified sequence
MCTMHKDEKAKREVSSWTVEGDINTDPWAGYRYTGKLRPHYPLMPTRPVPSYIQRPDYADHPLGMSESEQALKGTSQIKLLSSEDIEGMRLVCRLAREVLDVAAGMIKPGVTTEEIDHAVHLACIARNCYPSPLNYYNFPKSCCTSVNEVICHGIPDRRPLQEGDIVNVDITLYRNGYHGDLNETFFVGEVDDGARKLVQTTYECLMQAIDAVKPGVRYRELGNIIQKHAQANGFSVVRSYCGHGIHKLFHTAPNVPHYAKNKAVGVMKSGHVFTIEPMICEGGWQDETWPDGWTAVTRDGKRSAQFEHTLLVTDTGCEILTRRLDSARPHFMSQF

SEQ ID NO: 278167 - DNA, 1011 bp, Artificial Sequence
  derived and/or modified sequence
atgtgcaccatgcacaaggacgagaaggccaagagagaggtgagcagctggaccgtggagggcgacatcaacaccgacccctgggccggctacagatacaccggcaagctgagaccccactaccccctgatgcccaccagacccgtgcccagctacatccagagacccgactacgccgaccaccccctgggcatgagcgagagcgagcaggccctgaagggcaccagccagatcaagctgctgagcagcgaggacatcgagggcatgagactggtgtgcagactggccagagaggtgctggacgtggccgccggcatgatcaagcccggcgtgaccaccgaggagatcgaccacgccgtgcacctggcctgcatcgccagaaactgctaccccagccccctgaactactacaacttccccaagagctgctgcaccagcgtgaacgaggtgatctgccacggcatccccgacagaagacccctgcaggagggcgacatcgtgaacgtggacatcaccctgtacagaaacggctaccacggcgacctgaacgagaccttcttcgtgggcgaggtggacgacggcgccagaaagctggtgcagaccacctacgagtgcctgatgcaggccatcgacgccgtgaagcccggcgtgagatacagagagctgggcaacatcatccagaagcacgcccaggccaacggcttcagcgtggtgagaagctactgcggccacggcatccacaagctgttccacaccgcccccaacgtgccccactacgccaagaacaaggccgtgggcgtgatgaagagcggccacgtgttcaccatcgagcccatgatctgcgagggcggctggcaggacgagacctggcccgacggctggaccgccgtgaccagagacggcaagagaagcgcccagttcgagcacaccctgctggtgaccgacaccggctgcgagatcctgaccagaagactggacagcgccagaccccacttcatgagccagttctag

SEQ ID NO: 278168 - DNA, 1011 bp, Artificial Sequence
  derived and/or modified sequence
atgtgtaccatgcataaggacgaaaaagctaagcgggaagtttcctcctggaccgtcgagggtgacataaacactgacccatgggctggctaccgatataccggaaagctgcgcccgcactacccgcttatgccaacccggcctgtgccgagttatattcaaagacctgattatgccgaccatcctttagggatgtccgaatcagaacaagccctcaagggtactagccagataaagctactgtcctccgaggatatcgaggggatgcggctcgtatgccggctggcgagagaggttttggatgtggcagcaggcatgattaaaccaggggtaacaactgaggaaatagatcatgccgtccacctggcttgcatagcacggaactgttatccttccccattgaattactacaactttccgaaaagttgctgtacatcagtgaatgaggtgatctgccatgggattccagacaggcgacctctgcaggaaggtgatatagtgaatgtggatatcacactgtaccgaaacggctaccatggcgatctcaacgaaaccttctttgtgggcgaagtcgacgacggggcgcgcaagcttgttcagaccacatatgaatgtttgatgcaggcaatcgacgccgtgaagcctggggttcggtaccgggagctggggaacatcatccagaagcacgcgcaggctaatggattttctgtcgttcgatcttattgtggacatggtatccataaacttttccacactgcacccaacgtgccccattacgcgaagaataaagccgtgggcgtaatgaagtccggacatgtgtttactatagagccgatgatctgcgagggcgggtggcaggacgagacctggccagacggatggacggccgtcaccagagatggaaagcgtagcgctcaattcgagcataccctgctggtgacagacaccggatgcgagatactcacaagaagactcgacagcgcgagaccgcacttcatgtcccaattttag

SEQ ID NO: 278169 - DNA, 1011 bp, Artificial Sequence
  derived and/or modified sequence
atgtgcaccatgcacaaggatgagaaggccaagcgggaggtgtcctcctggacagtggagggggacatcaacacagacccctgggccggctaccgctacaccgggaagctgcggccccactaccccctgatgcccaccaggcctgtgcccagctacatccagaggccagactatgctgaccaccccctgggcatgtctgagagcgagcaggccctgaagggcaccagccagatcaagctgctgagcagcgaggacatcgagggcatgaggctggtgtgccgcctggcccgggaggtgctggatgtggccgccggcatgatcaagccaggagtgaccacagaggagattgaccatgctgtgcacctggcctgcatcgccaggaactgctaccccagccccctgaactactacaacttccccaagagctgctgcacctctgtgaatgaggtgatctgccacggcatcccagaccggcggcccctgcaggagggggacatcgtgaatgtggacatcaccctgtacagaaatggctaccatggagacctgaatgagaccttctttgtgggggaggtggatgatggagccaggaagctggtgcagaccacctatgagtgcctgatgcaggccattgatgctgtgaagccaggagtgcgctaccgggagctgggcaacatcatccagaagcacgcccaggccaacggcttctctgtggtgcgcagctactgcggccacggcatccacaagctgttccacacagccccaaatgtgccccactacgccaagaacaaggctgtgggcgtgatgaagagcggccacgtgttcaccatcgagcccatgatctgtgagggcggctggcaggatgagacctggccagatggctggacagctgtgaccagagatggcaagaggtctgcccagtttgagcacaccctgctggtgacagacaccggctgtgagatcctgacccggcggctggacagcgcccggccccacttcatgagccagttctag

SEQ ID NO: 278170 - DNA, 1011 bp, Artificial Sequence
  derived and/or modified sequence
atgtgcaccatgcacaaggacgagaaggccaagcgggaggtgagctcatggaccgtggaaggcgatattaacacagatccctgggcagggtaccgctatactggcaagctccgccctcactacccccttatgcccactcgcccggtcccgtcatacatacagcggcctgactacgccgatcatccactcgggatgtctgaatctgagcaggcccttaaggggaccagccagattaagctcctgtccagcgaggatatcgaggggatgaggctggtgtgcaggctggctcgggaggttctggatgtagccgccgggatgattaaaccaggcgttaccactgaggaaatcgatcacgcggtccatctggcttgcatcgccagaaattgttacccttctcctctaaactattataacttccccaaatcgtgttgcacatcagtaaatgaggttatctgccacggaatccccgatcggcgccctctccaggaaggggacatcgtgaacgtggacataacattatacagaaatggctatcatggggacctaaatgagacattctttgtgggagaggtggacgacggcgctcgaaagcttgttcagaccacgtatgaatgtttaatgcaggcaattgacgccgtgaaacctggtgtgcggtacagggaactgggaaatatcatccagaaacatgctcaggctaatggcttttccgttgtgcgctcttactgcggacacgggattcataaactgttccataccgcgcctaatgtcccccactacgccaagaacaaagctgttggtgtaatgaaaagtgggcatgtgtttaccatcgagcctatgatatgcgaaggaggctggcaggatgagacctggcctgacggatggacagccgtaaccagggacgggaagaggtctgctcaattcgagcatacccttctggtgacagacactggctgcgagatcttaacccggcggctggattcagcgcgcccgcatttcatgtcacaattctag

SEQ ID NO: 278171 - DNA, 1011 bp, Artificial Sequence
  derived and/or modified sequence
atgtgtacaatgcacaaggacgaaaaagccaagcgggaggtctcttcctggacagtggaaggagatattaacacagatccttgggccggataccggtacaccgggaagctgagacctcactatcctctgatgcccactcggccagtaccaagttacatccagaggcctgactacgccgaccaccctctgggaatgagcgagagcgaacaggcgttgaaggggacatctcagatcaagcttctgagtagcgaagatattgaaggcatgcggctggtctgccgactggccagagaggtgctggatgttgccgcaggaatgattaaacctggtgtgacaactgaggagattgatcacgccgtgcacctggcctgcatagccaggaactgttaccccagccccctgaactactataacttccctaagtcctgttgcacctcggtgaacgaggttatatgtcacggcattccagacagaagacctctgcaggagggcgacatcgtgaatgtggacatcacactgtatcgaaacggctatcatggagacctcaacgagactttcttcgtgggagaggtggatgacggggctcgcaagttagtgcagactacatatgagtgtctgatgcaggcaatcgatgctgtaaaacccggtgtccgctatcgggaattgggtaacatcatacaaaaacacgcacaggccaacgggttcagcgtggtcaggtcctactgcggacatggtatccacaagctgtttcacactgctccgaacgtgccacactacgccaagaacaaagccgtcggcgtgatgaaatccgggcatgtcttcacaatagagcctatgatctgtgagggtggttggcaagatgagacttggcctgacggttggactgccgtgactagggacggcaagaggagcgcccagtttgaacataccttgcttgtgaccgacaccggctgtgaaatactgacccggagactggattccgcccgaccccacttcatgagtcagttctag

SEQ ID NO: 278172 - DNA, 2502 bp, Artificial Sequence
  derived and/or modified sequence
atgtgtaccatgcataaagatgaaaaggcgaagcgagaagtgtcttcctggactgtggaaggtgatattaatactgacccatgggcaggttatcgatatactggtaaactcagaccacattatccactgatgccaacaaggccagtgccaagttatattcaaagaccagattatgctgatcatcccttaggaatgtctgaatctgaacaggctcttaaaggtacttctcagattaaattactctcatctgaagatatagaagggatgcgacttgtatgtaggcttgctagagaagttttggatgttgctgccggcatgattaaaccaggtgtaactactgaagaaatagatcacgctgtacacttagcatgtattgcaagaaattgctacccttctcccctgaattattataatttcccaaagtcttgttgtacctcagtgaatgaagtcatttgccatggaataccagacagaaggcccttacaagaaggtgacattgttaatgtggatatcactctttatcgcaatggttatcatggggacctgaatgagacattttttgttggagaagtggatgatggagcacggaaacttgttcagaccacatatgagtgcctgatgcaagccattgatgcagtgaagcctggtgttcggtacagagaattgggaaacattatccagaagcatgcccaagcaaatgggttttcagttgttcgaagctattgtgggcatggaatccacaagctttttcatacagctcccaatgtaccccactatgctaaaaataaagcagttggagtgatgaagtcgggccatgtatttacaattgagccaatgatttgtgaaggcggatggcaggatgaaacctggccagatggttggactgcggtgacaagagacggaaagcggtctgctcagtttgagcacaccctcctggtcacagacactggctgtgaaatcctaacccggcgacttgacagtgcacggcctcacttcatgtctcaattttaatttctcccaagatggcacatctcagtaccttcttactgtgctatgcattttattgagagtacagaaaggaagaggaacctttttttaatcacttgttttgttttgactatagataagaaaggactacagcatttgatgtgtgtcctcaagaacttgtcttgggtctgaaaaagctgagaagaataaaggaaacattgctcaactcttcagccccctccccctgcacacctgttttctcatttgccctttgagcacttttacttaaacttgcttgtagttgcttttatcactgccgcaaaacagccatcaagagccatctgctttccaggtgaacattggaaatgagaatctttgaaacttagcaatatgtgttgcaccagattttttaaattatatatatggaaatatatatgtatacattttaagttctgtatacataattaccaaacactatgtgacctggagtttgtgttgtttctgctctgacaggtttatatgttcttacaaatggatccatagtttgcagtgatttaattcctggttgggatttggcctcccctctcccccatgctaattatttacccttgtaattgtgcatagggaagcactcacccaatgagactttctccaatgtggactctgtgtgtcagtgaatgaatgtagtaaaattcactttggaaggttatcaggcttttaaaaatctagtttatggcaaaaatagccattttccaagtggtggctgactgttgcagggaatgagaatttcataatacactgctatttcagacctctgtttggtcagaaatggaaaagaaaaagccccctttcttcccttttctgttttacttcaagggcataccttggaggtgctcagagaagcgtgaagtttgcactatggtggaggatggggaaagagttctaaagtgtctccagctgtgaacccaggaggtcaagtgggctattaaaatctaacgttgagtaaatgtgatagtgatgagaaaggaattttgtgtactgtaaccttgcagtagagatgcagctgtccttcgtgtgtggaaacacacctctcctttacatagttgggaacctcattagaaatgacctcagctgccccatatctacgttcctttcagcagttgtccaagtaggagtgtatccagtgaagacatatcaaatcacaaagtcattgtcattagagtgtacttgattactgggcatccttgtaatataatttcataccactgacacattatacttgtaagagaacatctttcccagagtgcctcagaccttattgctttaaaatataataatgttttcattacttttattatttgaatgatttagtaaagttgactgaatctggtatagactttgggagtatgtgtgtgaagtttttatcaaactgtaatatttgtgaatggaatgccttgcaatatgaatgttaatataatgtgtaaagggagattaaaaagtttgaatgattatcct

SEQ ID NO: 278173 - protein, 293 aa, Artificial Sequence
  derived and/or modified sequence
MFISLWEFFYGHFFRFWMKWLLRQMTGKCELQRIFDTYVGAQRTHRIENSLTYSKNKVLQKATHVVQSEVDKYVDDIMKEKNINPEKDASFKICMKMCLLQITGYKQLYLDVESVRKRPYDSDNLQHEELLMKLWNLLMPTKKLNARISKQWAEIGFQGDDPKTDFRGMGILGLINLVYFSENYTSEAHQILSRSNHPKLGYSYAIVGINLTEMAYSLLKSEALKFHLYNLVPGIPTMEHFHQFYCYLVYEFDKFWFEEEPESIMYFNLYREKFHEKIKGLLLDCNVALTLKV

SEQ ID NO: 278174 - DNA, 4409 bp, Artificial Sequence
  derived and/or modified sequence
ctcgctccctgacttccgggtcgcggtgcttgaagggagtgttccgtcgtttccgttgccggctgtttgcagtggggaaaccgaggcagctcctgctccccctagttcttccgctcctgtgaggaaaaaaaaatgtttatttctttgtgggagttcttctatgggcacttttttcgattttggatgaaatggctattacgacagatgactgggaagtgtgaattgcagcgaatatttgatacctatgtaggtgcacaaaggacacacaggatagaaaattccttgacatactccaagaataaggttttacagaaggcgacacatgttgttcagagtgaagtggacaaatatgtagatgatattatgaaggaaaagaatattaaccctgagaaggatgccagttttaaaatatgcatgaagatgtgcttactgcagataactggttataaacagctgtatttggatgtagaaagtgtgaggaaaaggccatatgattctgataacctacagcatgaagagctactcatgaagctttggaatcttctaatgcccacgaagaagttaaacgctagaatctccaagcagtgggctgaaattggttttcagggtgatgatcccaagacagacttcagaggcatgggcatacttgggttaatcaatcttgtgtatttcagtgaaaattacactagtgaagctcatcagattctttcccgttcaaatcatccaaaattagggtattcttatgcaatagttggaatcaatcttacagagatggcttatagcttactgaagagtgaagctttgaagtttcatctctataaccttgttcctggtataccaacaatggaacactttcatcagttttactgttatcttgtctatgaatttgacaagttttggtttgaagaagaaccagaaagcattatgtatttcaatttgtatagagagaagtttcatgaaaagattaaaggacttttactggattgtaatgtagcacttactttaaaagtataaatcatccactgtatcttctatttctaccacattttgcacattcaacagaatttatatgttgtaataggaattatctgatcaattacactcttatatataatttcctacaaaaatatttcagaaattctatttaagaaagctagtggacaatcagtgtatgtttacaattgtttatacactgttctccaaaggtaccttatccttccaaagatcccctctgtagagtcatgcgaactacagtttggaacttgggacttagcccgttggtgtaaaagtataaatcaggtatttgtattaaattgattaaaatgtgtaaaatcaattttcgtttttatgtgttatagggtcaagttggtatctttttcaaagctctttaagatttttttggtttttagtttggaaatggctgtttttaattttgtctgatttttatttctaggttaattaacagcaagtgtttctttatggttttctttgtttgcatcttaattacatgtcataacgttgcttcattagtagcaaatagagcagagatacagcagagagaataaagaattagggcctccttttgggtttctgtgattattgagcataactgatgagagaatgacagtattggtgactagcttttttgtttttaaataacacactttaaaatgccacagtgttatttgaaagcttaaaggcattttctcatcttcagtatttgctttttatcagttgtagaaaagaaccttagtgttttcttctctacctatgtatgcttatgaaaccgctctacctacatatgaaacttctctacctatgtatgtttacgaaaagagatgtatttgccaagaaaatcttgattatataaaagacaaaaagattataaaagacagtttctgtttaagtaaaactgtctttgaaacttaagaaagcttaagttttaaaaaaatctcagttaaacatcattggtttatttgacttactgttaactcttgcttctctttgactccatggtgtttttagataaccatgtatgaactttatgttaatggtttgtgggatactaaaatagcttgaagatgacttgatgactgtgcattttatatagttttattctcctaaaatctcaggagggcagcaagtgctgtcaacgattatatagtgatgagatttttatgggaatgatttcttcttggtgcgttttacacatttgtactgatagcaaaactaaagtttaaagcagcaaagtttaagttctccttaaatcctacagaaaccaaccttttaaggacataatttcatctaaaacatgacgatatttagcacaccttttaatgtgggtatatatcaagtgtttaaggactggctagtatgtgatagagcaagacctgagactttataagtatttgctcgtgtctgttgacagacctctttctttcaaacttgttagaagagtggtaagacatatccaattggaaaataagatgcagtgttgtatagcacatacatttaaagtgcttgcgttaaaattagtttctcaataagataaaattattttaaaaatttggttcactttattacaatagtggcaatttagcttttcagtattacaggaatttaaaaattggtttcttgtaggggacatctcaactttgggaatatcttcacttaatttttaaaaaatattttcatgctttattgtccagctatacaatatgtcgcaaaatcctgacaagttcattgtattaaggtattaactattacatggaaagcaattctgttcatcttttgatgtttgtgttgaaaatgcttatctttgtgttttgatcttccaacagctgagagcttgaactgatttaaacatttgtcaatatacttaagaatgctttaagtaaagaaggggaaaattttaagtaagttttttcccttctaggaagaaaaactatgatgatgttaagaaaatgtcattatagagcttgctcaataatatgttctttaaatccacctccatttgtacattataggtatcattctgtttttgcttaaaataatctgcaaccatttcagatagttttacagcaaattgatctaaaagccactaataaattctagggtttgagtctagaagccaagcaaactgtcaccaatgtcagttgtaaattagaatgcaacatgaggcttcagactcatgacaatgatatacatgaaaacaaaaatataattgtgtctaccttcctactttcccttttgacatatgtagttggaattttacatagtcttaaaatccatatttagaatcttacctgtttctataataattagtaaaatgccaaagtagtgatagaatattgtggcattgaagtagccgaaaaattgttagttttagcatcaaaaaagtaaatagatgttgaaatgaatttttgtatgtgccaggttgaagagagtgtgccagtgacaggaagtagtctaaaaaattaacagttatggttttaataggatctgaaagacaatctttaaagaaatgggagaaattgggggtatcagtgaacctataccaacctctctttgtacataaatatggtgatgtagctagatataaaaatcagtgtcttactggcaccatttacagtttagaaaacaatctttttcttaaaaatgcccatctgatttctatttttaggagctacttggatttgtatgtattttttctacgtgaaaatatatgtactcttcacttttgttccagtactataattgctcatgcactctttctcccctttgagaacattcagtgaaatacaacttcatcaaagatttgctcaaaggagaagaatcgcatgagtgtgaaaagtagatgctcgtagccagaacagaaaaggttacacatgatcatggcacagaagataggaggtttgacttggtgggccataatgtttattatcctttttgaaataacagggaccagcagcagttttctcaggataaatgctctaccccacttctctatgaacaggtgtggggaggcttactttccattttcatatttatacacctctctacaaaagcaatttttaatgaaggttagtggaattgttaaaaatctgagaggaatgatgactggaggtgtttggggtttttttctgtattcattttttaatgagaaaagttttaaatgtagtacaggttagacccaactactaccttactattataggacgattctatgtttctgttaaagtattcaagtagctttctctgggggaaaaagtaccacttggacacttaaaggaattgggatttttgtctactttggataaggcagttgacttcttaagtaaaagcaatagtgtaaaatgtcattttgtttggaatgttaagtgagcaaataaaaaacatgttgaaattgt

SEQ ID NO: 278175 - protein, 184 aa, Artificial Sequence
  derived and/or modified sequence
MFLSSVGFSVVMMSIWPYLQKIDPTADTSFLGWVIASYSLGQMVASPIFGLWSNYRPRKEPLIVSILISVAANCLYAYLHIPASHNKYYMLVARGLLGIGAGNVAVVRSYTAGATSLQERTSSMANISMCQALGFILGPENIVWMTQEDSVKVLILKKQVQMKLRFPKEILTRLLLWPSMFCFL

SEQ ID NO: 278176 - DNA, 555 bp, Artificial Sequence
  derived and/or modified sequence
atgtttctgagttctgtgggattcagcgtggtaatgatgtctatatggccctacctgcagaaaatcgatccaactgccgacacaagttttctaggatgggtcatcgcaagctactcacttgggcagatggttgcctcccccatctttggcctttggtcaaactatcggccacgcaaggaaccactcattgtatcgatactaatctctgtggctgcgaattgtctgtacgcgtaccttcacatcccagcgtcacataataagtactatatgcttgtcgcacgcggacttttaggcattggggccggaaacgtcgccgtggtccggtcctacaccgcaggtgcaacgtctttgcaggaacgcactagttccatggccaatatcagtatgtgccaagccttgggtttcatccttggtccagaaaatatcgtatggatgactcaggaggatagcgtcaaagtgctgatattgaaaaagcaggtgcagatgaagctcagatttcctaaggaaatcttgacacgactcctcctgtggccgtctatgttctgcttcctttag

SEQ ID NO: 278177 - DNA, 555 bp, Artificial Sequence
  derived and/or modified sequence
atgttcctgagctctgtgggcttctctgtggtgatgatgagcatctggccctacctgcagaagattgaccccacagctgacaccagcttcctgggctgggtgattgccagctacagcctgggccagatggtggccagccccatcttcggcctgtggagcaactaccggcccaggaaggagcccctgattgtgtccatcctgatctctgtggccgccaactgcctgtatgcctacctgcacatcccagccagccacaacaagtactacatgctggtggcccggggcctgctgggcattggagctggaaatgtggccgtggtgcgcagctacacagctggggccaccagcctgcaggagaggaccagctccatggccaacatctccatgtgccaggccctgggcttcatcctgggccctgagaacatcgtgtggatgacccaggaggacagcgtgaaggtgctgatcctgaagaagcaggtgcagatgaagctgcgcttccccaaggagatcctgacccggctgctgctgtggcccagcatgttctgcttcctgtag

SEQ ID NO: 278178 - DNA, 816 bp, Artificial Sequence
  derived and/or modified sequence
acaagcagcagatcccaccttcagtcctggctctgacaagccctccagagaatgggacattttagagactgaagagcattataagagccgatggagatctattaggattttatatcttactatgtttctcagcagtgtagggttttctgtagtgatgatgtccatatggccatatctccaaaagattgatccgacagctgatacaagttttttgggctgggttattgcttcatatagtcttggccaaatggtagcttcacctatatttggtttatggtctaattatagaccaagaaaagagcctcttattgtctccatcttgatttccgtggcagccaactgcctctatgcatatctccacatcccagcttctcataataaatactacatgctggttgctcgtggattgttgggaattggagcaggaaatgtagcagttgttagatcatatactgctggtgctacttcccttcaggaaagaacaagttccatggcaaacataagcatgtgtcaagcattaggttttattctaggtccagagaacatcgtgtggatgactcaggaagacagtgtaaaagtattaattttgaagaagcaagtacagatgaagctcaggttccccaaggaaatattgaccaggttgctgttgtggccatcaatgttctgttttttgtgactctatttatctttgccctttttgaaaccatcattactccattaacaatggatatgtatgcctggactcaagaacaagctgtgttatataatggcataatacttgctgctcttggggttgaagccgttgttattttctta

SEQ ID NO: 278179 - DNA, 555 bp, Artificial Sequence
  derived and/or modified sequence
atgttcctgagcagcgtgggcttcagcgtggtgatgatgagcatctggccgtatctgcagaagatagaccccacggctgatacatcattcctcggctgggttatcgctagctacagtctcgggcaaatggtggccagccccatttttggcctctggtcaaattaccgtccaagaaaggagccgctgatcgtctccatcctcatttccgtggccgccaactgcctctatgcttacttgcatatacccgcttctcataataaatactacatgctcgtggcacgcggcttgctggggattggagcaggcaatgtagccgtggtgagatcctatacagcgggcgcaacctccctgcaggagaggacttctagcatggcaaatatatcgatgtgtcaagcactgggattcattctcggacctgagaatatcgtgtggatgacgcaggaggactcggtcaaggtgctcatccttaaaaagcaggtgcagatgaaactgcgcttccctaaggaaattctgacaaggctgttattgtggcccagcatgttctgttttctctag

SEQ ID NO: 278180 - DNA, 555 bp, Artificial Sequence
  derived and/or modified sequence
atgttcctgtcctccgttgggtttagtgtcgtgatgatgtccatttggccctatttgcaaaagatcgaccccacagctgacacctcattcctgggctgggtcatcgcatcctatagcttggggcagatggtggcttctcccatcttcggcctgtggagcaactaccgcccacgaaaggaacccctgattgtgagcatcctgatctctgtggctgccaattgtctttacgcctacttgcatatccccgcttctcataacaagtactacatgctggtggctcgcggtctgctcgggatcggcgctgggaacgtggcggtggtccggtcctacaccgcgggagcaactagcctccaagaacggacatcttccatggccaatattagcatgtgccaggccctcggcttcatcctggggcctgagaacatagtttggatgacccaggaggactcggttaaagtgcttatattgaaaaagcaggtgcagatgaagctgcgcttcccgaaggagatactgacgcgtctcctcctgtggccaagcatgttttgtttcctctag

SEQ ID NO: 278181 - DNA, 555 bp, Artificial Sequence
  derived and/or modified sequence
atgttcctgagcagcgtgggcttcagcgtggtgatgatgagcatctggccctacctgcagaagatcgaccccaccgccgacaccagcttcctgggctgggtgatcgccagctacagcctgggccagatggtggccagccccatcttcggcctgtggagcaactacagacccagaaaggagcccctgatcgtgagcatcctgatcagcgtggccgccaactgcctgtacgcctacctgcacatccccgccagccacaacaagtactacatgctggtggccagaggcctgctgggcatcggcgccggcaacgtggccgtggtgagaagctacaccgccggcgccaccagcctgcaggagagaaccagcagcatggccaacatcagcatgtgccaggccctgggcttcatcctgggccccgagaacatcgtgtggatgacccaggaggacagcgtgaaggtgctgatcctgaagaagcaggtgcagatgaagctgagattccccaaggagatcctgaccagactgctgctgtggcccagcatgttctgcttcctgtag

SEQ ID NO: 278182 - protein, 359 aa, Artificial Sequence
  derived and/or modified sequence
MRTADREARPGLPSLLLLLLAGAGLSAASPPAAPRFNVSLDSVPELRWLPVLRHYDLDLVRAAMAQVIGDRVPKWVHVLIGKVVLELERFLPQPFTGEIRGMCDFMNLSLADCLLVNLAYESSVFCTSIVAQDSRGHIYHGRNLDYPFGNVLRKLTVDVQFLKNGQIAFTGTTFIGYVGLWTGQSPHKFTVSGDERDKGWWWENAIAALFRRHIPVSWLIRATLSESENFEAAVGKLAKTPLIADVYYIVGGTSPREGVVITRNRDGPADIWPLDPLNGAWFRVETNYDHWKPAPKEDDRRTSAIKALNATGQANLSLEALFQILSVVPVYNNFTIYTTVMSAGSPDKYMTRIRNPSRK

SEQ ID NO: 278183 - protein, 199 aa, Artificial Sequence
  derived and/or modified sequence
MRTADREARPGLPSLLLLLLAGAGLSAASPPAAPRFNVSLDSVPELRWLPVLRHYDLDLVRAAMAQVIGDRVPKWVHVLIGKVVLELERFLPQPFTGEIRGMCDFMNLSLADCLLVNLAYESSVFCTSIVAQDSRGHIYHGRNLDYPFGNVLRKLTVDVQFLKNGQIAFTGTTFIGYVGLWTGQSPHKFTVSGDERDPH

SEQ ID NO: 278184 - protein, 323 aa, Artificial Sequence
  derived and/or modified sequence
MRTADREARPGLPSLLLLLLAGAGLSAASPPAAPRFNVSLDSVPELRWLPVLRHYDLDLVRAAMAQVIGDRVPKWVHVLIGKVVLELERFLPQPFTGEIRGMCDFMNLSLADCLLVNLAYESSVFCTSIVAQDSRGHIYHGRNLDYPFGNVLRKLTVDVQFLKNGQIAFTGTTFIGYVGLWTGQSPHKFTVSGDERDKGWWWENAIAALFRRHIPVSWLIRATLSESENFEAAVGKLAKTPLIADVYYIVGGTSPREGVVITRNRDGPADIWPLDPLNGAWFRVETNYDHWKPAPKEDDRRTSAIKALNATGQANLSLEALFQ

SEQ ID NO: 278185 - DNA, 1080 bp, Artificial Sequence
  derived and/or modified sequence
atgaggaccgccgacagagaggctagacctgggctgccatcattgctgctgctgttgctggctggtgctgggctgagcgccgcttccccacctgcagccccacgctttaatgtctccttagactctgtgcccgagctgagatggctacccgtgctacggcattatgacctcgacctggtccgagcagctatggcacaggtcatcggcgatagggtcccgaagtgggtccatgtgctgatcggaaaagtggtgctcgaattggaacgctttctgccccagccttttaccggcgaaattcgggggatgtgtgattttatgaacttgtctctggccgattgcctgcttgtgaaccttgcatacgagtctagcgtattctgtacctcaatagtggcgcaagactctaggggccatatctatcatggacgcaatctggactacccattcggaaatgtcctacgcaagctcactgtggatgtccagtttctaaaaaatggccagatagcattcaccggaaccaccttcattggctacgtaggcctgtggacaggacagtcaccccacaaatttaccgtgagcggcgatgagcgggacaaggggtggtggtgggagaatgcaatagccgccctgttccgacgacacatccctgtcagctggctgatacgagccacactctccgaatccgagaattttgaggcggctgtaggcaagctggccaaaacacctctgattgccgacgtctactatatcgttgggggaacatcacctcgcgagggggtcgtgataacacgtaatcgtgatgggcctgctgacatttggcctcttgatcccctgaacggcgcttggttccgggtggaaactaactacgatcattggaaacccgcgccaaaagaagacgaccgcagaacaagtgctattaaagccctgaatgcaaccggacaggccaaccttagtctggaagcactcttccagatcctttctgtcgtccccgtatacaataattttactatatatacgactgtgatgtcggccggaagccctgataagtacatgaccaggattcgcaatccaagcaggaaatag

SEQ ID NO: 278186 - DNA, 1080 bp, Artificial Sequence
  derived and/or modified sequence
atgaggacagctgaccgggaggcccggcccggcctgcccagcctgctgctgctgctgctggccggggccggcctgtctgctgccagccccccagctgccccccgcttcaacgtgtccctggacagcgtgcctgagctgcgctggctgcctgtgctgcggcactatgacctggacctggtgcgggccgccatggcccaggtgattggagacagagtgcccaagtgggtgcacgtgctgattggcaaggtggtgctggagctggagcgcttcctgccccagcccttcaccggggagatccggggcatgtgtgacttcatgaacctgagcctggccgactgcctgctggtgaacctggcctatgagagctctgtgttctgcaccagcatcgtggcccaggacagccggggccacatctaccacggcaggaacctggactacccctttggaaatgtgctgaggaagctgactgtggatgtgcagttcctgaagaatggccagatcgccttcaccggcaccaccttcatcggctacgtgggcctgtggacaggccagagcccccacaagttcaccgtgtctggagatgagcgggacaagggctggtggtgggagaatgccatcgccgccctcttcagaagacacatccctgtgtcctggctgatccgggccaccctgtctgagagcgagaactttgaggccgctgtgggcaagctggccaagacccccctgattgctgatgtgtactacatcgtgggcggcaccagcccccgggagggcgtggtgatcaccaggaacagagatggccctgctgacatctggcccctggaccccctgaatggagcctggttccgggtggagaccaactatgaccactggaagccagcccccaaggaggatgacaggaggaccagcgccatcaaggccctgaatgccaccggccaggccaacctgagcctggaggccctcttccagatcctgtctgtggtgcctgtgtacaacaacttcaccatctacaccaccgtgatgtctgctggcagcccagacaagtacatgacccgcatccggaaccccagcaggaagtag

SEQ ID NO: 278187 - DNA, 1080 bp, Artificial Sequence
  derived and/or modified sequence
atgcggaccgccgaccgggaggcccggcccggcctgcccagcctgctgcttttacttttggcaggtgccggcctcagcgccgccagccctcccgccgcccccagattcaacgtttcccttgactctgtaccagagctcagatggcttccagtcctaaggcattacgatctcgatctggtgagagcggctatggctcaagtcattggtgatagggtgcctaaatgggtccatgtcctgataggaaaggttgttctggagttggagcgctttctgcctcagcccttcactggggagattagagggatgtgcgacttcatgaacctgagtcttgctgattgtttgctcgtcaaccttgcctacgagtcatcggttttttgtaccagtattgttgcccaagattcccgcggacacatctatcatggacgtaatctggattacccctttggaaacgtgctgaggaaacttacagtggatgtacagttcctgaagaatggacagatcgcattcaccggcaccacttttattggctatgttggactttggactggccagtcccctcacaagtttacagtgtccggtgatgagagggacaaaggatggtggtgggagaatgccatcgctgccctttttcgacgacacatcccggtcagttggctgataagagctaccttatcagagagcgagaactttgaggccgccgtcggaaaactagctaagacccccctgattgccgacgtttattacattgtcggaggtacaagcccacgggagggagtcgtgatcacgagaaatagggacgggccggctgatatctggcccctggatcccctaaacggggcctggtttcgagtggagacaaactatgaccactggaagcccgcaccaaaagaagatgaccgcaggaccagcgcgattaaagcactgaacgcaaccggccaggccaacctgtccctggaagccctttttcagatcttgtccgtcgtgccagtatataataatttcaccatctatactaccgtaatgtctgcaggctccccagataaatatatgacaagaatccgcaatccatcgcgaaaatag

SEQ ID NO: 278188 - DNA, 1080 bp, Artificial Sequence
  derived and/or modified sequence
atgcggaccgctgatcgcgaggcccgacccggtctaccaagccttctgctcctcttgctagctggtgccggattgagtgccgcaagcccgcctgcagctccacgatttaacgtgtccttggattctgtgcctgaactgcggtggctgccagtgctccgccattatgacctagatctggttagggcagccatggcacaggtgatcggcgatcgggtacccaagtgggtccacgtcttgatcggtaaggtggtgctcgaacttgaaaggttcttaccccagccgttcacaggtgagattaggggcatgtgcgactttatgaatctcagcctcgcagactgcctgctggtgaacctcgcttatgaaagttcggtgttttgtacttccatcgttgcccaagactcgcgagggcacatctatcacgggcgaaacttagactatccgttcggcaatgtgctgcgaaagttgacagtggacgtccagttcctgaagaatggccaaatcgcctttactggaaccacattcattggatatgttggcctctggactgggcagtctccacacaaatttaccgtctctggggacgagagggataagggatggtggtgggaaaacgctattgcagcactgtttcgccgtcatattcccgtctcctggctcatcagagctactctctcggagtctgagaacttcgaggcggctgtggggaaactcgccaagacccctttgatagctgacgtgtactacattgtgggaggcacgagccccagggagggagttgtgattacacggaacagagacggacctgcagatatttggccattagaccctctgaacggggcttggtttagagttgaaacaaattatgatcactggaagcccgctccgaaagaagacgataggcgcacctctgcaattaaggccctaaacgccactggtcaagcaaacctctcgctggaggctctgttccagatcttaagcgtggtccccgtctacaataatttcaccatttataccactgttatgtctgccggttcaccagacaagtatatgaccaggatccgaaatccttcacggaaatag

SEQ ID NO: 278189 - DNA, 1897 bp, Artificial Sequence
  derived and/or modified sequence
tccagcgatcgcagcccagccccagctcctcctcctccacggcttacccgggctccgacagcggctgcaggtctccaagttgcggccgctggagcccgagccatgcggaccgcggaccgggaggcgcgcccggggcttccgtccctgctgctgctgctgctggccggggccgggctgtcagccgcctcgcccccagcagcgccgcgcttcaacgtgagcctggactcggtccccgagctgcgctggctgcccgtgctgcggcactacgacttggacttggtgcgcgccgcgatggcgcaagtcatcggggacagagtccccaagtgggtgcacgtgttaatcggaaaagtggtcctggagctggagcgcttcctgccccagcccttcaccggcgagatccgcggcatgtgtgacttcatgaacctcagcctggcggactgccttctggtcaacctggcctacgagtcctccgtgttctgcaccagtattgtggctcaagactccagaggccacatttaccatggtcggaatttggattatccttttgggaatgtcttacgcaagctgacagtggatgtgcaattcttaaagaatgggcagattgcattcacaggaactacttttattggctatgtaggattatggactggccagagcccacacaagtttacagtttctggtgatgaacgagataaaggctggtggtgggagaatgctatcgctgccctgtttcggagacacattcccgtcagctggctgatccgcgctaccctgagtgagtcggaaaacttcgaagcagctgttggcaagttggccaagactccccttattgctgatgtttattacattgttggtggcacgtccccccgggagggggtggtcatcacgaggaacagagatggcccagcagacatttggcctctagatcctttgaatggagcgtggttccgagttgagacaaattacgaccactggaagccagcacccaaggaagatgaccggagaacatctgccatcaaggcccttaatgctacaggacaagcaaacctcagcctggaggcacttttccagattttgtcggtggttccagtttataacaacttcacaatttatactacggtaatgagcgccggtagcccagacaagtacatgactaggatcagaaacccgagtagaaagtaagtcagcagaagagcgagttcgcccgtgctgtgaaagatgattttttaaaaaatgaaattcttgaagagctgcaccttaaaaaataagacaaagtgaaagtattgtattatgttacaaacaatgcaggctccttcctcatttaactttacaaccttgcgaagtgggtccaggagatttggagtttgtggtaaagccagtaatgggcattgtcctgcattcccttcccttcatggtttgcctcgatcctctctaagcttctatcctggcctgaataactcaaagataattggtctcagagatcaagccatatcctcaggccttatttccatcttctcatgattctgccatcatacctttgcttctccgctaatgaaatgagctggcaagacctctgttcattgtgaagtgcttctgaaagagcctaagaaaaaaggctcatctgaaagaaatggagaactctatttcgaaccaagcctgtttgaatgtgtgttagtctgatctttgatcatgtgtttccatgtaatgggagtctcgttttttataatgtttctaacgttttattgaaaaacctatggccctccttctttctcaatagctactttcttactgctttttgaaaataatatgcaaccaaattatttcttaatgtcacataattaagtaataaaatgtcaaaagaaatgttggcaaggagaataaaaaaatttccaagaaa

SEQ ID NO: 278190 - DNA, 1080 bp, Artificial Sequence
  derived and/or modified sequence
atgagaaccgccgacagagaggccagacccggcctgcccagcctgctgctgctgctgctggccggcgccggcctgagcgccgccagcccccccgccgcccccagattcaacgtgagcctggacagcgtgcccgagctgagatggctgcccgtgctgagacactacgacctggacctggtgagagccgccatggcccaggtgatcggcgacagagtgcccaagtgggtgcacgtgctgatcggcaaggtggtgctggagctggagagattcctgccccagcccttcaccggcgagatcagaggcatgtgcgacttcatgaacctgagcctggccgactgcctgctggtgaacctggcctacgagagcagcgtgttctgcaccagcatcgtggcccaggacagcagaggccacatctaccacggcagaaacctggactaccccttcggcaacgtgctgagaaagctgaccgtggacgtgcagttcctgaagaacggccagatcgccttcaccggcaccaccttcatcggctacgtgggcctgtggaccggccagagcccccacaagttcaccgtgagcggcgacgagagagacaagggctggtggtgggagaacgccatcgccgccctgttcagaagacacatccccgtgagctggctgatcagagccaccctgagcgagagcgagaacttcgaggccgccgtgggcaagctggccaagacccccctgatcgccgacgtgtactacatcgtgggcggcaccagccccagagagggcgtggtgatcaccagaaacagagacggccccgccgacatctggcccctggaccccctgaacggcgcctggttcagagtggagaccaactacgaccactggaagcccgcccccaaggaggacgacagaagaaccagcgccatcaaggccctgaacgccaccggccaggccaacctgagcctggaggccctgttccagatcctgagcgtggtgcccgtgtacaacaacttcaccatctacaccaccgtgatgagcgccggcagccccgacaagtacatgaccagaatcagaaaccccagcagaaagtag

SEQ ID NO: 278191 - protein, 776 aa, Artificial Sequence
  derived and/or modified sequence
MGTVPDPLRSAKTSLIAASGKEDDLGEPQAASPRHRPALLCKNANGFSGAPAEPDLSPRAAAEALMQVCEHETTQPDMSSPGVFNEVQKAPATFNSPGNPQLPGSSQPAASAPSSAAGRDLIHTPLTMPANQHTCQSIPGDQPNAITSSMPEDSLMRSQRTSNREQPEKPSCPVGGVLSSSKDQVSCEFPSPETIQGTVQTPVTAARVVSHSSSPVGGPEGERQGAICDSEMRSCKPLTRESGCSENKQPSVTASGPQGTTSVTPQPTPLTSEPSACPPGPEKVPLPAQRQMSRFKEASTMTNQAESEIKEVPSRAWQDAEVQAVASVESRSVSTSPSILTAFLKESRAPEHFEQEQLRVICHSSGSHTLELSDSTLAPQESSQCPGIMPQVHIQAAAAESTAFQRENKLASLPGGVLKTSSINLVSSNAQHTCKEDGRLAGMTPVREESTAKKLAGTNSSSLKATAIDQISISACSQAETSYGLGKFETRPSEFAEKTTNGHKTDPDCKLSDSCGSISKADHSGSLDPTNKGDAREKKPASPQVVKEKESTGTDTSDAKTLLLNPKSQESGGTESAANPTPSPIRKNQESTLEENRQTKTATSLSLPSDPMGDSSPGSGKKTPSRSVKASPRRPSRVSEFLKEQKLNVTAAAAQVGLTPGDKKKQLGADSKLQLKQSKRVRDVVWDEQGMTWEVYGASLDAESLGIAIQNHLQRQIREHEKLIKTQNSQTRRSISSDTSSNKKLRGRQHSVFQSMLQNFRRPNCCVRPAPSSVLD

SEQ ID NO: 278192 - DNA, 2331 bp, Artificial Sequence
  derived and/or modified sequence
atgggcaccgtgcccgaccccctgagaagcgccaagaccagcctgatcgccgccagcggcaaggaggacgacctgggcgagccccaggccgccagccccagacacagacccgccctgctgtgcaagaacgccaacggcttcagcggcgcccccgccgagcccgacctgagccccagagccgccgccgaggccctgatgcaggtgtgcgagcacgagaccacccagcccgacatgagcagccccggcgtgttcaacgaggtgcagaaggcccccgccaccttcaacagccccggcaacccccagctgcccggcagcagccagcccgccgccagcgcccccagcagcgccgccggcagagacctgatccacacccccctgaccatgcccgccaaccagcacacctgccagagcatccccggcgaccagcccaacgccatcaccagcagcatgcccgaggacagcctgatgagaagccagagaaccagcaacagagagcagcccgagaagcccagctgccccgtgggcggcgtgctgagcagcagcaaggaccaggtgagctgcgagttccccagccccgagaccatccagggcaccgtgcagacccccgtgaccgccgccagagtggtgagccacagcagcagccccgtgggcggccccgagggcgagagacagggcgccatctgcgacagcgagatgagaagctgcaagcccctgaccagagagagcggctgcagcgagaacaagcagcccagcgtgaccgccagcggcccccagggcaccaccagcgtgaccccccagcccacccccctgaccagcgagcccagcgcctgcccccccggccccgagaaggtgcccctgcccgcccagagacagatgagcagattcaaggaggccagcaccatgaccaaccaggccgagagcgagatcaaggaggtgcccagcagagcctggcaggacgccgaggtgcaggccgtggccagcgtggagagcagaagcgtgagcaccagccccagcatcctgaccgccttcctgaaggagagcagagcccccgagcacttcgagcaggagcagctgagagtgatctgccacagcagcggcagccacaccctggagctgagcgacagcaccctggccccccaggagagcagccagtgccccggcatcatgccccaggtgcacatccaggccgccgccgccgagagcaccgccttccagagagagaacaagctggccagcctgcccggcggcgtgctgaagaccagcagcatcaacctggtgagcagcaacgcccagcacacctgcaaggaggacggcagactggccggcatgacccccgtgagagaggagagcaccgccaagaagctggccggcaccaacagcagcagcctgaaggccaccgccatcgaccagatcagcatcagcgcctgcagccaggccgagaccagctacggcctgggcaagttcgagaccagacccagcgagttcgccgagaagaccaccaacggccacaagaccgaccccgactgcaagctgagcgacagctgcggcagcatcagcaaggccgaccacagcggcagcctggaccccaccaacaagggcgacgccagagagaagaagcccgccagcccccaggtggtgaaggagaaggagagcaccggcaccgacaccagcgacgccaagaccctgctgctgaaccccaagagccaggagagcggcggcaccgagagcgccgccaaccccacccccagccccatcagaaagaaccaggagagcaccctggaggagaacagacagaccaagaccgccaccagcctgagcctgcccagcgaccccatgggcgacagcagccccggcagcggcaagaagacccccagcagaagcgtgaaggccagccccagaagacccagcagagtgagcgagttcctgaaggagcagaagctgaacgtgaccgccgccgccgcccaggtgggcctgacccccggcgacaagaagaagcagctgggcgccgacagcaagctgcagctgaagcagagcaagagagtgagagacgtggtgtgggacgagcagggcatgacctgggaggtgtacggcgccagcctggacgccgagagcctgggcatcgccatccagaaccacctgcagagacagatcagagagcacgagaagctgatcaagacccagaacagccagaccagaagaagcatcagcagcgacaccagcagcaacaagaagctgagaggcagacagcacagcgtgttccagagcatgctgcagaacttcagaagacccaactgctgcgtgagacccgcccccagcagcgtgctggactag

SEQ ID NO: 278193 - DNA, 2331 bp, Artificial Sequence
  derived and/or modified sequence
atgggcacagtgcccgatccactcagaagtgccaagactagtctgatcgccgcttctggcaaggaggatgatctgggtgaaccacaggccgctagcccacgacacaggccagctctgctgtgtaaaaacgctaatggattctccggagctcctgccgagcccgacctaagccctcgggctgcagccgaggcattaatgcaggtttgtgaacatgaaactacacagcccgatatgagtagtccgggagtcttcaacgaagtgcagaaggctcccgccacgtttaattccccagggaatccacagttgccagggtcaagccagccggccgccagcgccccttcaagtgccgcaggacgggacctgattcacaccccgctaaccatgcccgccaaccagcacacctgccagagcatcccaggcgatcagcccaacgccattactagctcaatgcctgaagattctctgatgagaagccagagaactagcaaccgggaacagcccgagaagcctagctgcccagtgggcggcgtcctgtcctcaagcaaagatcaggtatcttgcgaattcccatcccccgagacgatccaggggacagtgcagaccccagttactgcagcacgcgtcgtgtctcacagtagtagtccagtcgggggacctgagggcgaacggcaaggggccatttgtgatagcgagatgcggtcatgcaagcctttgactagggagtctggatgttctgaaaataagcagccaagcgtgaccgccagtggcccccaggggaccacctcagtgaccccccaacccaccccattaactagtgagccttctgcttgtccaccaggtcctgagaaggttcccctgcctgctcagcggcagatgagccgttttaaggaggcctccaccatgacgaaccaagcagaaagcgaaatcaaggaggtacccagtcgtgcgtggcaggatgctgaggtgcaagccgtcgcctccgtcgaaagccgttcggtgagcacctctccaagtatactcaccgccttcctgaaagagagcagggccccagagcacttcgaacaagagcaactgcgagtcatctgtcacagctccggaagccatacactcgaactgtcagactcaacgctagcaccccaggaaagctcacagtgtccaggaataatgcctcaagttcacattcaagccgccgcagctgaatccaccgcctttcaacgtgagaacaagctggccagcctaccaggcggcgtccttaagacgtcctcaattaacctggtgagctcaaacgctcagcacacatgcaaggaggatggaaggctggccggaatgacgcccgttcgtgaagagtctaccgctaaaaaactcgccggcacgaactcaagtagtctgaaggcgacggccatagatcagatctctatatccgcatgctctcaggctgaaacctcctacgggttaggaaaattcgaaacccgaccttccgaattcgcggagaaaacaaccaatgggcacaaaaccgatccagactgtaagctcagtgacagctgcggctcaatctcaaaggccgaccactccggttccctcgaccctaccaataaaggcgacgcgagagaaaagaagccagcttcaccccaggttgtgaaagaaaaggaatcaacagggactgatacatccgacgccaagaccctcctcctgaatccaaaaagccaggaaagcggggggaccgaatctgctgctaaccccacaccaagcccgattagaaagaaccaggaaagtacactggaagagaaccggcaaacaaagacagccactagtcttagcctgccatccgatccaatgggtgatagctctcccggatctggcaagaagactccctcgcggtctgtcaaggcttccccccgccgcccatcacgcgtgagcgaatttctcaaagaacagaagctgaacgtgacagcggcagcggcccaggtgggactgactcccggggacaaaaagaagcagctcggggctgattccaagcttcagttaaagcaaagcaagagggtgagggacgtcgtgtgggatgaacagggtatgacctgggaggtttatggagcttccttggatgccgagtctctgggtatagctattcagaaccacctgcagaggcagatcagagaacatgagaagctgattaaaactcagaattcccaaactcggaggagtatttcgtcggacaccagtagcaacaagaaactcaggggcagacaacactccgtgttccagtctatgcttcaaaacttccggcgcccgaactgttgtgtgaggccagccccctcctctgtgttggattag

SEQ ID NO: 278194 - DNA, 2331 bp, Artificial Sequence
  derived and/or modified sequence
atgggcaccgtgcctgaccccctgcggagcgccaagaccagcctgattgctgccagcggcaaggaggatgacctgggggagccccaggccgccagccccaggcacaggcctgccctgctgtgcaagaatgccaacggcttcagcggggccccagctgagccagacctgagccccagggctgctgctgaggccctgatgcaggtgtgtgaacatgagaccacccagcctgacatgagcagccctggggtcttcaatgaggtgcagaaggccccagccaccttcaacagccctggcaacccccagctgcccggcagcagccagcctgctgccagcgcccccagcagcgctgctggccgggacctgatccacacccccctgaccatgcctgccaaccagcacacctgccagagcatccctggggaccagcccaatgccatcaccagctccatgcctgaggacagcctgatgaggagccagaggaccagcaaccgggagcagcctgagaagcccagctgccctgtgggcggcgtgctgagcagcagcaaggaccaggtgtcctgtgagttccccagccctgagaccatccagggcaccgtgcagacccctgtgacagctgcccgggtggtgagccacagcagcagccctgtgggcggccctgagggggagcggcagggcgccatctgtgacagcgagatgaggagctgcaagcccctgacccgggagagcggctgcagcgagaacaagcagcccagcgtgacagccagcggcccccagggcaccacctctgtgaccccccagcccacccccctgaccagcgagcccagcgcctgccccccaggccctgagaaggtgcccctgcctgcccagaggcagatgagccgcttcaaggaggccagcaccatgaccaaccaggccgagagcgagatcaaggaggtgcccagccgggcctggcaggatgctgaggtgcaggccgtggcctctgtggagagccgctctgtgtccaccagccccagcatcctgacagccttcctgaaggagagccgggcccctgagcactttgagcaggagcagctgcgggtcatctgccacagcagcggcagccacaccctggagctgagtgacagcaccctggccccccaggagagcagccagtgccccggcatcatgccccaggtgcacatccaggccgctgctgctgagagcacagccttccagcgggagaacaagctggccagcctgcccggcggcgtgctgaagaccagcagcatcaacctggtgagcagcaatgcccagcacacctgcaaggaggatggccgcctggccggcatgacccctgtgcgggaggagagcacagccaagaagctggccggcaccaacagcagcagcctgaaggccacagccatcgaccagatcagcatcagcgcctgcagccaggccgagaccagctatggcctgggcaagtttgagacccggcccagcgagtttgctgagaagaccaccaacggccacaagacagatcctgactgcaagctgagtgacagctgtggcagcatcagcaaggctgaccacagcggcagcctggaccccaccaacaagggagatgcccgggagaagaagccagccagcccccaggtggtgaaggagaaggagagcactggaacagacaccagtgatgccaagaccctgctgctgaaccccaagagccaggagagcggcggcacagagagcgctgccaaccccacccccagccccatcaggaagaaccaggagagcaccctggaggagaaccggcagaccaagacagccaccagcctgagcctgcccagcgaccccatgggagacagcagccctggcagcggcaagaagacccccagccgctctgtgaaggccagcccccggcggcccagccgggtgtctgagttcctgaaggagcagaagctgaatgtgacagctgctgctgcccaggtgggcctgacccctggggacaagaagaagcagctgggcgctgacagcaagctgcagctgaagcagagcaagagggtgagagatgtggtgtgggatgagcagggcatgacctgggaggtgtatggagccagcctggatgctgagagcctgggcatcgccatccagaaccacctgcagaggcagatccgggagcacgagaagctgatcaagacccagaacagccagacccggcgcagcatcagcagtgacaccagcagcaacaagaagctgcggggccggcagcacagcgtcttccagagcatgctgcagaacttcagaagacccaactgctgcgtgcggcctgcccccagctctgtgctggactag

SEQ ID NO: 278195 - DNA, 6352 bp, Artificial Sequence
  derived and/or modified sequence
aaagctgtcgcccctctctcggatgctcaggctgggcagcgctggacagatgggtacaccccgggcctgacggatgaacagtcgggcaagtgaactctcacctccaaactggctctgcgcccggcgggggcggcggcggcgtctgcagccccgcggtgggggcagccccctcggtctacgcccgactgctgcgcgccgcctctgctcttggcatagtaatttcagttcctgaacgcacggagctcgctccgggaccgggctgagaaggacctcagctcgcgggcccgccggagccatcggtgtggcgccgagagacggtgcttgggatatgcgacgggaagcccccgccacagcgcaggcagtggccccgccgcgccgcggagccgggcagagcaggctggttcttcagaggaatcatccctgactgtgtcatcactctgagctctgactgcgctcccctcccccaccagtgggaccagtactcaagagagctctggagtgctcctgaagagaaattccatggggactgtacctgaccctctgagatcagctaaaacttccctgattgcagcttccggaaaagaagacgatctaggagagccacaggctgcctcacctcggcatcgaccagctctcctgtgtaagaatgccaatggcttttcaggtgcccctgcagaaccagacctcagccccagggcagctgccgaagccctgatgcaggtttgtgagcatgagaccacccaaccagatatgtcttctcctggtgtgttcaatgaagtgcagaaagcacctgccacattcaactctcccggcaatccccagctgccagggagcagccagcccgcagcatcagccccgagttctgcagcaggaagggatcttatacacacaccattgacaatgcccgccaatcagcacacctgccagtccatcccaggtgatcagcccaatgccatcacctcatccatgcctgaagattccctgatgagatcacagagaacctcaaatagagagcaacctgagaaaccaagttgtcctgtgggaggcgtcctcagtagcagcaaagatcaggtgtcctgtgagtttccttctccagaaacaatccagggaacagtgcagactccagtgacagcagccagggtggtcagtcactcatcctctcctgtaggtggacctgaaggggaaaggcagggagccatctgtgactctgaaatgaggtcctgtaaacctctaactagagaatctggatgttcagagaacaagcagccctctgtcactgcctcgggcccccaaggcacaacttctgtgacacctcaaccaacccccctcactagcgaaccttcggcatgtcccccaggtccagagaaggtgccgctgccagcacagcgtcagatgtcaaggttcaaagaagccagtacgatgaccaaccaagctgaaagtgaaatcaaggaagttcccagcagggcttggcaagatgcggaggtgcaggcagtggcgagtgtcgagagcagatccgtctccaccagccccagtatcctcactgcatttctgaaggaaagccgtgctcctgagcattttgaacaagagcagctgcgtgtcatttgccacagcagtgggagccacacactggagctctctgacagcacgctagccccccaggagtccagccagtgccctggcatcatgccacaggtgcacattcaggcagctgcagctgagtctacagctttccaacgggaaaataaacttgcgagcctaccaggtggggtccttaaaacctcatcaatcaatttggtctccagtaatgcccagcatacgtgtaaagaagatgggaggttagcaggaatgactccagtgagggaagagtcaactgctaaaaagctcgcaggtactaattctagctccctgaaagctaccgccattgaccagatttctatcagtgcatgcagtcaagctgaaacaagttatggattggggaaatttgaaaccaggccatctgagtttgcagagaaaacgacaaacggccacaaaacagacccagattgcaaactatctgactcttgtggctctatcagcaaagctgatcattctgggagcttggatcccactaataaaggagatgcaagggaaaagaagcctgcatctcctcaggtagtaaaagaaaaagagtctactggcactgatacctcggatgccaaaaccctactgctcaatcctaaatcccaagaaagtggaggcacagaatcagctgctaatcctacaccctccccaattaggaagaaccaggagagcaccttagaagaaaacagacagaccaagacagccaccagcctgagcctgccatctgatcccatgggtgactccagcccaggttctggcaagaagaccccatctcgctccgtcaaagccagcccacgcaggcccagccgcgtcagcgagttcctcaaggagcaaaagttaaatgtgacagcagctgctgctcaggtaggactcactccaggagataagaaaaagcagcttggcgcagactccaagctccagctgaaacagtccaagcgtgtcagggacgtcgtgtgggatgagcagggaatgacctgggaagtgtatggtgcatccttggacgcagagtccctgggaatcgcgatccagaaccatttgcaaagacaaatcagggaacatgagaaattaatcaaaactcaaaatagccagacccggagatccatttcctcagatacttcttcaaataagaagctcagaggaaggcagcacagtgttttccagtccatgctgcagaacttccgacgccccaactgctgcgtccgtcctgccccgtcttctgtgttagattgaaagggagtatttatgggagtttgtgtataaatttacggtattcacatgcgtccctctatgtcaaagcttgcttagttttttgctgcaagactaggaagaaaaagcaagtattcactataggaaattgctattaaaaattgttagatcctttgacctggagctctataaacaaaaatgtcatttcaatttgaaagaaggaacaagaaaagagaaacaagcttcactgaaggtttgcaaccttaacaaattgaaaataatactcactgggtttttaaaaatatgatgttgttcatagaaatagcattattgtatcattatacatgtattattttgtataactgcctcaatttatcacacagtagtagttccattaaaatccctgcttcatattgaaagtagcaaaaacactattggcgaaaacattgttataatttctagtcttattgcagtaagaatgctgtaaccacacaaattataaataggtgataagaaccataatgaaaaaaatgagaacatatttgattcattcctaggccagataacattaaataaaaacagttaaatgtgtaaaatatgaaatatgaattaatgtttataaacatctgcagacaactctttttataaaccttcttattgctgttaataaatataagaaagttatattaggaacattagctaagcttttgactatgaaaactgcctacattaaacatggatttatatagacccattttcctgcactgaaggcaaggcgcatctctgtgattctgaccagacatattcatattttcttaccctagaggaagtacatgggactgaattcttgaaaagagccatcaaattagggataatactaaattgatactgtgcaggtgttctccagtgatattctactgagaatgctaaggttctggtcaggaactataaatagcagattaccaaacactgctttttctgtgatgataaaagcctcataagtaacaaaaacaatgtttaatttagactcctgtaaacaggatgcaattagtgattttttttaattgggttcagtaacttccagtaacaaatgtagtcaacaccaaattagaatgtgagcttccttacaatttttgtacatagactactatcatctaattgcttaaatatatatgctggagtaaaaaggtaacttctgcaaacttattgattttaagagaaatacccataatatccttcaaacccaatgaaagaagaggcctttacgaaaacatggcttgtgatttgggtggattatacttcctgggaccttggccctcccgtgtctccagaagagacgtgtgtcccgagacacatgagtatcctccaaggcactggcctggatgagcagcatcgccttgagaattggggtagtgtggaaaggaagaatgaacaacggccctgggaagccttcccttcctgcagatattgttgggggagtgctggtctccattttgcgtttagaaaaccagacttagatgctggaggggcaccggttgtcttctttgaactcattccccgtaatgagctagaaaagagtacctaaccataggtattctctctagagactcatgtgtcccgtgggtacagtcaattcacagtatctgttctggcttttttcactttaattctgttctgcacattctgaacatatgcaggaaaaaaaatcattcctgaacttagcacaagctacactcgacacaacctaaattagtaaaaagcctttgatttattttgaagcaatttaactgtagacaaagcttgcatatatggaacagtattctcagagcctgagagttgttacagttgttctatttggaaattagaaggaattttttaataaggcacatttttcagtttcttacccattggtgtctattaagaatactatgtaatgttgaaatttccatcaaattaccaagcaaattactattaatgattagagatttagcctaacactctctctttgggccttaaatacccatttgtagttgtgttcgtgtcacttctgtctcagatgcctctgccaggacataatctctctaactcttgctagctggcttctccctcccacatgggcatacatgctgtgtatacacagagtacagcctgtgtacacagtagcagctgtcaacagggcctactccagatgggtggccccaggtaatcctctgctgtaaagtggctagaacaggctgtccctgcattaaaataggtgagaataaggaatttcgcctctgataataatatttattttcatgactttagagtaaccacatgatttgtaaacagttaaatgaagcagaggcctgagagagttgttggcatttgtctcacattaaatacattaaaattgctagatttgctattgtggttatgtctatcaaaactttaagaaaatttgtttaatgtactgagtttaactgattttctttggtgctgggaccaaattcttcacttctacaacactcaagagattgtcacaaaatattacaaaaatattgtttgttttgtggctcattaaaccctatataactaacagcttttaaggacattaacagaaatatatcttcagatggataaataagatagggacctattcaagacagcagcatttttgtattgtgatacctcccctaagttactctcacaataaaaccttatttgagaattttccttcacttcaatctgtgacatagcattaggcatttagtataccttatttgtgaaacctaaggttcattcaacagatgaagctgcaaaacagttttcttggtagactcttggaacttgctcagttttttccttactttacctgcatgacacacattgggttgaaagttgtttggttttacccttcatttctcttagatatgatttggttctttttcatgcattatatttttgaaatatatggaggaaatattttattgaatcaagaaatagaaaatattccttaaaccagtagtaaaaaggtgagttagaactccatgtctggaagacaattcaacatttaaaatattaagatgctataccacttaacaagtgaatactaaaatttttaatttaaagattgattgttctgtttttatgaccatgagaaaaatgtgacagcttcagctgtcatatgtttatcttgaatgcttttctaattatgtatttctggattattgactttgaatgccacagaccaactactttacatagagtaaaatattgattaacctttgtgctttgggtcactggcaaaagttgaacatcctgataagtcaatgttaaccagaaacctttttgttcacgtctgaaattgaatatttataaaatgtgttagtatgtttcctgccttgataagttcacctatattgaatgtaatttgatctttgataattttttttaatcttgagaattctctgatactgttttgaataccagtgttcaccatgttataaagttaaacataaaaattgaaataaattgaactaaatat

SEQ ID NO: 278196 - DNA, 2331 bp, Artificial Sequence
  derived and/or modified sequence
atgggcaccgtgcccgaccccctgcggagcgccaagaccagcctgatagcagcatcgggcaaggaggacgaccttggagagccccaggcagcctctccacgacaccgtcctgcactcctctgcaaaaacgccaatggcttttctggggccccggctgagcctgatctgagccccagagcagccgctgaagctctgatgcaggtgtgtgagcacgagactacccagcctgacatgtcaagtcctggggtgtttaacgaggtacaaaaagctcctgctacattcaattctcccggtaacccacagctgccaggttccagtcagcccgctgccagcgcaccctcatctgctgccggccgggatctgatacacactcccctgaccatgccagccaatcagcatacctgtcagagcattccaggggaccaacctaatgctatcacaagcagcatgcccgaggactctctcatgcgcagtcaacgcactagcaatagggaacaaccagaaaagccctcttgcccagtggggggcgttctgagctcttctaaggaccaggtttcctgcgagtttccaagccccgagaccattcagggaacagtccagaccccggttaccgccgctcgcgtggtttctcacagcagtagtcctgtgggcgggcctgagggggagcggcagggcgctatctgcgactcggagatgcgaagctgcaagcccctaactcgtgagagtggttgctcggagaacaaacagccaagtgtcacagcatccgggccgcagggcactacctctgtgaccccgcagccaacgcctctcaccagcgagccaagcgcctgtccacctggtccagaaaaagtgccacttcccgcgcaaaggcaaatgagccgtttcaaggaggcctccacgatgaccaatcaggctgaatccgagataaaagaggtccccagtcgggcctggcaggacgcggaggtccaggccgtggcctcagtggagagtaggtcagtaagtacctctccatctatactaacagcgttcttaaaagaaagcagggctcccgaacacttcgaacaagaacagcttagggtgatatgccattcctcaggctctcacactctagaattaagtgatagcacattggcccctcaggaatcttcccaatgtcctgggattatgcctcaggtgcatattcaggccgctgccgccgagtcgaccgctttccagagggagaacaaactggccagtcttccagggggcgtgctgaagaccagctccatcaacctcgtaagctcaaatgcacagcacacatgcaaagaggatgggcggttagccggaatgacgccagtgcgcgaagaatcgactgccaaaaaacttgccggcactaactcttcatccctgaaagccacggcaatcgaccagatttcgatctctgcctgttcacaagctgagaccagttatggcctgggtaaatttgagacaaggccgtcagaatttgccgagaaaactacgaatggacacaaaactgacccagattgcaaactctcggattcttgcggctccatctcaaaggccgatcatagtggatcccttgatcctacaaacaagggtgatgcaagagagaagaagcctgcctcaccccaagtagtcaaggaaaaggagagtacgggcacggacacatcagatgccaaaaccctgctgctgaatcccaagagccaagaatctgggggaacagaatccgccgccaatccgaccccgtcgccaatcaggaaaaaccaggaatccaccctcgaggagaaccggcaaaccaagactgccacatccctgagccttcctagcgatccaatgggggacagcagccccgggtctggcaaaaaaacaccctcacgctccgtgaaagcttctccgcgacggccgagtagggtgtccgagtttctgaaagaacagaaattaaatgtgacagccgcagcagctcaggtcggcctcaccccgggagacaagaagaagcaactcggtgccgactctaaactccagctgaaacaaagtaaacgggttagagatgtcgtctgggacgaacaagggatgacctgggaggtttacggggccagcctggatgctgagtctctcggaattgctatccagaatcatttacaaaggcagatcagagagcacgaaaagttaataaagactcagaatagccagactcgaaggagtatatcatcagacacatcatctaataaaaaactgcgtggacgacagcacagcgtcttccagtcaatgctgcagaacttcagaaggcccaactgctgcgttcggcccgcaccctcttctgtgcttgactag

SEQ ID NO: 278197 - DNA, 2331 bp, Artificial Sequence
  derived and/or modified sequence
atgggaaccgttccagacccactaaggtctgccaagacgtctctgattgcagccagcggaaaagaagatgatttaggagaaccgcaagccgcttccccacggcaccgcccagctctcctgtgcaaaaatgcaaacggattttctggcgcacctgccgagccagacctgagcccgcgagccgcagctgaagccttgatgcaggtctgtgagcacgaaactacccagcccgacatgtcaagtccaggggtttttaatgaggttcagaaagcacccgctacattcaattctcctggcaacccccaactgccagggagcagtcagccggcagcgtcggcccctagctcagcagcaggaagagacctgatccacaccccactcacgatgcccgctaaccagcatacttgtcaatcgatacccggtgaccagccgaatgccatcacatctagtatgccggaagactccctgatgcggtcccaacgaacctccaatagagaacaaccggagaaacctagttgccccgtggggggagtacttagtagctccaaagaccaagtgtcatgtgaattcccctcccccgagactatacagggaacggtacagactcctgtcacagccgctcgtgtagtgtcacattcctctagccctgtggggggaccagagggcgagaggcaaggcgctatttgtgattcagagatgagaagctgcaagcccctgactagggagtcaggttgtagcgagaacaagcaacccagtgtgacagcttccgggccacagggaaccacaagcgtgacaccacagcccaccccgctgacctccgaaccatccgcctgccccccagggccagaaaaggtgcccctacctgcccagcgacagatgagccggttcaaggaggccagcacaatgacaaatcaggctgagtctgagatcaaagaagttccctccagagcctggcaggatgccgaagtgcaggccgtggcctcagtcgaaagcagaagcgtttccacatctccatctatcctgaccgccttcttgaaagaatcccgtgctcctgagcactttgaacaggaacaactcagggtgatttgccactcgagcggcagtcacacattagaactcagtgacagcaccctggcaccccaggagagctcacagtgtcctggcattatgcctcaggtccatatccaggcggcagctgctgaatctacggccttccaacgggaaaataagctggcaagcctgccaggaggcgttttgaagacatctagcattaacctggtaagctctaacgctcaacatacctgcaaagaggatggccgtctcgccggtatgactcctgtgagagaggaatccaccgcaaagaagctggccggaactaactctagtagtctgaaggcaacagctattgaccagatcagcatttccgcatgttctcaggccgagactagttacggactggggaagttcgagactcggcctagtgaatttgcagagaaaaccaccaacggacataagaccgaccccgattgtaaactgtccgacagctgcgggtcaataagcaaggccgatcactcaggcagcctcgaccccactaacaaaggagacgccagggagaagaagccagcttccccccaggtggtgaaggagaaagagtccaccggaactgatacctcggacgcgaaaacactcctgctgaaccctaaaagtcaggagagcggaggcacagaatctgctgccaatcccacacctagcccgatccggaagaatcaggaatcaacactggaagaaaatcggcagactaaaaccgcaacaagcttgagcctgcccagtgaccccatgggagactcgagccccggaagtggcaagaagactccctcacgatcagtcaaagcatccccgcgaagaccatcaagagtttcagagttcctgaaagagcagaagctaaatgtcacagcagccgctgctcaggtcgggctgacccccggagataaaaagaagcagctgggagctgattcaaagttacagctgaagcagtctaagagagtaagggacgtcgtctgggacgaacagggcatgacctgggaagtgtacggcgcatccctggacgccgagagtctaggaattgcaattcagaaccacctgcagcgccagattcgggagcacgaaaaactgatcaagacccagaattcccagacccgaaggtccatatcttctgatacctcttctaacaaaaaactgagggggcgtcaacatagcgtcttccagagtatgctccagaattttaggaggccaaattgttgcgtgcgaccagccccttctagcgtgctggactag

SEQ ID NO: 278198 - protein, 3924 aa, Artificial Sequence
  derived and/or modified sequence
MMNEDAAQKSDSGEKFNGSSQRRKRPKKSDSNASFLRAARAGNLDKVVEYLKGGIDINTCNQNGLNALHLAAKEGHVGLVQELLGRGSSVDSATKKGNTALHIASLAGQAEVVKVLVKEGANINAQSQNGFTPLYMAAQENHIDVVKYLLENGANQSTATEDGFTPLAVALQQGHNQAVAILLENDTKGKVRLPALHIAARKDDTKSAALLLQNDHNADVQSKMMVNRTTESGFTPLHIAAHYGNVNVATLLLNRGAAVDFTARNGITPLHVASKRGNTNMVKLLLDRGGQIDAKTRDGLTPLHCAARSGHDQVVELLLERGAPLLARTKNGLSPLHMAAQGDHVECVKHLLQHKAPVDDVTLDYLTALHVAAHCGHYRVTKLLLDKRANPNARALNGFTPLHIACKKNRIKVMELLVKYGASIQAITESGLTPIHVAAFMGHLNIVLLLLQNGASPDVTNIRGETALHMAARAGQVEVVRCLLRNGALVDARAREEQTPLHIASRLGKTEIVQLLLQHMAHPDAATTNGYTPLHISAREGQVDVASVLLEAGAAHSLATKKGFTPLHVAAKYGSLDVAKLLLQRRAAADSAGKNGLTPLHVAAHYDNQKVALLLLEKGASPHATAKNGYTPLHIAAKKNQMQIASTLLNYGAETNIVTKQGVTPLHLASQEGHTDMVTLLLDKGANIHMSTKSGLTSLHLAAQEDKVNVADILTKHGADQDAHTKLGYTPLIVACHYGNVKMVNFLLKQGANVNAKTKNGYTPLHQAAQQGHTHIINVLLQHGAKPNATTANGNTALAIAKRLGYISVVDTLKVVTEEVTTTTTTITEKHKLNVPETMTEVLDVSDEEGDDTMTGDGGEYLRPEDLKELGDDSLPSSQFLDGMNYLRYSLEGGRSDSLRSFSSDRSHTLSHASYLRDSAVMDDSVVIPSHQVSTLAKEAERNSYRLSWGTENLDNVALSSSPIHSGFLVSFMVDARGGAMRGCRHNGLRIIIPPRKCTAPTRVTCRLVKRHRLATMPPMVEGEGLASRLIEVGPSGAQFLGPVIVEIPHFAALRGKERELVVLRSENGDSWKEHFCDYTEDELNEILNGMDEVLDSPEDLEKKRICRIITRDFPQYFAVVSRIKQDSNLIGPEGGVLSSTVVPQVQAVFPEGALTKRIRVGLQAQPMHSELVKKILGNKATFSPIVTLEPRRRKFHKPITMTIPVPKASSDVMLNGFGGDAPTLRLLCSITGGTTPAQWEDITGTTPLTFVNECVSFTTNVSARFWLIDCRQIQESVTFASQVYREIICVPYMAKFVVFAKSHDPIEARLRCFCMTDDKVDKTLEQQENFAEVARSRDVEVLEGKPIYVDCFGNLVPLTKSGQHHIFSFFAFKENRLPLFVKVRDTTQEPCGRLSFMKEPKSTRGLVHQAICNLNITLPIYTKESESDQEQEEEIDMTSEKNDETESTETSVLKSHLVNEVPVLASPDLLSEVSEMKQDLIKMTAILTTDVSDKAGSIKVKELVKAAEEEPGEPFEIVERVKEDLEKVNEILRSGTCTRDESSVQSSRSERGLVEEEWVIVSDEEIEEARQKAPLEITEYPCVEVRIDKEIKGKVEKDSTGLVNYLTDDLNTCVPLPKEQLQTVQDKAGKKCEALAVGRSSEKEGKDIPPDETQSTQKQHKPSLGIKKPVRRKLKEKQKQKEEGLQASAEKAELKKGSSEESLGEDPGLAPEPLPTVKATSPLIEETPIGSIKDKVKALQKRVEDEQKGRSKLPIRVKGKEDVPKKTTHRPHPAASPSLKSERHAPGSPSPKTERHSTLSSSAKTERHPPVSPSSKTEKHSPVSPSAKTERHSPASSSSKTEKHSPVSPSTKTERHSPVSSTKTERHPPVSPSGKTDKRPPVSPSGRTEKHPPVSPGRTEKRLPVSPSGRTDKHQPVSTAGKTEKHLPVSPSGKTEKQPPVSPTSKTERIEETMSVRELMKAFQSGQDPSKHKTGLFEHKSAKQKQPQEKGKVRVEKEKGPILTQREAQKTENQTIKRGQRLPVTGTAESKRGVRVSSIGVKKEDAAGGKEKVLSHKIPEPVQSVPEEESHRESEVPKEKMADEQGDMDLQISPDRKTSTDFSEVIKQELEDNDKYQQFRLSEETEKAQLHLDQVLTSPFNTTFPLDYMKDEFLPALSLQSGALDGSSESLKNEGVAGSPCGSLMEGTPQISSEESYKHEGLAETPETSPESLSFSPKKSEEQTGETKESTKTETTTEIRSEKEHPTTKDITGGSEERGATVTEDSETSTESFQKEATLGSPKDTSPKRQDDCTGSCSVALAKETPTGLTEEAACDEGQRTFGSSAHKTQTDSEVQESTATSDETKALPLPEASVKTDTGTESKPQGVIRSPQGLELALPSRDSEVLSAVADDSLAVSHKDSLEASPVLEDNSSHKTPDSLEPSPLKESPCRDSLESSPVEPKMKAGIFPSHFPLPAAVAKTELLTEVASVRSRLLRDPDGSAEDDSLEQTSLMESSGKSPLSPDTPSSEEVSYEVTPKTTDVSTPKPAVIHECAEEDDSENGEKKRFTPEEEMFKMVTKIKMFDELEQEAKQKRDYKKEPKQEESSSSSDPDADCSVDVDEPKHTGSGEDESGVPVLVTSESRKVSSSSESEPELAQLKKGADSGLLPEPVIRVQPPSPLPSSMDSNSSPEEVQFQPVVSKQYTFKMNEDTQEEPGKSEEEKDSESHLAEDRHAVSTEAEDRSYDKLNRDTDQPKICDGHGCEAMSPSSSAAPVSSGLQSPTGDDVDEQPVIYKESLALQGTHEKDTEGEELDVSRAESPQADCPSESFSSSSSLPHCLVSEGKELDEDISATSSIQKTEVTKTDETFENLPKDCPSQDSSITTQTDRFSMDVPVSDLAENDEIYDPQITSPYENVPSQSFFSSEESKTQTDANHTTSFHSSEVYSVTITSPVEDVVVASSSSGTVLSKESNFEGQDIKMESQQESTLWEMQSDSVSSSFEPTMSATTTVVGEQISKVIITKTDVDSDSWSEIREDDEAFEARVKEEEQKIFGLMVDRQSQGTTPDTTPARTPTEEGTPTSEQNPFLFQEGKLFEMTRSGAIDMTKRSYADESFHFFQIGQESREETLSEDVKEGATGADPLPLETSAESLALSESKETVDDEADLLPDDVSEEVEEIPASDAQLNSQMGISASTETPTKEAVSVGTKDLPTVQTGDIPPLSGVKQISCPDSSEPAVQVQLDFSTLTRSVYSDRGDDSPDSSPEEQKSVIEIPTAPMENVPFTESKSKIPVRTMPTSTPAPPSAEYESSVSEDFLSSVDEENKADEAKPKSKLPVKVPLQRVEQQLSDLDTSVQKTVAPQGQDMASIAPDNRSKSESDASSLDSKTKCPVKTRSYTETETESRERAEELELESEEGATRPKILTSRLPVKSRSTTSSCRGGTSPTKESKEHFFDLYRNSIEFFEEISDEASKLVDRLTQSEREQEIVSDDESSSALEVSVIENLPPVETEHSVPEDIFDTRPIWDESIETLIERIPDENGHDHAEDPQDEQERIEERLAYIADHLGFSWTELARELDFTEEQIHQIRIENPNSLQDQSHALLKYWLERDGKHATDTNLVECLTKINRMDIVHLMETNTEPLQERISHSYAEIEQTITLDHSEGFSVLQEELCTAQHKQKEEQAVSKESETCDHPPIVSEEDISVGYSTFQDGVPKTEGDSSATALFPQTHKEQVQQDFSGKMQDLPEESSLEYQQEYFVTTPGTETSETQKAMIVPSSPSKTPEEVSTPAEEEKLYLQTPTSSERGGSPIIQEPEEPSEHREESSPRKTSLVIVESADNQPETCERLDEDAAFEKGDDMPEIPPETVTEEEYIDEHGHTVVKKVTRKIIRRYVSSEGTEKEEIMVQGMPQEPVNIEEGDGYSKVIKRVVLKSDTEQSEDNNE

SEQ ID NO: 278199 - DNA, 11775 bp, Artificial Sequence
  derived and/or modified sequence
atgatgaacgaagacgccgcccaaaagtccgacagcggggaaaagttcaacgggtcatcgcaacgcaggaaacgacccaaaaagtccgactcaaatgcttcttttttgagggccgcacgcgcgggaaacctagacaaggtcgtcgagtacctaaaaggaggcatcgacatcaacacctgtaatcagaacggcctgaacgccttacacttggctgcaaaggaaggtcacgtagggttggtacaggagttactgggcaggggctccagcgttgactctgctacgaaaaaaggcaatacagctcttcatattgcctctctggctgggcaggcagaagtggtgaaggtcctggtgaaagaaggcgcgaatattaatgctcagagtcagaatggatttaccccgctctacatggccgctcaagagaaccatatcgacgtggtaaaatatttgctcgaaaatggagctaaccaatccaccgctactgaagacgggttcacacctcttgcggtagcccttcagcagggccacaatcaggccgtggctattctattagagaacgacacaaagggcaaagtgaggttgcccgcattacacatcgccgctcgaaaggacgacacaaagtcagccgctctacttctgcagaatgaccataacgccgatgtacagtctaaaatgatggtgaacagaacgactgagtcagggttcacccctttgcatattgccgcacactacgggaacgtgaatgttgcgactctcctgcttaacagaggcgccgcagtggactttaccgcaaggaacggcattacccctctgcacgtagccagtaagcgcggaaacaccaacatggtcaagttgctgctggacagagggggtcagattgatgctaaaaccagagatgggctgaccccactccactgcgccgctcggtctggacacgaccaggtcgtggagctcctgctcgagaggggtgcaccactgcttgcaagaactaagaatggactgtcacctctgcacatggcggcacagggggaccacgtggaatgtgttaagcacttgctgcagcacaaggcaccagttgacgatgtgacactagattaccttaccgcactccatgtggccgctcactgcgggcactaccgtgtgactaagcttctcctcgataagcgcgctaacccaaacgccagggcacttaacggatttaccccattgcatatcgcgtgtaaaaagaacaggatcaaagtaatggagcttttggtcaagtacggcgccagcattcaggctatcactgagagcggattgactcccattcacgtggcagcctttatgggacacttaaatatcgtcttgctcctgttgcagaacggagcttctccagatgtgaccaatattagaggagagacagccctgcacatggcagctagagcggggcaggtggaagtggtgcgatgcctactgcgaaacggggccctggtggacgcacgcgccagagaagagcagactcccctgcatattgcatcacgtctgggtaagacggagattgtgcagttgctgctgcagcatatggcacacccagatgcggcaaccactaacggctacactcccctccacatctctgctagagaagggcaggtggatgtggccagtgtccttctcgaagccggagcagctcactccctggccaccaaaaagggttttacacctctgcatgtggcagctaagtacggcagcctggatgtagctaagctattactgcagagacgagccgcagccgactcagccggcaaaaacggcctgactccattgcacgtcgctgcccactatgataaccagaaagtggcgctcctactgctggagaaaggggcgagtcctcatgcaaccgccaagaatggctacaccccactacacattgcagctaagaagaaccagatgcagatcgcctccacacttctcaattacggggctgaaactaatattgtcactaagcagggcgttacccctctgcatcttgctagccaggaaggacacaccgatatggtgacgctgctgcttgacaaaggtgctaacatccatatgtccactaaaagcggactgacctctctccacttggccgcacaggaggataaggtcaatgtggcagacatcctgacaaaacatggagccgaccaggatgcgcataccaagctaggctatacccccttgattgtggcttgtcattacgggaatgtcaagatggtcaacttccttctgaagcaaggggctaatgtcaacgcaaagaccaaaaacggctatacccctttgcaccaagcagcccagcaggggcatactcacattattaacgtgctgctgcagcatggcgcgaaacccaatgccacgaccgcaaatggcaacaccgcattagcgatcgcgaaaagactcgggtacatttccgtggtagacaccctgaaggtggtgacagaggaggtgaccactacaacgaccacaatcacagagaaacacaaattgaatgtccccgagacaatgacagaggtgctcgacgtcagcgatgaggaaggagacgatacaatgacaggcgatggtggcgagtatctgcgccctgaggatttgaaggagctgggcgacgacagcctcccaagcagccagttccttgatggcatgaattacctccggtacagcttagaaggcggaaggagcgactccttgagatctttctcctctgacaggtctcacacacttagccatgcttcttacttgcgtgactctgctgtgatggacgactctgtagtgataccatcacaccaggtgtcaaccttagccaaagaggccgaaaggaactcctatcgcctgtcctggggcacagagaacctggataatgtggccctgagcagcagtcctatccactctgggttcttagtgtcgttcatggtggatgctcggggcggcgcgatgcgcgggtgccggcacaatggccttcgcataatcatccctcctcggaaatgcactgccccgacgagagttacctgtcggctggtcaagaggcacaggctcgccaccatgcctccgatggtagagggagagggacttgctagccggttgatagaagtcggtccatctggggctcaattcttgggaccggttatagtggaaatcccccacttcgcagcgctgagggggaaagagagggagctggtggttctccgaagtgagaacggcgacagttggaaggaacatttttgtgactacactgaggatgagctaaatgagatactgaatggcatggatgaagtgctggatagtcctgaggacttggagaaaaaaaggatttgccgcattatcactcgcgatttcccgcagtatttcgcggtggtcagtcgcataaaacaagacagtaacttaatcggccctgagggaggcgtactaagttccacagtggtaccacaggtccaagccgtgttccctgagggcgctttgacaaaaaggatccgggtcgggctgcaggcccaaccaatgcacagtgaactcgtaaagaaaattctcggcaacaaggcgacgtttagccctattgttacactcgaaccacgtagacgcaaatttcacaaacccattaccatgacgatcccagttcccaaggcttctagcgacgtgatgcttaacggctttgggggggatgcccccaccttgagattgctgtgttcgatcactgggggcaccaccccagcccagtgggaggatatcacaggcacaacacccctgacattcgtgaacgagtgtgtaagttttaccaccaatgtgagcgctagattttggctgattgactgcaggcagatccaggaatcagtaacattcgcctcacaggtatatcgtgaaatcatctgcgtaccgtatatggccaaattcgtcgtattcgccaagtcgcacgaccctatagaagcgcgcctaagatgcttctgcatgaccgatgacaaggtggataaaactctcgagcagcaggaaaattttgctgaggtcgccaggtcccgggacgtggaagtattggaaggaaagccgatttatgtggactgctttgggaacctagtgcctctgacaaaaagcgggcagcatcatatctttagtttctttgcctttaaggagaaccgcctcccattattcgtcaaggttagggataccacccaggaaccctgcggtcgtctaagttttatgaaggagcctaagtccaccaggggactcgtgcatcaggcaatctgtaatctgaatatcaccttgccaatctatacaaaagagtcagagtcagatcaagagcaggaggaggaaattgacatgacgtccgaaaaaaacgacgaaactgaatccaccgagacatctgtgctgaagagccatctcgtcaacgaggtgccagtgctcgccagtcctgatctgctgtcggaggtttccgaaatgaaacaggaccttatcaagatgacagcaattctgaccactgatgtgagtgataaggccgggtctataaaagtgaaggaactggttaaggccgccgaggaggagcccggcgaacccttcgaaatcgtcgagcgggtgaaggaggacctggaaaaggtgaacgagatcctgcgctccggaacttgcacccgagatgagagctctgttcagtcctctagaagcgaaaggggtctcgtggaggaggaatgggtgattgtgtccgatgaggagatcgaagaggctagacagaaagccccactcgagataaccgagtacccctgtgttgaagtgagaattgataaggagattaaggggaaggtggaaaaagactccacaggattggtgaactacctgaccgatgacttgaatacctgcgtacctctcccaaaggaacaacttcagacagtgcaggataaggcgggtaagaaatgtgaggcactggctgtgggcagaagcagcgagaaagagggtaaagatatccctcccgacgaaactcagtctactcagaaacagcacaaaccatctctaggcatcaagaaacctgtgcgaaggaaacttaaggaaaaacaaaaacagaaggaggagggactccaagccagtgcagagaaagcagagctgaaaaaagggtcatccgaggagtccttgggtgaggatcctggtcttgcccccgagcccctacccacagtgaaagcaacatcacccctaatcgaggagaccccaataggatccattaaggacaaggtcaaagccttgcagaagagggttgaggatgagcagaagggcagaagcaaactgcctataagagtgaagggtaaggaagacgtgcctaagaaaacaactcacaggccacatccggcagcctccccttcccttaagagtgaacgacatgccccaggcagccccagtcccaaaacagagaggcactctaccttgtcttcaagtgccaagactgaacgtcaccctccggtcagtccctcctctaagaccgagaagcatagtcccgtgtctccatctgctaaaactgagcgtcactcacccgccagttcctcttctaaaaccgagaaacattcccccgtctcgccgtctaccaagaccgagcgccactcacccgtctcatccacgaagactgaaaggcaccctccagtttccccttcggggaaaacagataaaaggccgcctgtgtctccatcagggcgcacagagaaacaccctcccgttagccccggacggaccgagaagaggttgcctgtgtcaccttctggaagaacggacaagcatcagcctgtgtctaccgctggaaaaacagagaaacaccttcccgtttcaccatccggtaagactgagaagcagcccccagttagccccaccagtaagacggagcgtattgaagaaacgatgtcggtcagagaactgatgaaagctttccaaagcggccaggacccaagtaaacacaagactggcctgtttgaacataaatctgccaaacagaagcaaccgcaggaaaagggtaaggtgagagtagaaaaggaaaagggcccaattttgacacagagggaggcacagaaaacagagaatcagactataaaacgcgggcagagacttcctgtcaccggcaccgctgagagcaagagaggcgtgagagtctccagcatcggggttaagaaagaggacgccgctggaggaaaagagaaggttctctcacacaagattccagaacctgtgcagagtgttcctgaagaagaatctcatcgggagtctgaagtgcctaaagagaagatggcagatgagcaaggggatatggacctgcaaatctcacccgaccggaaaacatccacagacttttctgaggtcatcaagcaggagctggaggataatgataagtaccagcagtttcgcctgagtgaggaaacagagaaagcccagctgcacttggaccaggtgctcacttcaccgtttaacaccacgtttcccctagactacatgaaagacgaatttctgcccgctcttagtctgcagtcaggcgccctcgacggctccagtgagtcactgaaaaatgagggggtagccggaagtccatgcggttccctcatggaaggaacgcctcaaatatcaagcgaagagtcatacaaacacgaaggcttagcggagacccccgaaacgtcacccgaaagcctgagcttctctcctaagaaatcggaggagcagactggggaaacaaaagagtctaccaagactgagacgacaaccgaaattagaagcgagaaggaacaccccaccaccaaggacatcacaggcggttcggaggaaaggggggccaccgtaacggaagacagtgaaaccagtaccgagagttttcagaaagaagccacactggggtccccaaaagacacatcacccaaaaggcaggacgactgcacaggtagctgctccgtggctctggcaaaagagacgccgacaggcctgacagaggaggccgcttgcgatgagggacagcggacttttggctcaagcgctcataagacccagaccgattcagaggtccaggaaagcaccgcgacctccgacgaaaccaaggcgctgccactcccagaggcctccgtgaagaccgatacaggcactgagagtaagccccagggtgtgattcgttcacctcagggtcttgagttggccttgccgtcccgggatagcgaagtgctgtctgccgtcgcagacgacagcttggctgtctcacataaagattccctcgaggccagccccgtgctggaggacaatagctcgcataagacgcccgacagcctggaaccaagtccactgaaggaaagcccctgccgggattccttggaaagttcaccggtagagccaaagatgaaagccggcatctttcctagtcacttcccacttcccgccgccgttgccaagactgaactcctaactgaggttgcttccgtgagatcaaggctccttagggatccagatggctccgcggaggacgactccctggagcagacttctctcatggagtcgtccggtaagtctcccctcagtcccgacacacccagctcagaagaagtttcttacgaggttactcccaagaccaccgacgtctcaacacctaagcccgctgtgatccacgaatgcgcagaagaggatgattcagagaacggcgagaaaaaaagatttacccccgaggaggaaatgttcaagatggtgacaaaaatcaaaatgttcgatgaacttgagcaggaagccaagcaaaagcgggactataagaaggagcctaagcaggaagaaagctcttcaagtagcgaccccgacgctgactgttctgtggacgtcgacgaacccaaacacaccggatctggggaggacgagagcggagtccccgtgctcgtgacctcagaaagccgaaaagtgtcctcctcctctgagagtgaaccagaactcgcacagttgaagaagggagctgactccgggctgttgcctgaacccgtcataagggtccaaccgccttctcctctcccaagtagtatggatagcaactcaagccctgaagaggtccagttccagccggtcgtatcaaaacagtacacgttcaaaatgaatgaggacacccaggaagagccaggtaaaagcgaagaggaaaaggacagcgaatcacatctggcagaagacaggcacgcagtttctacggaagccgaagatcggtcttacgataaactgaatcgggacactgaccagccaaaaatctgcgacggacacggatgcgaagccatgagtccctcttctagcgcagctcccgtctcttctgggctgcaatctcctactggcgatgacgtcgatgagcagcctgttatctacaaagaatctctcgccctacagggcacgcacgagaaagatacagaaggcgaggagttagatgtgtcacgggcagagtcgccacaggccgactgcccctccgagagcttttcttcttcttcttccctaccccactgccttgtgtcggagggcaaggagttagacgaggatattagtgccacgtcctcaattcagaaaacggaagtgaccaagaccgacgaaaccttcgagaatctgcccaaggactgcccgtctcaagacagctctatcactacacagacagatcgtttctccatggatgtgcctgtgtctgatcttgcggagaacgatgaaatttacgacccacagatcacgagcccctatgagaacgtgccatctcaaagctttttcagctcagaagagagcaaaacccagaccgacgctaatcacactacgagctttcacagctccgaggtgtatagcgtgacaatcacctcccccgtcgaggacgtcgtggtggccagttcttctagcggaactgttttgagtaaggagtccaatttcgagggccaggacataaagatggaatctcagcaggaaagcaccttgtgggagatgcagagtgactctgtttcttcttctttcgagccgaccatgtctgctactacaacagttgtcggggagcagatcagcaaggtaataattactaaaactgacgtcgactctgattcatggagtgaaatccgcgaggacgacgaagcgttcgaagccagggtcaaagaagaagaacagaagatctttggcctcatggtcgaccgtcaatcccaaggaaccacgcctgataccacacctgcccgaacaccaactgaagaaggtacgcccacttctgaacagaatccatttttgttccaggagggtaagcttttcgaaatgacccgttctggtgccatcgacatgaccaagaggagttatgctgacgagagtttccatttcttccaaattggccaggagagccgagaagagaccttatctgaggatgtcaaagaaggcgcgaccggcgccgacccgctgccgctcgagactagcgctgaatcgttagccctcagcgaatcaaaagagacagtggacgacgaagccgacctcttacccgatgatgtctccgaggaggtggaagagattcctgcatctgacgcccagttgaatagccaaatggggatttcagcctctaccgagactccgacaaaagaggccgtatctgtaggcaccaaagacctaccaactgtccagaccggcgacattcccccactctccggtgtaaagcaaatctcttgccccgattcgtccgaacccgccgttcaggtgcagctggatttctcgacgctcaccagaagcgtttacagcgaccgaggagacgattccccagacagttcccctgaggaacaaaaatcagtaatcgaaatcccaacggcccctatggaaaacgtgcctttcactgaatccaaaagcaagattccagtgcgcactatgcccacctcaacaccagctccaccatcggccgaatacgagtcatcagtaagcgaagacttcctgtcaagcgtggacgaggaaaacaaggccgatgaggcaaagcccaagagcaagctgccggtgaaggtgcctctacagagggtggaacagcagctgtcagatctggatacgagcgttcagaagaccgtggcccctcagggccaggatatggcaagcatcgcgccagacaaccgtagcaagtccgagtccgatgctagctccctagattctaagaccaagtgtcccgtgaaaacaaggtcctatacagaaactgagaccgagtctcgcgagagagctgaggaactggagctggaatccgaggaaggtgccacccggcccaagattcttaccagcaggctccccgtgaagtcccggtccacaacttccagttgtcgggggggaacatctccaacaaaagagtctaaggagcacttctttgatctctacagaaattcaatcgagtttttcgaggaaatcagcgatgaagcttccaagctggttgaccgcctgacccagagcgaacgcgagcaagagattgtgtcagacgacgaatcgtcctctgctctggaagtttcagtgattgaaaatctaccccctgtcgaaacagaacactccgtgccagaggatatctttgacacccggcctatttgggacgagtctattgagactctgattgagaggatcccggacgagaatgggcacgatcacgccgaagaccctcaggatgaacaagagagaattgaagaacggctcgcctatatagctgatcaccttggattctcctggactgagctcgctcgggaactcgacttcaccgaagaacagatccaccagatccggatcgaaaatccgaatagcctgcaggatcagagccacgcacttctgaagtattggctggagcgcgacgggaagcatgcgacagatactaacctggtagagtgcctcacaaagattaaccgaatggacattgtgcacctaatggagacaaatactgagcccctgcaggagagaataagccacagctacgctgagatcgaacaaaccatcacactggatcattccgaggggttcagtgtcctacaggaggagttatgtaccgcgcagcataaacagaaggaggagcaggccgtttccaaagagtctgaaacatgtgaccaccctcccattgtctcggaagaggatatcagtgtgggctactcaacttttcaagatggcgtgccaaagacggaaggggatagcagtgccacagccttgttccctcagacacacaaggaacaggtgcagcaggacttctccggtaaaatgcaggacctgccagaggagtcatctctggaataccagcaggaatacttcgtcaccacgccaggtaccgaaacaagcgagactcagaaggcgatgattgtccccagctccccatctaagacaccagaagaagtgtcaacccctgccgaggaggaaaagctatatctccaaacccccaccagctccgagagaggtggcagccctattatccaagaacccgaggaaccatctgagcacagggaagagtctagtccccggaagacaagcctcgtgattgtggaaagcgcggacaaccagccagagacgtgtgagcgactcgatgaagacgctgcctttgaaaagggcgacgatatgccggagattccgcccgaaacggtaaccgaggaagaatacatcgatgaacatggacataccgtcgtcaagaaggtgacccggaaaattatccggagatatgtgtcatcagaaggtaccgaaaaagaagagatcatggtccaggggatgccacaagaacctgtcaatatagaggaaggcgatggttacagcaaggtcatcaaaagggtcgtgctgaagtccgatacggaacagtcagaagataacaatgaatag

SEQ ID NO: 278200 - DNA, 11775 bp, Artificial Sequence
  derived and/or modified sequence
atgatgaatgaagatgctgcccagaagagtgacagcggggagaagttcaacggcagcagccagaggaggaagaggcccaagaagagtgacagcaatgccagcttcctgcgggccgcccgggccggcaacctggacaaggtggtggagtacctgaagggcggcatcgacatcaacacctgcaaccagaatggcctgaatgccctgcacctggccgccaaggagggccacgtgggcctggtgcaggagctgctgggccggggcagctctgtggacagcgccaccaagaagggcaacacagccctgcacatcgccagcctggccggccaggccgaggtggtgaaggtgctggtgaaggagggcgccaacatcaatgcccagagccagaatggcttcacccccctgtacatggccgcccaggagaaccacattgatgtggtgaagtacctgctggagaatggagccaaccagagcacagccacagaagatggcttcacccccctggccgtggccctgcagcagggccacaaccaggccgtggccatcctgctggagaatgacaccaagggcaaggtgcggctgcctgccctgcacatcgccgccaggaaggatgacaccaagtctgctgccctgctgctgcagaatgaccacaatgctgatgtgcagagcaagatgatggtgaacagaaccacagagagcggcttcacccccctgcacatcgccgcccactatggaaatgtgaatgtggccaccctgctgctgaacagaggagctgctgtggacttcaccgccagaaatggcatcacccccctgcacgtggccagcaagaggggcaacaccaacatggtgaagctgctgctggacagaggaggccagattgatgccaagaccagagatggcctgacccccctgcactgtgccgcccggagcggccatgaccaggtggtggagctgctgctggagcggggggcccccctgctggcccggaccaagaatggcctgagccccctgcacatggccgcccagggcgaccacgtggagtgtgtgaagcacctgctgcagcacaaggcccctgtggatgatgtgaccctggactacctgacagccctgcacgtggccgcccactgcggccactacagagtgaccaagctgctgctggacaagagggccaaccccaatgcccgggccctgaatggcttcacccccctgcacatcgcctgcaagaagaaccgcatcaaggtgatggagctgctggtgaagtacggggccagcatccaggccatcacagagagcggcctgacccccatccacgtggccgccttcatgggccacctgaacatcgtgctgctgctgctgcagaatggagccagcccagatgtgaccaacatccggggggagacagccctgcacatggccgcccgggccggccaggtggaggtggtgcgctgcctgctgagaaatggagccctggtggatgcccgggcccgggaggagcagacccccctgcacatcgccagccggctgggcaagacagagatcgtgcagctgctgctgcagcacatggcccacccagatgctgccaccaccaacggctacacccccctgcacatcagcgcccgggagggccaggtggatgtggcctctgtgctgctggaggccggggccgcccacagcctggccaccaagaagggcttcacccccctgcacgtggccgccaagtatggcagcctggatgtggccaagctgctgctgcagaggagagctgctgctgacagcgctgggaagaatggcctgacccccctgcacgtggccgcccactatgacaaccagaaggtggccctgctgctgctggagaagggggccagcccccacgccacagccaagaatggctacacccccctgcacatcgccgccaagaagaaccagatgcagatcgccagcaccctgctgaactatggagctgagaccaacatcgtgaccaagcagggcgtgacccccctgcacctggccagccaggagggccacacagacatggtgaccctgctgctggacaagggggccaacatccacatgagcaccaagagcggcctgaccagcctgcacctggccgcccaggaggacaaggtgaatgtggccgacatcctgaccaagcatggagctgaccaggatgcccacaccaagctgggctacacccccctgattgtggcctgccactatggaaatgtgaagatggtgaacttcctgctgaagcagggcgccaacgtgaatgccaagaccaagaatggctacacccccctgcaccaggccgcccagcagggccacacccacatcatcaacgtgctgctgcagcacggggccaagcccaatgccaccacagccaatggaaacacagccctggccatcgccaagaggctgggctacatctctgtggtggacaccctgaaggtggtgacagaggaggtgaccaccaccaccaccaccatcacagagaagcacaagctgaatgtgcctgagaccatgacagaggtgctggatgtgtctgatgaggagggagatgacaccatgactggagatggaggagagtacctgcggcctgaggacctgaaggagctgggagatgacagcctgcccagcagccagttcctggatggcatgaactacctgcgctacagcctggagggcggccgcagtgacagcctgcgctccttcagcagtgacaggagccacaccctgagccacgccagctacctgcgggacagcgctgtgatggatgattctgtggtgatccccagccaccaggtgtccaccctggccaaggaggccgagaggaacagctaccgcctgtcctggggcacagagaacctggacaacgtggccctgagcagcagccccatccacagcggcttcctggtgtccttcatggtggatgcccggggcggggccatgaggggctgccgccacaacggcctgcgcatcatcatcccccccaggaaatgtacagcccccaccagggtgacctgccgcctggtgaagaggcaccggctggccaccatgccacccatggtggagggggagggcctggccagccggctgattgaggtgggccccagcggggcccagttcctgggccctgtgattgtggagatcccccactttgctgccctgcggggcaaggagcgggagctggtggtgctgcggagtgaaaatggagacagctggaaggagcacttctgtgactacacagaagatgagctgaatgagatcctgaatggcatggatgaggtgctggacagccctgaggacctggagaagaagaggatctgccgcatcatcacccgggacttcccccagtactttgctgtggtgagccgcatcaagcaggacagcaacctgattggccctgagggcggcgtgctgagcagcacagtggtgccccaggtgcaggccgtgtttcctgagggcgccctgaccaagaggatccgggtgggcctgcaggcccagcccatgcacagcgagctggtgaagaagatcctgggcaacaaggccaccttcagccccatcgtgaccctggagcccaggaggaggaagttccacaagcccatcaccatgaccatccctgtgcccaaggccagcagtgatgtgatgctgaatggatttggaggagatgcccccaccctgcggctgctgtgcagcatcaccggcggcaccaccccagcccagtgggaggacatcaccggcaccacccccctgacctttgtgaatgaatgtgtgtccttcaccaccaacgtgtctgcccgcttctggctgattgactgccggcagatccaggagagcgtgacctttgccagccaggtgtaccgggagatcatctgtgtgccctacatggccaagtttgtggtgtttgccaagagccatgaccccatcgaggcccggctgcgctgcttctgcatgacagatgacaaggtggacaagaccctggagcagcaggagaactttgctgaggtggcccggagcagagatgtggaggtgctggagggcaagcccatctacgtggactgctttggaaacctggtgcccctgaccaagagcggccagcaccacatcttctccttctttgccttcaaggaaaatcggctgcccctgtttgtgaaggtgcgggacaccacccaggagccctgtggccgcctgtccttcatgaaggagcccaagagcacccggggcctggtgcaccaggccatctgcaacctgaacatcaccctgcccatctacaccaaggagagcgagagtgaccaggagcaggaggaggagattgacatgaccagcgagaagaatgatgaaacagagagcacagagacctctgtgctgaagagccacctggtgaatgaggtgcctgtgctggccagcccagacctgctgtctgaggtgtctgagatgaagcaggacctgatcaagatgacagccatcctgaccacagatgtgtctgacaaggccggcagcatcaaggtgaaggagctggtgaaggctgctgaggaggagcccggggagccctttgagatcgtggagcgggtgaaggaggacctggagaaggtgaatgagatcctgcggagcggcacctgcaccagagatgagagctctgtgcagagcagccgctctgagcggggcctggtggaggaggagtgggtgattgtgtctgatgaggagattgaggaggcccggcagaaggcccccctggagatcacagagtacccctgtgtggaggtgagaattgacaaggagatcaagggcaaggtggagaaggacagcacaggcctggtgaactacctgacagatgacctgaacacctgtgtgcccctgcccaaggagcagctgcagacagtgcaggacaaggccggcaagaagtgtgaggccctggccgtgggccgcagcagcgagaaggagggcaaggacatccccccagatgagacccagagcacccagaagcagcacaagcccagcctgggcatcaagaagcctgtgcggaggaagctgaaggagaagcagaagcagaaggaggagggcctgcaggccagcgctgagaaggccgagctgaagaagggcagcagcgaggagagcctgggggaggaccccggcctggcccctgagcccctgcccaccgtgaaggccaccagccccctgattgaggagacccccatcggcagcatcaaggacaaggtgaaggccctgcagaagagggtggaggatgagcagaagggccgcagcaagctgcccatccgggtgaagggcaaggaggatgtgcccaagaagaccacccaccggccccaccctgctgccagccccagcctgaagtcagaaagacatgcccctggcagccccagccccaagacagagcggcacagcaccctgagcagcagcgccaagacagagcggcacccccctgtgagccccagcagcaagacagagaagcacagccctgtgagccccagcgccaagacagagcggcacagccctgccagcagcagcagcaagacagagaagcacagccctgtgagccccagcaccaagacagagcggcacagccctgtgagcagcaccaagacagagcggcacccccctgtgagccccagcggcaagacagacaagaggcctcctgtgagccccagcggccgcacagagaagcacccccctgtgtccccaggccgcacagagaagaggctgcctgtgagccccagcggccgcacagacaagcaccagcctgtgtccacagctgggaagacagagaagcacctgcctgtgagccccagcggcaagacagagaagcagccccctgtgagccccaccagcaagacagaaagaattgaggagaccatgtctgtgcgggagctgatgaaggccttccagagcggccaggaccccagcaagcacaagacaggcctgtttgagcacaagagcgccaagcagaagcagccccaggagaagggcaaggtgcgggtggagaaggagaagggccccatcctgacccagcgggaggcccagaagacagagaaccagaccatcaagaggggccagaggctgcctgtgactggaacagctgagagcaagaggggcgtgcgggtgagcagcattggagtgaagaaggaggatgctgctgggggcaaggagaaggtgctgagccacaagatccctgagcctgtgcagagcgtgcctgaggaggagagccaccgggagagcgaggtgcccaaggagaagatggctgatgagcagggcgacatggacctgcagatcagcccagacaggaagaccagcacagacttcagcgaggtgatcaagcaggagctggaggacaatgacaagtaccagcagttccggctgtctgaggagacagagaaggcccagctgcacctggaccaggtgctgaccagccccttcaacaccaccttccccctggactacatgaaggatgagttcctgcctgccctgagcctgcagagcggggccctggatggcagcagcgagagcctgaagaatgaaggagtggccggcagcccctgtggcagcctgatggagggcaccccccagatcagcagcgaggagagctacaagcatgagggcctggccgagaccccagagaccagccctgagagcctgtccttcagccccaagaagtctgaggagcagacaggagagaccaaggagagcaccaagacagagaccaccacagagatccgctctgagaaggagcaccccaccaccaaggacatcactggaggcagcgaggagcggggggccaccgtgacagaagattctgagaccagcacagagagcttccagaaggaggccaccctgggcagccccaaggacaccagccccaagaggcaggatgactgcaccggcagctgcagcgtggccctggccaaggagacccccaccggcctgacagaggaggccgcctgtgatgagggccagaggaccttcggcagcagcgcccacaagacccagacagacagcgaggtgcaggagagcacagccaccagtgatgagaccaaggccctgcccctgcctgaggcctctgtgaagacagacaccggcacagagagcaagccccagggcgtcatccgcagcccccagggcctggagctggccctgcccagccgggacagcgaggtgctgtctgctgtggctgatgacagcctggccgtgagccacaaggacagcctggaggccagccctgtgctggaggacaacagcagccacaagaccccagacagcctggagcccagccccctgaaggagagcccctgccgggacagcctggagagcagccctgtggagcccaagatgaaggccggcatcttccccagccacttccccctgcctgctgctgtggccaagacagagctgctgacagaggtggcctctgtgcgcagccggctgctgcgggaccctgatggcagcgcagaagatgacagcctggagcagaccagcctgatggagagcagcggcaagagccccctgagcccagacacccccagcagcgaggaggtgtcctatgaggtgacccccaagaccacagatgtgtccacccccaagccagctgtgattcatgaatgtgccgaggaggatgattctgaaaatggagagaagaagcgcttcaccccagaggaggagatgttcaagatggtgaccaagatcaagatgtttgatgagctggagcaggaggccaagcagaagagggactacaagaaggagcccaagcaggaggagagcagcagcagcagtgaccctgatgctgactgcagcgtggatgtggatgagcccaagcacactggaagtggagaagatgagagcggcgtgcctgtgctggtgaccagcgagagcaggaaggtgagcagcagcagcgagagcgagcctgagctggcccagctgaagaagggagctgacagcggcctgctgcctgagcccgtcatccgggtgcagccccccagccccctgcccagctccatggacagcaacagcagccctgaggaggtgcagttccagcctgtggtgtccaagcagtacaccttcaagatgaatgaagacacccaggaggagcccgggaagtctgaggaggagaaggacagcgagagccacctggccgaggacagacatgctgtgtccacagaagctgaggacaggagctatgacaagctgaacagagacacagaccagcccaagatctgtgatggccacggctgtgaggccatgagccccagcagcagcgctgcccctgtgagcagcggcctgcagagccccactggagatgatgtggatgagcagcccgtcatctacaaggagagcctggccctgcagggcacccatgagaaggacacagaaggagaggagctggatgtgtccagagctgagagcccccaggccgactgccccagcgagagcttcagcagcagcagcagcctgccccactgcctggtgtctgagggcaaggagctggatgaggacatcagcgccaccagcagcatccagaagacagaggtgaccaagacagatgagacctttgagaacctgcccaaggactgccccagccaggacagcagcatcaccacccagacagaccgcttctccatggatgtgcctgtgtctgacctggccgagaatgatgagatctatgacccccagatcaccagcccctatgaaaatgtgcccagccagagcttcttcagcagcgaggagagcaagacccagacagatgccaaccacaccaccagcttccacagcagcgaggtgtacagcgtgaccatcaccagccctgtggaggatgtggtggtggccagcagcagcagcggcaccgtgctgagcaaggagagcaactttgagggccaggacatcaagatggagagccagcaggagagcaccctgtgggagatgcagagcgacagcgtgagcagcagctttgagcccaccatgtctgccaccaccaccgtggtgggggagcagatcagcaaggtgatcatcaccaagacagatgtggacagcgacagctggagcgagatcagagaagatgatgaggcctttgaggcccgggtgaaggaggaggagcagaagatcttcggcctgatggtggaccggcagagccagggcaccaccccagacaccaccccagcccggacccccacagaggagggcacccccaccagcgagcagaaccccttcctgttccaggagggcaagctgtttgagatgaccaggtctggggccatcgacatgaccaagaggagctatgcagatgagagcttccacttcttccagatcggccaggagagccgggaggagaccctgtctgaagatgtgaaggagggcgccactggagctgaccccctgcccctggagaccagcgctgagagcctggccctgtctgagagcaaggagaccgtggatgatgaggccgacctgctgcctgatgatgtgtctgaggaggtggaggagatcccagccagtgatgcccagctgaacagccagatgggcatcagcgccagcacagagacccccaccaaggaggccgtgtctgtgggcaccaaggacctgcccaccgtgcagacaggagacatcccccccctgagcggcgtgaagcagatcagctgcccagacagcagcgagcctgctgtgcaggtgcagctggacttcagcaccctgaccaggtctgtgtacagcgacagaggagatgacagcccagacagcagccctgaggagcagaagagcgtcatcgagatccccacagcccccatggagaatgtgcccttcacagagagcaagagcaagatccctgtgaggaccatgcccaccagcaccccagcccctccttctgcagaatatgagagctctgtgtctgaggacttcctgagctctgtggatgaggagaacaaggcagatgaggccaagcccaagagcaagctgcctgtgaaggtgcccctgcagagggtggagcagcagctgagtgacctggacacctctgtgcagaagacagtggccccccagggccaggacatggccagcatcgccccagacaacagaagcaagtctgagagtgatgccagcagcctggacagcaagaccaagtgccctgtgaagaccaggagctacacagaaacagaaacagagagccgggagcgggcagaggagctggagctggagagcgaggagggcgccacccggcccaagatcctgaccagccggctgcctgtgaagagccgcagcaccaccagcagctgccggggcggcaccagccccaccaaggagagcaaggagcacttctttgacctgtacagaaattccattgagttctttgaggagatcagtgatgaggccagcaagctggtggaccggctgacccagagcgagcgggagcaggagatcgtgtctgatgatgagagcagcagcgccctggaggtgtctgtgattgagaacctgccccctgtggagacagagcacagcgtgcctgaggacatctttgacacccggcccatctgggatgagagcattgagaccctcatcgagcgcatcccagatgaaaatggacatgaccacgccgaggacccccaggatgagcaggagcgcatcgaggagcggctggcctacatcgctgaccacctgggcttctcctggacagagctggcccgggagctggacttcacagaggagcagatccaccagatcagaattgagaaccccaacagcctgcaggaccagagccacgccctgctgaagtactggctggagagagatggcaagcacgccacagacaccaacctggtggagtgcctgaccaagatcaacaggatggacatcgtgcacctgatggagaccaacacagagcccctgcaggagcgcatcagccacagctatgcagaaattgagcagaccatcaccctggaccacagcgagggcttctctgtgctgcaggaggagctgtgcacagcccagcacaagcagaaggaggagcaggccgtgtccaaggagagcgagacctgtgaccacccccccatcgtgtctgaggaggacatctctgtgggctacagcaccttccaggatggagtgcccaagacagaaggagacagcagcgccacagccctcttcccccagacccacaaggagcaggtgcagcaggacttcagcggcaagatgcaggacctgcctgaggagagcagcctggagtaccagcaggagtactttgtgaccaccccaggcacagagaccagcgagacccagaaggccatgattgtgcccagcagccccagcaagaccccagaggaggtgtccaccccagctgaggaggagaagctgtacctgcagacccccaccagcagcgagcggggcggcagccccatcatccaggagcctgaggagcccagcgagcaccgggaggagagcagccccaggaagaccagcctggtgattgtggagagcgctgacaaccagcctgagacctgtgagcggctggatgaagatgctgcctttgagaagggagatgacatgcctgagatccccccagagaccgtgacagaggaggagtacattgatgagcacggccacacagtggtgaagaaggtgaccaggaagatcatccgccgctacgtgtcctctgagggcacagagaaggaggagatcatggtgcagggcatgccccaggagcctgtgaacatcgaggagggagatggctacagcaaggtgatcaagagggtggtgctgaagagtgacacagagcagagcgaggacaacaatgaatag

SEQ ID NO: 278201 - DNA, 11775 bp, Artificial Sequence
  derived and/or modified sequence
atgatgaacgaggacgccgcccagaagagcgacagcggcgagaagttcaacgggtcttcccagagacgcaaaaggccaaaaaagtccgactcaaacgcttctttcctccgcgcggcccgagcgggcaatctggataaggtcgtggaatatctgaaaggcggtatagacatcaatacctgcaaccaaaacggtctcaatgcacttcacctggcagcaaaagagggacacgtgggactagttcaagagttactgggtaggggctctagcgtcgacagcgcaactaaaaaaggcaataccgctttgcatatagcctcactggctgggcaagcggaagtggtaaaggtgcttgtaaaagaaggtgccaacataaatgcccagagccagaacggcttcaccccactgtatatggccgctcaggaaaatcacattgatgtcgtaaaatatttgctggaaaacggggcaaatcagtctacagcaacggaagatgggtttacaccactggcagttgcactccaacaggggcacaaccaggcggtggctatcctgctagagaacgatacgaaggggaaggttcgcttgccagcattgcatattgccgccaggaaggatgataccaagagcgccgccctgctgctgcagaacgaccataatgcggacgttcagtcaaaaatgatggtcaacagaacgaccgaaagcggattcactcccctacatattgctgctcactacggcaacgttaatgttgcgactctcctgctgaatcgaggtgcagccgtcgatttcactgccaggaacgggatcacccctctgcatgtggccagcaagaggggcaatacgaatatggtgaaattattactcgaccggggtgggcaaatcgacgctaagacgagagacggacttaccccattacattgtgcagcaagaagtggacatgatcaggtggttgaattgctgctcgagcggggagctcctctcctggcccgtaccaagaatggtctgagccctttacacatggccgctcagggagaccacgtagaatgcgtcaaacatctcctgcagcataaagctccggtggacgatgtgacactggattatctgaccgccctgcacgtggcggcccattgtgggcactatagggtcacaaaacttcttctggataaaagggctaatccaaatgcaagagccttgaacggtttcactcctttgcacatcgcttgtaagaaaaatagaataaaggtgatggaactgctggtaaaatacggcgcatccatccaggccatcactgagagcggtcttacccctatccacgtcgcggcttttatgggccatcttaatatcgtgctcctcctgcttcaaaacggagcatctccggacgttaccaatatcagaggcgagactgcactgcacatggctgctcgggccggacaggtggaggtcgtcagatgtctgctgcgaaatggcgccttggtggatgcccgtgcacgggaagagcagactccactgcatattgctagtagactaggaaagacagagatcgtgcaactactcctgcagcacatggcccatcccgacgcagcaaccactaacggctatacgcctctccacattagtgccagggagggtcaagtggacgtggcctccgtactgctggaagctggggcggcccactctctcgctaccaagaaaggattcacgccactacatgtagctgccaagtatggatcccttgatgtcgcaaaactcttactgcagcggcgcgctgcagctgactcagccggcaagaacggactcacaccactccacgtcgccgctcactatgataaccagaaggtcgctctgctgctgctcgaaaaaggagcttcaccacacgctactgccaaaaacggttatacgcctctgcacatcgcagctaagaaaaatcaaatgcagattgcctcgacattactgaactacggagctgaaacaaacattgtcactaagcagggggtgacaccactgcacctggcctcccaggaggggcatactgacatggtcacactgctcttagacaagggagctaacattcatatgagcaccaagtccggtctcacctccttgcaccttgcagcccaggaagacaaagtcaatgtggccgatatcctcacaaagcacggtgctgaccaggatgcgcacacgaagctgggatacactccgctcattgtcgcctgccattatggaaatgtcaaaatggttaactttctgctcaagcagggggcaaatgtgaatgccaagaccaagaatggctatacacctctgcatcaggccgcccaacaaggccatacacacatcattaacgtcttattgcagcatggcgcgaaaccaaacgctactaccgccaacggaaataccgcccttgcaattgctaaaaggttggggtatatctcagttgtggacacactaaaagtggtcactgaagaagtgactacaaccacaaccactattacagaaaagcataaactgaacgtgcccgaaaccatgactgaggtccttgacgtgagtgatgaagaaggtgacgatactatgactggcgacggaggagaatatctgaggcccgaagatctcaaggaactcggagacgactccctcccgtcatcacagttcctggatgggatgaactacctaaggtatagcctggagggtggtcggtcagacagtctacggtcattttcttcagatcgaagtcacacactaagccacgcttcatacttgagagactcggcggtaatggatgacagcgttgtcattccgagtcaccaggtctccacactggccaaggaggcggaacgcaactcttatcggctatcctgggggaccgagaatttggacaatgtggccctgagtagttccccaattcacagtggcttcttagtgagttttatggtggatgctcgcggcggagcaatgcgcggatgtagacataatgggttaagaattattataccacctagaaagtgcactgcaccaacacgggtcacttgcagacttgtgaaacgccatcggcttgcaaccatgcctcctatggttgagggcgaaggcctggccagccgactgatcgaggtgggcccaagcggcgcacaatttctcggcccggtcatcgttgaaatcccccattttgccgctctgagaggaaaagagcgcgaacttgtggtgctaagaagtgagaatggtgattcttggaaagagcatttctgcgattatactgaggacgagctaaacgaaatccttaacgggatggatgaggtgctggactcaccagaggatctcgagaagaagcgaatctgtaggatcattactagggacttcccgcagtacttcgctgtcgtgtctcgcatcaagcaagattcaaacttgattggtcccgaaggcggagtactgtcctcaactgtcgtcccacaggttcaggccgtgttccccgagggggctctcaccaagaggattagagtggggctccaggctcaacctatgcattccgagctcgtgaagaagatactgggaaacaaggctacgttcagcccaatcgtaaccttagaacctcggagacgcaaattccacaagcctatcaccatgactatcccagtcccaaaggcctctagtgacgtgatgttgaacggtttcggaggggacgcgcctacgcttcgcctgctttgtagcatcactggcggtaccaccccagctcagtgggaggacattaccgggacaacacctctcacctttgtgaatgagtgtgtgtcgttcacaacgaacgtgtccgcccgattttggctgattgattgtcgccaaatccaggagtccgtcacgtttgcctctcaggtttatagggaaattatctgtgttccttacatggctaaattcgtggtgttcgccaagtctcatgatcctattgaggcgcggctgcgatgcttttgcatgaccgatgacaaggtcgataaaacccttgaacagcaggagaacttcgcggaggtcgctcgcagccgagatgtggaagtcttggagggcaaacctatttatgtggactgttttggtaacctggtaccattgaccaagtctggccagcatcatatttttagcttcttcgcctttaaagaaaaccgactgccactcttcgtgaaggtgagggacacaacccaagaaccctgcgggcgcctgtcctttatgaaggagccaaagagcaccagaggcttagttcaccaggccatctgcaatcttaatatcactctgcccatttacacaaaagagtccgagtcagaccaggagcaggaggaagaaattgatatgactagtgagaagaacgatgaaacggagtcaaccgagacaagtgtgctgaaaagccatctggtcaatgaggtgcccgtcttggcctcccctgacttactctccgaggtttcagagatgaagcaggatctgattaagatgaccgccattttgaccacggacgttagcgacaaggccgggtctatcaaagtaaaggagctggtgaaagcagcggaggaagagcctggtgagccgtttgaaatcgtagagagggtcaaagaagacctggaaaaggtgaatgagatactgcgctctggaacctgcactagggacgaatccagcgtccagtccagcagatctgaacggggtttggttgaggaagagtgggtcattgttagcgatgaggagatcgaagaggcgaggcaaaaggcacctctggaaattactgagtacccatgcgtggaagtgcggatagataaggagattaagggtaaggtggagaaggactctaccggattagtgaactatcttaccgatgatcttaacacatgtgttccgctgcccaaagagcagctgcagaccgttcaagacaaagccgggaaaaaatgcgaagcgttggccgtcggtcgctcctctgagaaagaaggaaaggatatccctcccgacgaaacgcagagcacccagaagcagcacaaaccatccctggggatcaagaaacccgtaaggcggaagctgaaagaaaaacagaaacagaaggaagaaggattgcaggcaagtgccgagaaagcagagctcaagaaggggtcatccgaggaatctctcggagaggatcctggtcttgctccagagcctcttccaaccgtgaaagccacctcacctctcattgaagaaaccccaatcggctccataaaggataaagttaaagccctgcagaagcgcgtggaggacgagcagaaaggcagatccaagttgccaatccgtgtgaagggcaaggaggatgttcctaagaaaacgacacatcgcccccaccctgccgcttccccttccctcaagtcagagcgacacgcccctgggagtccctcacctaagaccgaaaggcacagtacattgagcagctctgcaaaaaccgagaggcacccacccgtgagcccttcatccaagaccgagaaacattctcccgtcagtccgtccgccaagacggaacgccacagccccgctagtagcagctcgaaaaccgagaaacacagtcccgtgtctccttcaacgaagacagaaaggcacagccccgtgagttccaccaaaactgaaagacacccgcccgtgagccctagcggaaaaaccgataaacggcctcccgtaagccctagcggacgcacagaaaagcatcctcctgtaagtccgggtcgtactgagaaacggctcccagtcagcccttccggtcggaccgacaagcatcaacctgtctcaacagcagggaaaacggagaagcatctccccgtcagcccctccgggaagacagagaaacaacctcccgttagtccaacttcgaagacagagcgaattgaagagactatgtccgtgcgcgaattgatgaaggctttccagtcggggcaggatccttctaagcacaagactggcctgttcgagcataaatcggccaagcagaaacaacctcaggaaaaaggcaaggtcagggtggagaaggagaagggcccaatcctgacccaaagagaagcccagaaaaccgagaaccagaccataaagcgcgggcagagactcccggtaacggggactgcggagtcaaaacgaggcgtcagagtgagcagcatcggagtcaagaaagaagacgccgccgggggaaaggagaaagtgctgtctcacaagatccccgagccggtgcagagtgtaccagaagaagagtctcatcgcgagagcgaagttcccaaggagaagatggctgatgagcagggcgatatggacctccagatatctcccgatcgtaagacttcaactgatttttctgaggtgataaagcaggaactggaagataatgataagtatcagcaatttcgattgagcgaggagacagaaaaggcacagctgcatctggatcaggtactgaccagccccttcaatacaacgtttcccctcgactacatgaaagacgagtttctgcccgctctcagtctgcagagtggtgctcttgacggaagcagcgaaagcctgaaaaacgagggggtggcggggtctccctgtggatctctgatggagggcaccccccagatcagttcggaggaatcctacaaacacgaaggattggccgaaacaccggagacatcacccgagtccttatctttctctcctaagaaatcagaggagcagaccggggagactaaggaatctactaaaactgaaaccacgaccgagatccgctctgagaaagagcaccccacgactaaggatatcacaggcgggagtgaggaacgaggcgccaccgtgaccgaggactccgagacttctacagaatccttccagaaggaggccactctcgggtcccctaaggatacatcacctaagagacaggacgattgcactggcagctgctcagtggctcttgcgaaggagactcctactgggctgaccgaagaggccgcctgtgacgaggggcagcggacctttgggtctagcgctcataaaacccagacggactcagaggttcaggaatccacagcgacatccgacgaaacaaaagcattaccactgcccgaggccagcgtgaaaacagataccggaacggagagtaagccacaaggggtaattagaagcccccaagggcttgagctggctctgccttctcgtgacagcgaagtcttgtctgcagtggccgatgatagtctcgccgtgagccacaaagatagtttagaggcttctcctgtgctggaggataacagctcccacaaaactcccgatagtttggaaccgagtccacttaaggagagcccctgtagggactcgttggaatcttcccctgtggaaccgaagatgaaagccggcatctttcccagccactttccactgcctgcagcggtggctaagactgaactgctgactgaggtcgcaagcgtccgctccagattgttacgagaccccgatggctcggccgaggacgatagtcttgaacagactagcctgatggaaagttccggcaaatctccactttccccggatacaccttcatccgaagaagtctcatatgaagtgacccctaagaccaccgacgtgtcaactccaaaacccgccgtcatacatgaatgcgcagaggaagacgattcggagaacggagagaaaaaaagatttacccccgaggaggagatgtttaagatggtcacaaagatcaagatgttcgacgagctcgagcaggaggccaagcagaaacgggattacaagaaggaacccaaacaagaggagagtagttctagcagtgacccagacgccgattgttctgtggatgtggacgagcctaaacataccggcagcggagaggatgaatccggagtgcctgtgctggttacttcagagtcacgaaaagtgagcagctcttccgaaagtgagccagagttggcacagcttaagaagggcgccgatagcggactgctgcctgagcctgtgataagagtccagcctccctcccctctcccctcttccatggactccaactcgagtcctgaggaagtacagtttcaacctgttgtctctaaacagtatacattcaagatgaatgaggatactcaggaagagcctggtaaaagcgaggaggagaaagattcagagtcccacctggccgaagatagacacgcagtaagcaccgaagccgaagataggtcatacgataaactgaacagagacacggaccagccaaaaatctgcgatgggcatggttgtgaagccatgagcccaagttcttctgccgctccggtttcttccggactccagtctcccaccggggatgatgtggacgagcagcctgtgatttataaggagagtctcgccctgcaggggacccacgagaaagacacggagggggaggagctcgacgttagtagggcagagagtccccaagctgactgtccatccgaaagtttctcaagttccagcagtctgccacattgccttgtgagcgaaggaaaggaattggacgaggacatttccgccacatccagcatacagaaaacagaagtcactaaaaccgacgagacctttgaaaacttacctaaggactgcccttctcaagatagttccattacgacccagaccgatcgcttcagtatggacgtgcccgtaagcgatctcgccgagaatgacgagatctatgatcctcagattacctctccatacgagaacgtgccttcccagtcttttttttcttctgaggagagcaaaacacagaccgatgcaaaccacacgacatcttttcacagcagcgaggtgtactctgttacaatcacgagtccagtcgaggacgtcgtggtggcctcaagctcttccggcacggttctgtccaaagaaagcaacttcgaaggccaggatatcaagatggagtcccagcaggagtcaaccctatgggagatgcagagtgatagcgtgtcgtcctccttcgagccaacaatgtctgccactacgacagtggtcggggagcaaatttcgaaggtcattatcaccaagacagacgtggattctgactcatggtctgagattcgggaggatgacgaagcctttgaggcccgtgttaaggaggaggagcagaagatcttcggtctgatggtcgatcggcagtcacagggaacaacaccagatacaacaccagcacgcacaccaacagaggagggcacccccacgtccgagcagaacccctttctcttccaagaaggaaagctctttgagatgacacgatcaggggctattgacatgactaagagaagctatgctgacgaatcatttcatttttttcagatcggacaggaaagcagggaagagactctctcagaagatgtcaaagagggagcaaccggcgcggacccgctaccactggagacctcagccgaatcacttgccctgtccgaatcaaaggaaacggtggacgatgaagccgacctgctgcccgacgatgtaagtgaggaagtagaagagatcccagcttcagacgcacagcttaattctcagatgggaatctcagcctccacggaaactccaacaaaggaggctgtcagcgtcggcacaaaggacctgccaaccgttcagacaggagatatacctcctttgagcggggtaaagcagatctcctgtcctgacagctcagaacccgccgtgcaagtgcagttggacttcagtacattgacaagaagtgtgtattccgacagaggagatgacagtccggactctagtcccgaagagcaaaaatctgtgatcgagatcccaaccgctcctatggagaacgtgccctttacagaaagtaagtcaaagattccagtgagaaccatgcctacttctaccccggccccaccaagtgctgaatacgaaagttctgtctccgaggacttcctttcaagcgtggacgaagaaaataaggctgacgaggccaaaccaaaaagcaaactaccagtaaaggtacccctccagagagttgaacaacagttatccgacttagacacatcagtgcaaaagacagtggccccgcaaggtcaagatatggcctccatcgcacccgataataggtctaagagtgagtcggacgctagctctttggattcaaaaacaaagtgtcccgtgaagactaggtcctatacagagacagagaccgagtcccgagagagggccgaagaattggagttggagtccgaggaaggtgccaccaggccaaagatactcacatcaaggctgcccgtcaagtcaagatctaccacttcttcttgtcggggcggaacaagccctactaaagagagtaaagaacatttcttcgatctctatagaaactcaatcgagttttttgaggagatttcagacgaggccagtaagctcgtggacagactcacgcagtcagagagggaacaggagatcgtcagtgatgatgaatcctcatctgctctcgaggtttcggtgatcgagaatctcccgcccgtagagaccgaacactctgtcccagaggatattttcgatacacgacctatttgggacgagagcattgagactctgatcgaaaggatcccagatgaaaatggccatgatcatgccgaagatccacaggatgagcaagagaggatcgaagagagactggcatacatcgccgatcacctgggtttcagttggaccgagctggctagagaactcgacttcacagaggaacaaatacatcaaattagaatagagaaccctaattccctgcaggatcagtcccacgccctactgaaatactggctggagagagacggcaaacatgctaccgacacgaatctggttgaatgcttgaccaaaatcaacagaatggacatagtacatctgatggaaactaataccgaaccactccaagagcgaataagccactcttatgctgagattgagcaaactattacactggatcacagtgagggtttttcagtgctgcaagaagagctctgtacagctcaacataagcagaaagaggaacaggctgtgtccaaggagagcgaaacgtgcgatcacccccctatcgtcagcgaagaagatatctcggtagggtatagcaccttccaagacggcgttcccaagaccgaaggggattcttctgcaactgctcttttcccacagacacacaaggagcaggtccagcaggacttctccggaaaaatgcaggacctcccagaagaatcttctttggaatatcagcaggagtactttgtaacaacccccggcacggaaacctcagagacacagaaagccatgattgtcccaagctcaccatcaaagactccggaagaagtgtctacccctgccgaagaggaaaaattgtacctgcaaacccccacctcatctgagaggggcggcagccccattatccaggagcccgaggaacctagcgagcaccgagaggaaagttcacctagaaaaacgagcctggttatcgtggaaagcgcagataaccaacccgagacttgtgagagactggatgaggacgccgcttttgagaaaggtgacgacatgccagaaatcccaccggagactgtcacagaggaggaatacatagacgaacacggccacactgttgtgaagaaagtgacccgaaagatcattagaaggtacgtcagctcagaaggtaccgagaaggaggaaattatggtgcagggcatgccacaagaacctgtcaatattgaggagggggatggttacagtaaagtcatcaagagagtcgtgttgaagtctgataccgaacagagtgaggataacaatgagtag

SEQ ID NO: 278202 - DNA, 11775 bp, Artificial Sequence
  derived and/or modified sequence
atgatgaacgaagatgcagctcagaaaagcgacagtggagagaagttcaacggcagtagtcagaggagaaaaagacccaagaagtctgacagcaatgcaagcttcctccgtgctgccagagcaggcaacctggacaaagttgtggaatatctgaaggggggcatagacatcaatacctgcaatcagaatggactcaacgctctccatctggctgccaaggaaggccacgtggggctggtgcaggagctgctgggaagagggtcctctgtggattctgccactaagaagggaaataccgctcttcacattgcatctttggctggacaagcagaagttgtcaaagttcttgttaaggaaggagccaatattaatgcacagtctcagaatggctttactcctttatacatggctgcccaagagaatcacattgatgttgtaaaatatttgctggaaaatggagctaatcagagcactgctacagaggatggctttactcctctagctgtggcactccagcaaggacacaaccaggcggtggccatcctcttggagaatgacaccaaagggaaagtgaggctgccagctctgcatattgccgctaggaaagacgacaccaaatctgccgcacttctgcttcagaatgaccacaatgctgacgtacaatccaagatgatggtgaataggacaactgagagtggttttacccctttgcacatagctgcacattacggaaatgtcaacgtggcaactcttcttctaaaccggggagctgctgtggacttcacagccaggaatggaatcactcctctgcatgtggcttccaaaagaggaaatacaaacatggtgaagctcttactggatcgaggcggtcagatcgatgccaaaactagggatgggttgacaccacttcactgtgctgcacgaagtgggcatgaccaagtggtggaacttctgttggaacggggtgcccccttgctggcaaggactaagaatgggctgtctccactacacatggctgcccagggagaccacgtggaatgtgtgaagcacctgttacagcacaaggcacctgttgatgatgtcaccctagactacctgacagccctccacgttgctgcgcactgtggccactaccgtgtaaccaaactccttttagacaagagagccaatccgaacgccagagccctgaatggttttactccactgcacattgcctgcaagaaaaaccgcatcaaagtcatggaactgctggtgaaatatggggcttcaatccaagctataacagagtctggcctcacaccaatacatgtggctgccttcatgggccacttgaacattgtcctccttctgctgcagaacggagcctctccagatgtcactaacattcgtggtgagacggcactacacatggcagcccgagccgggcaggtggaagtggtccgatgcctcctgagaaatggtgcccttgttgatgccagagccagggaggaacagacacctttacatattgcctcccgcctgggtaagacagaaattgtccagctgcttctacaacatatggctcatccagatgcggccactacaaatgggtacacaccactgcacatctctgcccgggagggccaggtggatgtggcatcagtcctattggaagcaggagcagcccactccttagctaccaagaagggttttactcccctgcatgtagcagccaagtatggaagcctggatgtggcaaaacttctcttgcaacgccgtgctgccgcagattctgcagggaagaacggccttaccccgctccatgttgctgctcattatgacaaccagaaggtggcgctgctgttactggagaagggtgcttcccctcatgccactgccaagaatggctatactccgttacatattgctgccaagaagaatcaaatgcagatagcttccacactcctgaactatggagcagagacaaacattgtgacaaagcaaggagtaactccactccatctggcctcgcaggaggggcacacagatatggttaccttgcttctggataagggagccaatatccacatgtcaactaagagtggactcacatccttacaccttgcagcccaggaagataaagtgaatgttgctgatattctcaccaagcatggagctgatcaggatgctcatacaaagcttggttacacacctttaattgtggcctgtcactatggaaatgtgaaaatggtcaactttcttctgaagcagggagcaaatgttaacgcaaaaaccaagaacggctacacgcctttgcaccaggccgctcagcagggtcacacgcacatcatcaacgtcctgctccagcatggggccaagcccaacgccaccactgcgaatggcaacactgccttggcgattgctaagcgtctgggctacatctccgtggtcgacaccctgaaggttgtgactgaggaggtcaccaccaccaccacaactattacagaaaaacacaaactaaatgtacctgagacgatgactgaggttcttgatgtttctgatgaagagggtgatgacacaatgactggtgatgggggagaataccttaggcctgaggacctaaaagaactgggtgatgactcactacccagcagtcagttcctggatggtatgaattacctgcgatacagcttggagggaggacgatctgacagccttcgatccttcagttccgacaggtctcacactctgagccatgcctcctacctgagggacagtgccgtgatggatgactcagttgtgattcccagtcaccaggtgtcaactctagccaaggaggcagaaaggaattcttatcgcctaagctggggcactgagaacttagacaacgtggctctttcttctagtcctattcattcaggtttcctggttagttttatggtggatgcccgaggtggtgctatgcgaggatgcagacacaatgggctccgaatcattattccacctcggaaatgtactgctccaacgcgagtcacctgccgactggtcaagcgccacagactggcaacaatgcctccaatggtggaaggagaaggcctggccagtcgcctgatcgaagttggaccttctggtgctcagttccttgggcctgtgatcgtggagatccctcactttgcggcccttcgaggaaaggaaagggaactggtggtcctgcgcagtgagaatggggacagctggaaagagcatttctgtgactacactgaagatgaattgaatgaaattcttaacggcatggatgaagtactggatagcccagaagacctagaaaagaaacgaatctgccgcatcatcacccgagacttcccacagtactttgcagtggtgtctcgtatcaaacaggacagcaatctgattggcccagaaggaggtgtactgagcagcacagtggtgccccaggtgcaggccgtcttcccagagggggcactcaccaagcggatccgcgtaggcctgcaggctcaacctatgcacagtgagctggttaagaagatcctaggcaacaaagctaccttcagccctatagtcactttggaacctagaagaagaaaattccacaaaccaattaccatgaccattcctgtccccaaagcttcaagtgatgtcatgttgaatggttttgggggagatgcaccaaccttaagattactatgcagcataacaggtggaaccacccctgcccagtgggaagatattacaggaactacgccattaacatttgtcaatgaatgtgtttcctttacaacaaacgtgtctgccaggttctggctgatagattgtcgacagatccaggaatccgttacttttgcatcacaagtatacagagaaattatctgcgtaccttatatggccaaatttgtagtgtttgccaaatcacatgaccccattgaagccaggttgaggtgtttctgcatgactgatgataaagtggataagacccttgaacaacaagaaaattttgctgaggtggccagaagcagggatgtggaggtgttagaaggaaaacccatctacgttgattgtttcggcaacttggtaccattaactaaaagtggccagcatcatatattcagtttttttgccttcaaagaaaatagacttcctctatttgtcaaggtacgcgatacgactcaggaaccttgcggacgactatcatttatgaaggagccaaaatccacgagaggcctggtgcatcaagctatttgcaacttaaacatcactttgccgatttatacaaaggaatcagagtcagatcaagaacaggaggaagagatcgatatgacatcagaaaaaaatgatgagacagaatctacagaaacatctgtcctgaaaagtcacctggttaatgaagttcctgtcctagcaagtccggacttgctctctgaagtttctgagatgaaacaagatttgatcaaaatgaccgccatcttgaccacagatgtgtctgataaggcaggttctattaaagtgaaggagctggtgaaggctgctgaggaagagccaggagagccttttgaaatcgttgaaagagttaaagaggacttagagaaagtgaatgaaatcctgagaagtggaacctgcacaagagatgaaagcagtgtgcagagctctcggtctgagagaggattagttgaagaggaatgggttattgtcagtgatgaggaaatagaagaggctaggcaaaaagcacctttagaaatcactgaatatccatgtgtagaagttagaatagataaagagatcaaaggaaaagtagagaaagactcaactgggctagtgaactaccttactgatgatctgaatacctgtgtgcctcttcccaaagagcagctgcagacagttcaagataaggcagggaagaaatgtgaggctctggctgttggcaggagctctgaaaaggaagggaaagacatacccccagatgagacacagagtacacagaaacagcacaaaccaagcttgggaataaagaagccagtaagaaggaaattaaaagaaaagcagaaacaaaaagaggaaggtttacaagctagtgcagagaaagctgaacttaaaaaaggtagttcagaagagtcattaggtgaagacccaggtttagcccctgaaccccttcccactgtcaaggccacatctcctttgatagaagaaactcccattggttccataaaggacaaagtaaaggcccttcagaagcgagtggaagatgaacagaaaggtcgaagcaagttgcccatcagagtcaaaggcaaggaggacgtgccaaaaaagaccacccacaggccacatccagctgcgtcaccctctctgaagtcagagagacatgcgccagggtctccctcccctaaaacagaaagacactctactctttcctcttccgcaaaaactgaaaggcaccctccagtatcaccatcaagtaaaactgagaaacactcacctgtgtcaccctctgcaaaaacggaaagacattcacctgcgtcatcatcgagtaaaactgagaaacactcacctgtatcaccctcgacaaaaactgaaaggcactctcctgtgtcatctacaaaaacagaaagacacccacctgtttcgccttcaggcaaaacagacaaacgtccacctgtatcgccctccgggaggacagaaaaacacccgccagtatcgcctgggagaacagaaaaacgcttgcctgtttcaccctccggaagaacggacaagcaccaacctgtatcaacagctgggaaaactgagaagcacctgcctgtgtcaccttctggcaaaacagaaaagcaaccacctgtatcccccacttcaaaaacagagaggattgaggaaaccatgtctgttcgggagctgatgaaggctttccagtcaggtcaggacccttctaaacataaaactggactctttgagcacaaatcagcaaaacaaaagcagccacaagagaaaggtaaagttcgggtagaaaaagaaaaggggccgatactaacccagagagaagctcagaaaacagagaatcagacaatcaaacgaggccagagactcccggtaacgggcacagcagaatccaaaagaggagttcgtgtttcctccataggagttaagaaagaagatgcagctggaggaaaggagaaagttctcagccacaaaatacctgaacctgttcagtcagtgcctgaagaagaaagccacagagagagcgaagtgcccaaagaaaagatggctgatgagcagggagacatggatctacagatcagcccagataggaaaacctccactgacttctctgaggtcattaagcaagagttggaagacaatgacaaataccaacaattccgcctgagtgaggagacagaaaaggcacagcttcacttagaccaagtactcactagtcctttcaacacaacatttccactcgactacatgaaagatgagttccttccagctctgtctttacaaagcggtgctttagatggcagttctgaaagcctaaagaatgagggggtagccggctctccgtgtggcagcctgatggaggggacccctcagattagttcagaagaaagctataagcatgaaggcctagcagagacccctgagacgagcccagaaagcctttctttctcaccaaagaaaagtgaggagcaaactggggaaacaaaggaaagcaccaagacagaaaccaccacagaaattcgttcagaaaaagagcatcccacgaccaaagacattactggtggctctgaagagcgaggtgccacagtcactgaggactcagagacctctactgagagttttcagaaagaggccactctaggctctcccaaagacacaagccctaaaagacaagatgattgcacaggcagctgtagtgtagcattagctaaagagacacctacaggactgactgaggaggcagcctgtgatgaaggtcaacgtacctttggtagttcagcccacaagacacaaactgatagtgaggttcaagaatccacagccacctcagacgagacaaaggccttgccgctgcctgaggcttctgtaaagacagatacaggaactgaatcaaaacctcagggagtcattagaagtccccaagggttagaacttgcactccctagccgagatagcgaagtcctcagcgctgtggctgatgactcattagcagtgagccacaaagactctctggaagccagccctgtgctagaagataactcttcacacaaaacccctgattctctggagccaagtcctctgaaagaatccccttgccgtgactctctggaaagcagccctgttgaaccaaagatgaaggctggaatttttccaagtcactttcctcttcctgcagctgttgccaaaacagaactcttgacggaagtggcctctgtgcggtcccggctactccgagaccctgatggcagtgctgaggatgacagtcttgagcagacatcgctcatggagagctcagggaagagccccctttctcctgacacccccagctctgaagaagtcagctatgaggttacacccaaaaccacagatgtaagtacaccaaaaccagctgtgattcatgaatgtgcagaggaggatgattcagaaaacggggagaaaaagaggttcacacctgaagaggagatgtttaaaatggtaaccaaaatcaaaatgtttgatgaacttgaacaagaagcaaagcagaaaagggactacaaaaaagaacccaaacaagaagaatcttcttcatcttctgacccagatgctgactgttcagtagatgtggatgaaccaaaacatacaggcagtggggaggatgaaagtggtgtccctgtgttagtaacttcggagagcaggaaggtgtcttcctcctcagaaagtgaacctgagttggcacagcttaaaaaaggtgctgactcaggccttttaccagaaccagtgattcgagtacaacctccttctccacttccatcaagcatggactccaattccagtccagaagaagtacaattccagcctgtcgtttccaaacaatatactttcaagatgaatgaagatactcaggaagagccaggcaaatcagaagaagaaaaagattctgaatcccatttagctgaagaccgtcatgctgtttccactgaggctgaagacaggtcttatgataagctaaacagagacactgatcagccaaaaatctgtgatggccatggatgtgaggccatgagtcctagcagctcagctgctcctgtctcttcaggtctacagagtccgactggtgatgatgttgatgaacagccagtcatctataaagaatcattagctctccaaggcactcatgaaaaagacacagagggagaagagcttgatgtttctagagcagaatctccacaagcagattgccccagtgaaagcttttcatcttcatcctctttgcctcattgtttggtatctgaaggaaaagaattagatgaagacatatctgccacatcttctattcaaaaaacagaggtcacaaaaactgatgaaacatttgagaacttaccaaaggactgcccctctcaagactcatccattactactcaaacagatagattttccatggatgttcccgtgtctgacctagctgagaatgatgaaatctatgatccacaaatcactagcccttatgaaaatgtcccttcccaatcttttttctctagtgaagaaagcaaaacccaaacagatgcaaatcacaccacaagttttcactcttctgaagtgtattctgttaccatcacatcccctgttgaagacgttgtagtggcaagctcctctagtggaactgttttaagcaaagaatctaattttgagggccaggacataaaaatggaatcccaacaggaaagtaccttgtgggaaatgcaatcagacagtgtctcttcatctttcgagcctactatgtccgctacaacaacagttgttggtgaacaaataagcaaagtcatcatcacaaaaactgatgtggattctgattcttggagtgaaattcgggaagacgatgaagcctttgaggctcgtgtgaaagaggaagaacaaaagatatttggtttgatggtagacagacaatcacagggtaccacccctgacaccactcctgctaggaccccaactgaagaggggaccccaacaagtgagcaaaacccatttctgtttcaggaaggaaaattgtttgaaatgacccgaagtggtgccattgatatgaccaaaaggtcctatgcagatgaaagttttcactttttccaaattggtcaagaatccagggaagagactctctctgaagatgtgaaagaaggggctactggggctgatcccctaccgctggagacatcagctgaatcactagcactttcagaatcaaaagaaacagtggatgatgaggcagacttacttccagatgacgtgagtgaggaagtagaggaaatacctgcttcggatgctcaacttaactcccaaatggggatttcagcctccactgaaacacctacaaaagaagctgttagtgtagggaccaaggacctccccaccgtgcaaacgggtgatatacctcctctctctggtgtaaagcagatatcctgccccgactcttctgaaccagctgtacaagtccagttagatttttccacactcaccaggtctgtttattcagataggggtgatgattctcccgattcttccccagaagaacagaaatcagtaatcgagattcctactgcacccatggagaatgtgccttttactgaaagcaaatccaaaattcctgtaaggactatgcccacttccaccccagcacctccatctgcagagtatgagagttcagtttctgaagattttctatccagtgtagatgaggaaaataaggcggatgaagcaaaaccaaagtccaaactccctgtcaaagtacccctccaaagagttgaacagcagctctcagatctagacacctctgtccagaagacagtggctcctcagggacaggacatggcaagcatcgcaccagataatagaagcaaatctgaatctgatgctagttctttggattcaaagaccaaatgcccagtaaaaacccgaagttacactgagacagaaacagagagcagagagagggccgaggaacttgagttagaatcagaagaaggggccacaagaccaaagatacttacatcccgattgccagttaagagcagaagcactacatcttcctgcagggggggcacgagccccacaaaagaaagtaaggagcatttctttgacctttacagaaattccatagaattctttgaggagattagtgatgaggcttccaaattagtggataggctgacacagtcagagagggagcaggaaatagtttcagacgatgaaagtagtagtgccctggaagtatcagtaattgaaaatctgccacctgttgagaccgagcactcagttcctgaggacatctttgacacaaggcccatttgggatgagtctattgagactctgattgaacgcatccctgatgaaaatggccatgaccatgctgaagatccacaggatgagcaggaacggatcgaggaaaggctggcttatattgctgatcaccttggcttcagctggacagaattagcaagagaactggatttcactgaggagcaaattcatcaaattcgaattgaaaatcccaactctcttcaagaccagagtcatgcactgttgaagtactggctagagagggatgggaaacatgctacagataccaacctcgttgaatgtctcaccaagatcaaccgaatggatattgttcatctcatggagaccaacacagaacctctccaggagcgcatcagtcatagttatgcagaaattgaacagaccattacactggatcatagtgaagggttctcggtacttcaagaggagttatgcactgcacagcacaagcagaaagaggagcaagctgtttctaaagaaagtgagacctgcgatcaccctcctatcgtctcagaggaagacatttctgttggttattccacttttcaggatggcgtccccaaaactgagggggacagctcagcaacagcactctttccccaaactcacaaggagcaagttcaacaggatttctcagggaaaatgcaagacctgcctgaagagtcatctctggaatatcagcaggaatattttgtgacaactccaggaacagaaacatcagagactcagaaggctatgatagtacccagctctcccagcaagacacctgaggaagttagcacccctgcagaggaggagaagctgtacctccagaccccaacatccagcgagcggggaggctctcccatcatacaagaacccgaagagccctcagagcacagagaggagagctctccgcggaaaaccagcctcgtaatagtggagtctgccgataaccagcctgagacctgtgaaagactcgatgaagatgcagcttttgaaaagggagacgatatgcctgaaatacccccagaaacagtcacagaagaagaatacattgatgagcatggacacaccgtggtaaagaaggttactaggaaaatcattaggcggtatgtatcctctgaaggcacagagaaagaagagattatggtgcagggaatgccacaggaacctgtcaacatcgaggaaggggatggctattccaaagttataaagcgtgttgtattgaagagtgacaccgagcagtcagaggacaacaatgagtaa

SEQ ID NO: 278203 - DNA, 11775 bp, Artificial Sequence
  derived and/or modified sequence
atgatgaatgaggatgcagcccagaaatcagacagtggggaaaaattcaacggctcctcccaacgcagaaaacggcctaagaagtcagattcaaatgcatcgttcctgagagccgctcgtgcgggaaatctagataaggtcgttgagtatctgaagggtggtatagatatcaacacgtgtaaccagaacggcctcaacgctctgcacctcgcagcgaaagaaggtcacgtgggtttggtgcaggagttactagggagaggctcctcggtagactccgcaaccaaaaaaggaaatacagctctccatattgctagcctggccggacaggccgaggtggtgaaagtactcgtgaaagaaggtgctaacattaacgctcaatctcaaaatggtttcactccactctacatggctgcgcaggagaaccacatagatgtggtaaaatacttgctggagaacggagctaatcagtcaacggctactgaagatgggtttactcccctggctgtggcccttcagcagggtcacaatcaagccgtcgccatacttctggaaaatgatacaaagggcaaggtcaggttgcctgccttacacatcgcagcacgaaaagacgatactaagtccgccgcactgcttctccagaatgatcataacgctgacgttcagtccaagatgatggtgaaccgaactacggaaagcgggttcacccccctgcacattgccgctcactatggaaatgtcaatgtggccaccctgttgctcaatcgcggagccgctgtggacttcacagccagaaatggtatcacccccttacatgtcgcatcaaagaggggcaacacaaatatggttaagttgctcttagacaggggcggacagatcgacgccaaaacccgcgacggcctaactccactgcactgcgccgctcgctctggtcacgatcaggtggttgaacttctcctggagcggggagctcctcttcttgccaggacaaagaatggactgtcccccctacatatggccgcacaaggagatcatgtggagtgcgtgaaacatctgctgcagcataaagcacccgtcgatgatgtcacactcgattatctcaccgccttacacgtagcagcccattgcggacattacagggtaactaaattgcttctagataaacgggcaaaccctaatgcacgcgctctcaacggttttacgccgttgcacatagcctgtaaaaagaatcgaattaaagtaatggagttgcttgtcaagtacggagccagtatccaggcgatcaccgaaagtgggctgacacccattcatgttgccgcattcatggggcacctgaatatcgtcctgctcctgcttcagaatggggcaagccccgatgtcactaatatcaggggcgaaaccgccctccatatggctgctcgcgctggacaagtggaagtggtgagatgcttattgagaaatggggcactggtagacgcacgagcaagagaggagcagacccctctgcatatagccagccgacttggtaaaacagaaattgtgcaactgctattgcagcatatggctcacccagacgctgctaccacaaacggttacacaccactgcatatttcagctcgggaaggacaggtcgacgtcgcctctgtacttcttgaggccggtgctgcacactctctggccaccaaaaaaggctttaccccactccatgttgccgctaagtatgggagcctggacgttgccaagctgcttctgcagcgtcgggcagcagccgattctgcaggtaaaaatggactcactccccttcacgttgcagctcattatgacaaccagaaagtggcattactgttactggaaaaaggcgcaagtccacacgcaacagccaaaaatggttacacacccctgcatattgctgccaaaaagaaccagatgcagatcgcttcaaccctcctaaactacggagctgagaccaatattgtcaccaaacagggcgtgaccccgctccatctggcctcccaggaaggtcataccgacatggtgacgctgctgctggacaaaggggcaaacatccatatgtcaaccaagtctgggctgaccagcttacacttggctgctcaggaagacaaagttaacgtagctgacattttgactaagcatggtgccgaccaagacgcccataccaagcttggatacacgcctctgattgtagcctgccactatggtaacgtgaaaatggtaaactttctgctgaaacagggcgctaatgtgaacgcgaaaactaagaatggctatacgcccctgcaccaggctgctcagcaggggcatactcacattatcaatgttctgctccaacacggggcaaagcccaatgccacaacagctaacggcaacactgccctggctatagccaaacgactcggctatatcagcgtagtagatacgctgaaggttgttactgaagaggtgacaacaaccaccactactattacagagaagcataaattgaatgtgccagaaactatgactgaggtcctcgacgtcagcgatgaggagggcgacgataccatgacgggcgatggaggagaatatctcagaccagaagaccttaaggagttaggggacgactctctgccttccagtcagtttcttgatgggatgaattatctgcgatattccctggagggcggacggagtgattccctaaggtcttttagctccgacagatctcataccctgagtcacgcctcttatttgcgagactccgcagttatggatgacagcgttgtgatcccctctcaccaagtatctacgctggcaaaggaggccgaacgtaattcctaccgcctgtcgtgggggactgagaatctagataatgttgccctgtccagttcccctatccacagcggtttcttggtgtctttcatggtcgacgccaggggcggagctatgagaggttgtagacacaatggcttgaggattattatccccccaagaaagtgtacagcacctactcgtgtgacttgcagactggtaaaacgacacaggctggctacaatgccacctatggttgaaggagaaggcctcgcctcccgactgattgaagtggggccttctggggcacagttcctcgggccagtgatagtagagattccacactttgccgctctgcgtggtaaggagagagagctcgtggtccttaggagcgagaacggggactcatggaaggagcatttttgcgattacaccgaggacgaactgaatgaaatcctgaacggcatggatgaggttttggacagtcccgaagatctggagaagaaaaggatctgtcgaataattaccagggatttcccccagtatttcgctgtcgtgagtcgaatcaagcaggatagtaatctgattggtcccgaagggggagtgctgagttccacagttgtgccccaagttcaggccgtctttccggaaggcgctctgaccaaacggatccgtgtcgggttgcaggcccagcctatgcactcagaacttgtaaagaagatcctgggaaacaaagccactttctctcctatcgtgacactcgagcctcgaaggagaaagtttcataaacctataacaatgacaattcctgtgcctaaggcctccagcgacgtcatgcttaatggttttgggggagatgcacccacactgaggttactctgctctataaccgggggaactactccagctcaatgggaggacattaccggaacaactcctctcacattcgtaaatgagtgtgtgagcttcaccacgaatgtctctgccagattttggctcatcgattgcagacagatccaagagagtgtcaccttcgcttctcaggtgtatagggagataatatgtgtgccttatatggctaaatttgtcgtattcgctaagagtcatgatcccattgaagctaggctgcggtgtttttgcatgacagacgacaaagtagacaagaccttggaacagcaggagaattttgccgaggtggcccgttctcgagacgtggaagtgctggaaggcaagcctatctatgtcgactgcttcggcaacctcgtccccctgaccaaatctggccagcaccacatcttttccttcttcgccttcaaggaaaaccgcctgcctttgttcgtcaaggttagagacacaacacaggaaccctgtgggaggctgagcttcatgaaagagccgaagtctacacgagggcttgtgcatcaagctatatgcaatttgaacattaccctgccaatttacaccaaagaatccgagagcgatcaggagcaggaagaggagattgacatgacttctgagaaaaacgacgagaccgagtccaccgaaactagtgtactaaagtcccatctggtgaacgaagttcctgtacttgcttcgcctgacctcctgtctgaagtgtctgagatgaaacaagatctgatcaaaatgactgctattctgacaactgacgtgtctgataaggccggatccatcaaggtgaaggagcttgttaaggccgctgaagaggagcctggcgagccattcgaaatcgttgagagagtgaaggaggatctggaaaaagtgaacgagattctccgctccgggacctgtacgagagatgagtcatcagtgcagtctagcaggagtgaacgcggtctagtggaagaagagtgggtgattgtgtcagatgaagagattgaggaagcaagacagaaggccccactagagatcaccgagtatccctgcgtggaggtgaggatcgataaggagattaaggggaaggtggaaaaggatagcacgggcctggtcaactatctgaccgacgacctgaacacgtgtgtccctctgcccaaggaacagctgcagacagtccaagacaaggcgggaaagaagtgtgaggctctggccgtcggtcgatccagcgagaaggagggcaaggacataccgcctgatgagacacagtctacgcagaaacagcataaaccctccctgggaataaagaaacccgtgcgcaggaaactcaaggagaagcagaaacagaaggaagaaggactccaggcctccgccgagaaggccgaactcaagaaggggagttcagaggagagcctgggggaggatcccggactcgcccctgagcctctgcctactgtgaaagccactagtcctctgattgaagaaacccccattggctccattaaagataaggtaaaggccctacagaagagagtggaggatgagcagaagggtagatctaaactgcctatccgcgtgaaaggtaaagaggacgttccaaaaaaaaccactcatcgaccacatcctgcggcttccccaagtctaaaatcagaaagacacgctcccggttctccaagtcccaagaccgagagacacagcactctcagctctagtgccaaaacagaacgccacccacctgtgagtccttctagtaaaactgaaaagcactcccctgtgtcgccaagtgctaagaccgagcgacattcccctgcctcgagtagttccaagacagagaagcatagcccagtttcccctagcacaaagactgaaaggcacagccccgtgagctctacaaagacagaacgtcatccgcctgtatctccatcgggcaagacagataaacgaccacctgtgtcaccttctgggagaactgaaaagcaccctcccgtgtcacccggtagaaccgagaagcgcctccctgtaagcccctccggacgaaccgacaaacaccaacctgtgtccactgccggtaagacagaaaagcatttaccagttagtccaagtggcaaaacggaaaaacagccacctgtgtcacctactagcaaaaccgagaggattgaggagactatgtctgtgcgagagctaatgaaggcttttcagtctgggcaggacccttctaagcacaaaactggcctgtttgaacacaaaagcgctaagcagaagcagccacaagaaaagggaaaggtgcgtgtggagaaagaaaagggccctatccttacgcagagagaggcacaaaagacggagaatcaaacaattaaaaggggacagcggctgcccgtgacagggacagccgagtcaaagagaggcgtcagagttagctcaatcggcgtaaaaaaagaggatgcagctggagggaaagagaaagtactgagtcataagattcctgagcccgtgcagtcagtgccggaagaggaaagtcatcgcgagtccgaggttcccaaggagaagatggcagacgagcaaggcgacatggatctccagatttccccagaccggaagacaagcacagatttttctgaggtgattaaacaggaacttgaggacaatgacaagtaccagcagttccgtcttagtgaggaaaccgagaaggctcaattgcacttggaccaagtgctcaccagtcccttcaacacaactttcccacttgactatatgaaggacgaatttctgcccgcattgtctttgcagtcaggggcacttgacggttcctctgaaagcctcaagaacgaaggggtggcagggtccccctgcgggtctctcatggagggaaccccccagatatccagcgaagaaagctataagcatgagggtttggccgaaacgcctgagaccagtcccgagagtcttagtttctccccgaaaaaatctgaagagcaaaccggagaaaccaaggagagcaccaaaaccgaaacgaccaccgagatcagatccgaaaaagagcacccgacaacaaaggacattaccgggggatctgaggaaagaggtgccactgttaccgaagatagcgagacttcgacagagtctttccagaaggaggccactcttggatcgccgaaggacacgtcccctaagagacaggacgactgtactgggtcctgttctgtcgccttggccaaggagacccctaccggtcttactgaagaggcggcttgcgatgaaggtcagaggacgtttgggagctccgctcataagacccagactgattccgaggtgcaggaaagtactgccaccagtgatgagacaaaagccctgccgcttcccgaggcttccgttaaaaccgacaccggcaccgaatctaaacctcagggtgttatccgctcaccgcaaggactggagcttgcgcttccttcacgggattcagaagtgctcagcgccgttgcagatgattcactcgcagtgagtcataaggattcgcttgaggcgtctcctgttctggaagacaacagcagtcacaagacccctgattcactggagccttctccattgaaagagtcgccttgtcgcgattccctggaatccagtcctgtggagccaaagatgaaggccggaatctttccatcccacttcccattgcccgcagccgtggcgaaaaccgagttgttaacagaagtcgcaagcgtgaggtcccgtctgttacgcgacccagacggctccgctgaggacgactcccttgagcagacttccctcatggagagttccggaaagtctcccctcagcccagataccccgtcatctgaagaagtcagctacgaagtcacccctaaaacaacggacgttagcactcccaaaccagcggtcattcacgaatgtgccgaggaggacgacagtgaaaatggcgaaaaaaagagatttacacccgaggaagaaatgtttaaaatggtgaccaaaatcaaaatgttcgacgaacttgaacaggaagcaaaacaaaagcgtgattacaaaaaagaacctaaacaggaggaaagtagcagctccagtgacccagacgccgattgttctgtggatgtggacgagcctaaacacaccggttccggagaagacgagtccggagtgcccgtactagtgacatctgaaagcagaaaggtctcttccagcagtgaatcagaacccgagctggcgcaactgaaaaagggcgctgacagcggccttcttccagagccagtgatcagagtgcagcctcctagccccctgccctcctccatggactcaaatagctctcccgaagaagtccagtttcagccagttgtttctaagcaatacacctttaagatgaacgaggacacccaggaggagcccggtaaatccgaggaggagaaggacagtgaaagtcatctggcggaagacaggcatgccgtgtctacagaggctgaagatagatcttatgataagcttaaccgtgacaccgatcagcctaagatttgcgatgggcatggctgtgaagccatgtccccgtcaagtagcgccgcacctgtgtcttccggtttgcagtcccctacaggcgatgacgtcgatgagcaaccagtaatttataaggaatcattggccttgcagggtactcacgagaaggataccgagggagaagaactggatgtgtctagagcagaaagccctcaagctgattgtccaagcgagtccttttccagctccagctccttgccacactgccttgtatcagagggaaaagaattggatgaggatatctctgcaaccagttctatccagaaaactgaggtaaccaaaaccgatgagacttttgagaatcttcccaaggattgtcctagccaggattccagtatcaccacacaaaccgaccggtttagcatggatgtcccggtttccgatctggccgaaaacgacgagatatatgatccacagattacctcaccttatgagaatgttccatctcaatcttttttcagttcagaggaatccaaaactcagactgatgcaaaccacaccacatcctttcactccagcgaagtttacagcgtgactattactagccctgtcgaggatgtagtcgtggcctcctcctccagcggaaccgtgttgtccaaagagagtaattttgagggtcaggatatcaagatggagtctcagcaggaaagtaccctgtgggagatgcaatccgactcggtgagctcatcgttcgagccaacaatgagcgctactaccactgtggtgggcgaacagatatcgaaggtcatcatcacaaagaccgacgtggactctgattcatggtctgagatcagagaagatgatgaggcgttcgaggctcgagtaaaagaagaggagcaaaagatattcggcctgatggtcgatcgacagtcccagggaaccacccccgacaccaccccagccaggacacccaccgaagaaggcacaccaacaagtgaacagaatccattcctgttccaggagggcaaactgtttgaaatgactaggtcgggggctatcgatatgaccaagcgaagttatgctgacgaatccttccacttttttcaaattggccaggaatctagagaggaaacattgagtgaggacgttaaagaaggcgctacaggcgctgacccactgcccctggaaaccagcgccgagtcactggccctgagcgagtccaaagagacggtggatgatgaagctgacctcttacctgatgacgttagtgaggaagtagaagagatcccggctagtgacgcccagttaaactcgcaaatgggaatctccgcgagtactgagacacccaccaaagaggccgtgagcgtcggaaccaaggatcttccgaccgtgcagacaggggacattccgcctcttagtggcgtcaaacagatatcatgccctgactccagtgagcccgctgtgcaggtgcagcttgatttttcgacactcacaagatccgtctacagcgaccggggtgacgacagtcctgacagctctcccgaggagcaaaaaagcgtcatcgaaattccgactgcccctatggagaatgttcctttcactgagtccaagagcaaaattcctgtgaggacgatgcctacgtcaacgcccgctccacctagcgcagaatacgaatccagcgtgagcgaagacttcctgtcttccgtggatgaggagaacaaagcagacgaagcgaagcctaaaagtaagttgccagtcaaagtgcccctgcagagggtcgaacaacagctgagcgatcttgacacgtctgttcagaagactgtggcacctcaaggccaggacatggcctctatcgctcccgataatcgatcgaaaagtgagagcgacgctagctccctggattccaagaccaaatgtcccgtgaagaccagaagttacacggaaacagagaccgaatcacgtgagagagcggaggagttggaactggaatccgaagaaggcgcaactaggcctaagattctgacctcgcggcttcccgtcaagtctcgatctaccacaagctcttgtcggggtgggacttccccaacaaaggaaagcaaagaacatttctttgacctctacagaaacagcatcgaattctttgaagaaatcagcgatgaagcatcaaaacttgtcgaccgcctgacccagtctgagcgggagcaagaaatagtgagcgacgacgagtcttctagtgctctggaggtgagcgtgatcgagaacctgccaccggtggagaccgagcatagtgtccccgaggacatctttgatacaagacctatttgggacgagagcattgaaaccctcatcgagcgtatcccagacgagaacgggcatgaccatgcggaggaccctcaagacgaacaggaacgcatcgaggagaggctcgcctacatcgccgaccaccttggtttcagttggacggagctggcacgcgaactcgactttactgaagagcagattcaccagattcgcattgaaaacccaaatagtctccaggatcaatctcatgctctgctgaagtattggctagaacgggacggaaaacatgctacagatactaatttagtggagtgtctcactaaaatcaatcgcatggacatagttcatctgatggagacaaacactgagcccctccaggagcgcatttctcactcttacgccgagattgagcaaactataacactcgatcactccgaaggattctccgtcttgcaagaagagctgtgcacggcacagcataagcagaaggaagaacaggccgtatccaaggagtcagagacctgcgatcatcccccaatcgtgtcagaggaggacataagcgtgggttatagcaccttccaggatggggttccgaagaccgagggtgatagtagtgctactgcccttttcccccaaactcataaggagcaggttcagcaggacttctctggcaaaatgcaggatctgcctgaagaaagcagcctggagtatcagcaagagtatttcgtgaccactcctggcacggaaacctctgagactcaaaaagcgatgatcgttccttccagccctagcaagacccccgaggaggtgtctacacctgcggaagaagaaaagctgtatctgcagacgcccaccagcagtgagcggggaggatccccaattatccaagagcccgaagaaccctcagagcaccgcgaggaatcatcaccaaggaagacatctttggtgatcgtggagtcagctgacaatcagccagagacctgcgagaggctggatgaagacgctgcatttgaaaagggcgacgacatgcccgagatccctccagagactgtcaccgaggaagaatacatcgatgaacatggccataccgtagtcaagaaggtcacgcgcaaaatcataaggagatacgtctcatcagaaggcacagaaaaagaggaaatcatggtccagggcatgccacaggaacctgtgaatatcgaagaaggggacggatacagtaaagtgatcaagagagtcgtcttgaagtccgacaccgaacagtccgaggacaacaatgagtat

SEQ ID NO: 278204 - DNA, 11775 bp, Artificial Sequence
  derived and/or modified sequence
atgatgaacgaggacgccgcccagaagagcgacagcggcgagaagttcaacggcagcagccagagaagaaagagacccaagaagagcgacagcaacgccagcttcctgagagccgccagagccggcaacctggacaaggtggtggagtacctgaagggcggcatcgacatcaacacctgcaaccagaacggcctgaacgccctgcacctggccgccaaggagggccacgtgggcctggtgcaggagctgctgggcagaggcagcagcgtggacagcgccaccaagaagggcaacaccgccctgcacatcgccagcctggccggccaggccgaggtggtgaaggtgctggtgaaggagggcgccaacatcaacgcccagagccagaacggcttcacccccctgtacatggccgcccaggagaaccacatcgacgtggtgaagtacctgctggagaacggcgccaaccagagcaccgccaccgaggacggcttcacccccctggccgtggccctgcagcagggccacaaccaggccgtggccatcctgctggagaacgacaccaagggcaaggtgagactgcccgccctgcacatcgccgccagaaaggacgacaccaagagcgccgccctgctgctgcagaacgaccacaacgccgacgtgcagagcaagatgatggtgaacagaaccaccgagagcggcttcacccccctgcacatcgccgcccactacggcaacgtgaacgtggccaccctgctgctgaacagaggcgccgccgtggacttcaccgccagaaacggcatcacccccctgcacgtggccagcaagagaggcaacaccaacatggtgaagctgctgctggacagaggcggccagatcgacgccaagaccagagacggcctgacccccctgcactgcgccgccagaagcggccacgaccaggtggtggagctgctgctggagagaggcgcccccctgctggccagaaccaagaacggcctgagccccctgcacatggccgcccagggcgaccacgtggagtgcgtgaagcacctgctgcagcacaaggcccccgtggacgacgtgaccctggactacctgaccgccctgcacgtggccgcccactgcggccactacagagtgaccaagctgctgctggacaagagagccaaccccaacgccagagccctgaacggcttcacccccctgcacatcgcctgcaagaagaacagaatcaaggtgatggagctgctggtgaagtacggcgccagcatccaggccatcaccgagagcggcctgacccccatccacgtggccgccttcatgggccacctgaacatcgtgctgctgctgctgcagaacggcgccagccccgacgtgaccaacatcagaggcgagaccgccctgcacatggccgccagagccggccaggtggaggtggtgagatgcctgctgagaaacggcgccctggtggacgccagagccagagaggagcagacccccctgcacatcgccagcagactgggcaagaccgagatcgtgcagctgctgctgcagcacatggcccaccccgacgccgccaccaccaacggctacacccccctgcacatcagcgccagagagggccaggtggacgtggccagcgtgctgctggaggccggcgccgcccacagcctggccaccaagaagggcttcacccccctgcacgtggccgccaagtacggcagcctggacgtggccaagctgctgctgcagagaagagccgccgccgacagcgccggcaagaacggcctgacccccctgcacgtggccgcccactacgacaaccagaaggtggccctgctgctgctggagaagggcgccagcccccacgccaccgccaagaacggctacacccccctgcacatcgccgccaagaagaaccagatgcagatcgccagcaccctgctgaactacggcgccgagaccaacatcgtgaccaagcagggcgtgacccccctgcacctggccagccaggagggccacaccgacatggtgaccctgctgctggacaagggcgccaacatccacatgagcaccaagagcggcctgaccagcctgcacctggccgcccaggaggacaaggtgaacgtggccgacatcctgaccaagcacggcgccgaccaggacgcccacaccaagctgggctacacccccctgatcgtggcctgccactacggcaacgtgaagatggtgaacttcctgctgaagcagggcgccaacgtgaacgccaagaccaagaacggctacacccccctgcaccaggccgcccagcagggccacacccacatcatcaacgtgctgctgcagcacggcgccaagcccaacgccaccaccgccaacggcaacaccgccctggccatcgccaagagactgggctacatcagcgtggtggacaccctgaaggtggtgaccgaggaggtgaccaccaccaccaccaccatcaccgagaagcacaagctgaacgtgcccgagaccatgaccgaggtgctggacgtgagcgacgaggagggcgacgacaccatgaccggcgacggcggcgagtacctgagacccgaggacctgaaggagctgggcgacgacagcctgcccagcagccagttcctggacggcatgaactacctgagatacagcctggagggcggcagaagcgacagcctgagaagcttcagcagcgacagaagccacaccctgagccacgccagctacctgagagacagcgccgtgatggacgacagcgtggtgatccccagccaccaggtgagcaccctggccaaggaggccgagagaaacagctacagactgagctggggcaccgagaacctggacaacgtggccctgagcagcagccccatccacagcggcttcctggtgagcttcatggtggacgccagaggcggcgccatgagaggctgcagacacaacggcctgagaatcatcatcccccccagaaagtgcaccgcccccaccagagtgacctgcagactggtgaagagacacagactggccaccatgccccccatggtggagggcgagggcctggccagcagactgatcgaggtgggccccagcggcgcccagttcctgggccccgtgatcgtggagatcccccacttcgccgccctgagaggcaaggagagagagctggtggtgctgagaagcgagaacggcgacagctggaaggagcacttctgcgactacaccgaggacgagctgaacgagatcctgaacggcatggacgaggtgctggacagccccgaggacctggagaagaagagaatctgcagaatcatcaccagagacttcccccagtacttcgccgtggtgagcagaatcaagcaggacagcaacctgatcggccccgagggcggcgtgctgagcagcaccgtggtgccccaggtgcaggccgtgttccccgagggcgccctgaccaagagaatcagagtgggcctgcaggcccagcccatgcacagcgagctggtgaagaagatcctgggcaacaaggccaccttcagccccatcgtgaccctggagcccagaagaagaaagttccacaagcccatcaccatgaccatccccgtgcccaaggccagcagcgacgtgatgctgaacggcttcggcggcgacgcccccaccctgagactgctgtgcagcatcaccggcggcaccacccccgcccagtgggaggacatcaccggcaccacccccctgaccttcgtgaacgagtgcgtgagcttcaccaccaacgtgagcgccagattctggctgatcgactgcagacagatccaggagagcgtgaccttcgccagccaggtgtacagagagatcatctgcgtgccctacatggccaagttcgtggtgttcgccaagagccacgaccccatcgaggccagactgagatgcttctgcatgaccgacgacaaggtggacaagaccctggagcagcaggagaacttcgccgaggtggccagaagcagagacgtggaggtgctggagggcaagcccatctacgtggactgcttcggcaacctggtgcccctgaccaagagcggccagcaccacatcttcagcttcttcgccttcaaggagaacagactgcccctgttcgtgaaggtgagagacaccacccaggagccctgcggcagactgagcttcatgaaggagcccaagagcaccagaggcctggtgcaccaggccatctgcaacctgaacatcaccctgcccatctacaccaaggagagcgagagcgaccaggagcaggaggaggagatcgacatgaccagcgagaagaacgacgagaccgagagcaccgagaccagcgtgctgaagagccacctggtgaacgaggtgcccgtgctggccagccccgacctgctgagcgaggtgagcgagatgaagcaggacctgatcaagatgaccgccatcctgaccaccgacgtgagcgacaaggccggcagcatcaaggtgaaggagctggtgaaggccgccgaggaggagcccggcgagcccttcgagatcgtggagagagtgaaggaggacctggagaaggtgaacgagatcctgagaagcggcacctgcaccagagacgagagcagcgtgcagagcagcagaagcgagagaggcctggtggaggaggagtgggtgatcgtgagcgacgaggagatcgaggaggccagacagaaggcccccctggagatcaccgagtacccctgcgtggaggtgagaatcgacaaggagatcaagggcaaggtggagaaggacagcaccggcctggtgaactacctgaccgacgacctgaacacctgcgtgcccctgcccaaggagcagctgcagaccgtgcaggacaaggccggcaagaagtgcgaggccctggccgtgggcagaagcagcgagaaggagggcaaggacatcccccccgacgagacccagagcacccagaagcagcacaagcccagcctgggcatcaagaagcccgtgagaagaaagctgaaggagaagcagaagcagaaggaggagggcctgcaggccagcgccgagaaggccgagctgaagaagggcagcagcgaggagagcctgggcgaggaccccggcctggcccccgagcccctgcccaccgtgaaggccaccagccccctgatcgaggagacccccatcggcagcatcaaggacaaggtgaaggccctgcagaagagagtggaggacgagcagaagggcagaagcaagctgcccatcagagtgaagggcaaggaggacgtgcccaagaagaccacccacagaccccaccccgccgccagccccagcctgaagagcgagagacacgcccccggcagccccagccccaagaccgagagacacagcaccctgagcagcagcgccaagaccgagagacacccccccgtgagccccagcagcaagaccgagaagcacagccccgtgagccccagcgccaagaccgagagacacagccccgccagcagcagcagcaagaccgagaagcacagccccgtgagccccagcaccaagaccgagagacacagccccgtgagcagcaccaagaccgagagacacccccccgtgagccccagcggcaagaccgacaagagaccccccgtgagccccagcggcagaaccgagaagcacccccccgtgagccccggcagaaccgagaagagactgcccgtgagccccagcggcagaaccgacaagcaccagcccgtgagcaccgccggcaagaccgagaagcacctgcccgtgagccccagcggcaagaccgagaagcagccccccgtgagccccaccagcaagaccgagagaatcgaggagaccatgagcgtgagagagctgatgaaggccttccagagcggccaggaccccagcaagcacaagaccggcctgttcgagcacaagagcgccaagcagaagcagccccaggagaagggcaaggtgagagtggagaaggagaagggccccatcctgacccagagagaggcccagaagaccgagaaccagaccatcaagagaggccagagactgcccgtgaccggcaccgccgagagcaagagaggcgtgagagtgagcagcatcggcgtgaagaaggaggacgccgccggcggcaaggagaaggtgctgagccacaagatccccgagcccgtgcagagcgtgcccgaggaggagagccacagagagagcgaggtgcccaaggagaagatggccgacgagcagggcgacatggacctgcagatcagccccgacagaaagaccagcaccgacttcagcgaggtgatcaagcaggagctggaggacaacgacaagtaccagcagttcagactgagcgaggagaccgagaaggcccagctgcacctggaccaggtgctgaccagccccttcaacaccaccttccccctggactacatgaaggacgagttcctgcccgccctgagcctgcagagcggcgccctggacggcagcagcgagagcctgaagaacgagggcgtggccggcagcccctgcggcagcctgatggagggcaccccccagatcagcagcgaggagagctacaagcacgagggcctggccgagacccccgagaccagccccgagagcctgagcttcagccccaagaagagcgaggagcagaccggcgagaccaaggagagcaccaagaccgagaccaccaccgagatcagaagcgagaaggagcaccccaccaccaaggacatcaccggcggcagcgaggagagaggcgccaccgtgaccgaggacagcgagaccagcaccgagagcttccagaaggaggccaccctgggcagccccaaggacaccagccccaagagacaggacgactgcaccggcagctgcagcgtggccctggccaaggagacccccaccggcctgaccgaggaggccgcctgcgacgagggccagagaaccttcggcagcagcgcccacaagacccagaccgacagcgaggtgcaggagagcaccgccaccagcgacgagaccaaggccctgcccctgcccgaggccagcgtgaagaccgacaccggcaccgagagcaagccccagggcgtgatcagaagcccccagggcctggagctggccctgcccagcagagacagcgaggtgctgagcgccgtggccgacgacagcctggccgtgagccacaaggacagcctggaggccagccccgtgctggaggacaacagcagccacaagacccccgacagcctggagcccagccccctgaaggagagcccctgcagagacagcctggagagcagccccgtggagcccaagatgaaggccggcatcttccccagccacttccccctgcccgccgccgtggccaagaccgagctgctgaccgaggtggccagcgtgagaagcagactgctgagagaccccgacggcagcgccgaggacgacagcctggagcagaccagcctgatggagagcagcggcaagagccccctgagccccgacacccccagcagcgaggaggtgagctacgaggtgacccccaagaccaccgacgtgagcacccccaagcccgccgtgatccacgagtgcgccgaggaggacgacagcgagaacggcgagaagaagagattcacccccgaggaggagatgttcaagatggtgaccaagatcaagatgttcgacgagctggagcaggaggccaagcagaagagagactacaagaaggagcccaagcaggaggagagcagcagcagcagcgaccccgacgccgactgcagcgtggacgtggacgagcccaagcacaccggcagcggcgaggacgagagcggcgtgcccgtgctggtgaccagcgagagcagaaaggtgagcagcagcagcgagagcgagcccgagctggcccagctgaagaagggcgccgacagcggcctgctgcccgagcccgtgatcagagtgcagccccccagccccctgcccagcagcatggacagcaacagcagccccgaggaggtgcagttccagcccgtggtgagcaagcagtacaccttcaagatgaacgaggacacccaggaggagcccggcaagagcgaggaggagaaggacagcgagagccacctggccgaggacagacacgccgtgagcaccgaggccgaggacagaagctacgacaagctgaacagagacaccgaccagcccaagatctgcgacggccacggctgcgaggccatgagccccagcagcagcgccgcccccgtgagcagcggcctgcagagccccaccggcgacgacgtggacgagcagcccgtgatctacaaggagagcctggccctgcagggcacccacgagaaggacaccgagggcgaggagctggacgtgagcagagccgagagcccccaggccgactgccccagcgagagcttcagcagcagcagcagcctgccccactgcctggtgagcgagggcaaggagctggacgaggacatcagcgccaccagcagcatccagaagaccgaggtgaccaagaccgacgagaccttcgagaacctgcccaaggactgccccagccaggacagcagcatcaccacccagaccgacagattcagcatggacgtgcccgtgagcgacctggccgagaacgacgagatctacgacccccagatcaccagcccctacgagaacgtgcccagccagagcttcttcagcagcgaggagagcaagacccagaccgacgccaaccacaccaccagcttccacagcagcgaggtgtacagcgtgaccatcaccagccccgtggaggacgtggtggtggccagcagcagcagcggcaccgtgctgagcaaggagagcaacttcgagggccaggacatcaagatggagagccagcaggagagcaccctgtgggagatgcagagcgacagcgtgagcagcagcttcgagcccaccatgagcgccaccaccaccgtggtgggcgagcagatcagcaaggtgatcatcaccaagaccgacgtggacagcgacagctggagcgagatcagagaggacgacgaggccttcgaggccagagtgaaggaggaggagcagaagatcttcggcctgatggtggacagacagagccagggcaccacccccgacaccacccccgccagaacccccaccgaggagggcacccccaccagcgagcagaaccccttcctgttccaggagggcaagctgttcgagatgaccagaagcggcgccatcgacatgaccaagagaagctacgccgacgagagcttccacttcttccagatcggccaggagagcagagaggagaccctgagcgaggacgtgaaggagggcgccaccggcgccgaccccctgcccctggagaccagcgccgagagcctggccctgagcgagagcaaggagaccgtggacgacgaggccgacctgctgcccgacgacgtgagcgaggaggtggaggagatccccgccagcgacgcccagctgaacagccagatgggcatcagcgccagcaccgagacccccaccaaggaggccgtgagcgtgggcaccaaggacctgcccaccgtgcagaccggcgacatcccccccctgagcggcgtgaagcagatcagctgccccgacagcagcgagcccgccgtgcaggtgcagctggacttcagcaccctgaccagaagcgtgtacagcgacagaggcgacgacagccccgacagcagccccgaggagcagaagagcgtgatcgagatccccaccgcccccatggagaacgtgcccttcaccgagagcaagagcaagatccccgtgagaaccatgcccaccagcacccccgccccccccagcgccgagtacgagagcagcgtgagcgaggacttcctgagcagcgtggacgaggagaacaaggccgacgaggccaagcccaagagcaagctgcccgtgaaggtgcccctgcagagagtggagcagcagctgagcgacctggacaccagcgtgcagaagaccgtggccccccagggccaggacatggccagcatcgcccccgacaacagaagcaagagcgagagcgacgccagcagcctggacagcaagaccaagtgccccgtgaagaccagaagctacaccgagaccgagaccgagagcagagagagagccgaggagctggagctggagagcgaggagggcgccaccagacccaagatcctgaccagcagactgcccgtgaagagcagaagcaccaccagcagctgcagaggcggcaccagccccaccaaggagagcaaggagcacttcttcgacctgtacagaaacagcatcgagttcttcgaggagatcagcgacgaggccagcaagctggtggacagactgacccagagcgagagagagcaggagatcgtgagcgacgacgagagcagcagcgccctggaggtgagcgtgatcgagaacctgccccccgtggagaccgagcacagcgtgcccgaggacatcttcgacaccagacccatctgggacgagagcatcgagaccctgatcgagagaatccccgacgagaacggccacgaccacgccgaggacccccaggacgagcaggagagaatcgaggagagactggcctacatcgccgaccacctgggcttcagctggaccgagctggccagagagctggacttcaccgaggagcagatccaccagatcagaatcgagaaccccaacagcctgcaggaccagagccacgccctgctgaagtactggctggagagagacggcaagcacgccaccgacaccaacctggtggagtgcctgaccaagatcaacagaatggacatcgtgcacctgatggagaccaacaccgagcccctgcaggagagaatcagccacagctacgccgagatcgagcagaccatcaccctggaccacagcgagggcttcagcgtgctgcaggaggagctgtgcaccgcccagcacaagcagaaggaggagcaggccgtgagcaaggagagcgagacctgcgaccacccccccatcgtgagcgaggaggacatcagcgtgggctacagcaccttccaggacggcgtgcccaagaccgagggcgacagcagcgccaccgccctgttcccccagacccacaaggagcaggtgcagcaggacttcagcggcaagatgcaggacctgcccgaggagagcagcctggagtaccagcaggagtacttcgtgaccacccccggcaccgagaccagcgagacccagaaggccatgatcgtgcccagcagccccagcaagacccccgaggaggtgagcacccccgccgaggaggagaagctgtacctgcagacccccaccagcagcgagagaggcggcagccccatcatccaggagcccgaggagcccagcgagcacagagaggagagcagccccagaaagaccagcctggtgatcgtggagagcgccgacaaccagcccgagacctgcgagagactggacgaggacgccgccttcgagaagggcgacgacatgcccgagatcccccccgagaccgtgaccgaggaggagtacatcgacgagcacggccacaccgtggtgaagaaggtgaccagaaagatcatcagaagatacgtgagcagcgagggcaccgagaaggaggagatcatggtgcagggcatgccccaggagcccgtgaacatcgaggagggcgacggctacagcaaggtgatcaagagagtggtgctgaagagcgacaccgagcagagcgaggacaacaacgagtag

SEQ ID NO: 278205 - protein, 318 aa, Artificial Sequence
  derived and/or modified sequence
MCRTALGVTTLQDLGVCWRKEHDPAEMLRVGRAELGGWKPSWEAIVKEVAAATGHTVVLVDQTEDILAKSKKGIEESLRKVAKKKFAENLKAGDEFVEKTLSTIATSTDAASVVHSTDLVVEAIVENLKVKNELFKRLDKFAAEHTIFASNTSSLQITSIANATTRQDRFAGLHFFNPVPVMKLVEVIKTPMTSQKTFESLVDFSKALGKHPVSCKDTPGFIVNRLLVPYLMEAIRLYERGDASKEDIDTAMKLGAGYPMGPFELLDYVGLDTTKFIVDGWHEMDAENPLHQPSPSLNKLVAENKFGKKTGEGFYKYK

SEQ ID NO: 278206 - DNA, 957 bp, Artificial Sequence
  derived and/or modified sequence
atgtgcagaaccgccctgggcgtgaccaccctgcaggacctgggcgtgtgctggagaaaggagcacgaccccgccgagatgctgagagtgggcagagccgagctgggcggctggaagcccagctgggaggccatcgtgaaggaggtggccgccgccaccggccacaccgtggtgctggtggaccagaccgaggacatcctggccaagagcaagaagggcatcgaggagagcctgagaaaggtggccaagaagaagttcgccgagaacctgaaggccggcgacgagttcgtggagaagaccctgagcaccatcgccaccagcaccgacgccgccagcgtggtgcacagcaccgacctggtggtggaggccatcgtggagaacctgaaggtgaagaacgagctgttcaagagactggacaagttcgccgccgagcacaccatcttcgccagcaacaccagcagcctgcagatcaccagcatcgccaacgccaccaccagacaggacagattcgccggcctgcacttcttcaaccccgtgcccgtgatgaagctggtggaggtgatcaagacccccatgaccagccagaagaccttcgagagcctggtggacttcagcaaggccctgggcaagcaccccgtgagctgcaaggacacccccggcttcatcgtgaacagactgctggtgccctacctgatggaggccatcagactgtacgagagaggcgacgccagcaaggaggacatcgacaccgccatgaagctgggcgccggctaccccatgggccccttcgagctgctggactacgtgggcctggacaccaccaagttcatcgtggacggctggcacgagatggacgccgagaaccccctgcaccagcccagccccagcctgaacaagctggtggccgagaacaagttcggcaagaagaccggcgagggcttctacaagtacaagtag

SEQ ID NO: 278207 - DNA, 957 bp, Artificial Sequence
  derived and/or modified sequence
atgtgtaggacggccttaggcgtaaccactttgcaggaccttggggtgtgttggaggaaggagcatgatccggccgagatgctacgtgtaggacgggccgagctgggcggctggaaaccttcctgggaggctattgtgaaggaggttgccgcggcaaccggccataccgttgtgctggtcgatcagaccgaagacatcctggccaagagcaagaaaggcattgaagaatctcttcgcaaagtggcaaaaaagaaatttgcagaaaacctaaaggcaggagacgagtttgtcgagaagactctgagcactattgcaacttcaactgacgccgcaagcgtcgtgcattctaccgacctagtggttgaggccattgttgagaatttgaaggtcaaaaatgagctgtttaaaagactggataaatttgccgctgagcataccatctttgcaagcaacacctcttcgcttcaaatcaccagcattgctaacgcaaccacccggcaggacagattcgctgggctgcacttctttaacccggtcccagttatgaaacttgtagaagtcatcaaaacacctatgacctcgcagaagactttcgagtctctggtcgatttctctaaagcccttgggaaacaccccgtctcatgtaaggatacccccggcttcattgttaaccggctgcttgtcccctacctgatggaggcaataagactctatgaacgcggagacgcatcaaaggaagatatagacacagccatgaagttgggggccggctatccaatggggccattcgaacttctggactacgtcggcctggacactacaaaattcatcgtggacggatggcacgaaatggacgcagaaaaccccctgcaccagccgtcgcctagcctaaacaagctggtggcagagaacaaattcgggaagaagaccggcgaagggttctataagtacaaatag

SEQ ID NO: 278208 - DNA, 957 bp, Artificial Sequence
  derived and/or modified sequence
atgtgtcgcactgccctgggggttaccacccttcaagaccttggagtttgctggcgaaaggagcatgatcccgcagagatgctcagagtgggcagagcagagttaggcgggtggaagccctcatgggaagcaatagtgaaggaagtcgccgcagcgactggtcacacagtggtgctggtagaccagaccgaggacatcctggctaaatcaaagaaaggaatcgaggaaagtttgagaaaggtagcaaaaaagaagttcgctgagaatctgaaagcaggcgatgaatttgtagagaaaacattatccaccatcgccaccagcactgatgccgcctcagttgtacacagcacagatttggtggttgaagctatcgtcgagaaccttaaagtgaagaacgagctattcaaacggctggataagttcgcggctgagcacacaatattcgcgtccaataccagttctttgcaaattacaagtatcgctaacgccacgactcgccaggaccgcttcgcggggctgcacttcttcaaccccgtccccgtcatgaagttagtggaagtcatcaaaacccccatgacctcccagaagaccttcgagagcctcgtggatttcagcaaggcactcgggaagcacccagtctcctgcaaagacacaccaggattcattgtgaatagactgctggtgccttacttgatggaggccattagactctacgagcgcggggacgcatcaaaagaggacatcgacacagcaatgaagcttggcgcgggctatcccatgggaccatttgagcttttggactacgtcggcttggacaccaccaaattcatcgtggatggctggcatgaaatggacgctgagaatcctctgcaccagccctccccatcattaaacaagctggtggctgagaataagttcggaaaaaaaacgggagaaggtttctacaaatacaaatag

SEQ ID NO: 278209 - DNA, 957 bp, Artificial Sequence
  derived and/or modified sequence
atgtgcaggacagccctgggcgtgaccaccctgcaggacctgggcgtgtgctggaggaaggagcatgaccctgctgagatgctgcgggtgggccgggcagagctgggcggctggaagcccagctgggaggccatcgtgaaggaggtggccgccgccaccggccacacagtggtgctggtggaccagacagaggacatcctggccaagagcaagaagggcatcgaggagagcctgaggaaggtggccaagaagaagtttgctgagaacctgaaggctggagatgaatttgtggagaagaccctgagcaccatcgccaccagcacagatgctgcctctgtggtgcacagcacagacctggtggtggaggccatcgtggagaacctgaaggtgaagaatgagctgttcaagaggctggacaagtttgctgctgagcacaccatctttgccagcaacaccagcagcctgcagatcaccagcatcgccaatgccaccacccggcaggacagatttgctggcctgcacttcttcaaccctgtgcctgtgatgaagctggtggaggtgatcaagacccccatgaccagccagaagacctttgagagcctggtggacttcagcaaggccctgggcaagcaccctgtgtcctgcaaggacaccccaggcttcatcgtgaaccggctgctggtgccctacctgatggaggccatccggctgtatgaaagaggagatgccagcaaggaggacatcgacacagccatgaagctgggcgccggctaccccatgggcccctttgagctgctggactatgtgggcctggacaccaccaagttcatcgtggatggctggcatgagatggatgctgagaaccccctgcaccagcccagccccagcctgaacaagctggtggccgagaacaagtttgggaagaagacaggagagggcttctacaagtacaagtag

SEQ ID NO: 278210 - DNA, 957 bp, Artificial Sequence
  derived and/or modified sequence
atgtgccggaccgccctgggcgtgaccaccctgcaggacctgggcgtatgctggcgaaaagaacatgaccccgcagagatgctccgggtgggacgtgccgaactggggggatggaaacctagctgggaagccattgtgaaggaggtggccgctgctaccggccataccgtcgtcctagtggatcagaccgaggacatcctggccaaatcgaagaagggcatcgaagaatccctgcggaaagtggccaagaaaaagttcgcagagaaccttaaggcaggcgatgagtttgtggaaaagacactctccaccattgccaccagcactgatgccgcctcagttgtgcatagcaccgatttagtcgttgaggccatagttgaaaatctcaaagttaagaacgaactcttcaagcgcctggacaaatttgccgccgagcacacgatctttgcaagtaatacatcttccctgcaaattactagcatcgccaacgcaactaccaggcaggatagatttgcagggctgcatttcttcaaccccgtgccagtgatgaagctcgtggaggttatcaagacccctatgacgtcccagaaaacatttgagtccctcgtcgacttctcaaaagcgctcggaaaacaccccgtatcttgcaaagatacgccaggatttatcgtgaatcgccttttagtcccgtacctgatggaggcaatccgtctttatgagagaggggatgcctctaaagaagacatcgacaccgccatgaagcttggcgcagggtacccgatgggtcccttcgagctgcttgattacgtcgggctggacactaccaaattcattgttgatggatggcacgagatggacgccgagaaccccctccaccagccaagcccatccttgaataagttagtggcggaaaataagttcggaaagaagacaggagagggcttttacaagtacaagtag

SEQ ID NO: 278211 - DNA, 957 bp, Artificial Sequence
  derived and/or modified sequence
atgtgccggaccgccctgggcgtgaccaccctgcaggacctgggcgtttgttggagaaaagagcatgatcctgccgagatgctacgggttggcagagctgaactcggagggtggaagccaagttgggaggcaatcgttaaagaggtggccgcagccaccggacacacagtagttttggttgaccagacggaggatatacttgccaaatctaaaaaagggatcgaggagtcgctgaggaaggttgccaaaaagaagtttgctgagaacctcaaggccggggacgaatttgtcgagaaaactctttctaccatcgccacctctacagatgcggcctctgtggtgcactctacagacctcgtagttgaggccatcgtcgaaaatctcaaagttaaaaatgagctttttaaaaggctggataaattcgctgcagagcacacaatattcgctagtaatacaagttccctccagataacctctatcgcaaatgcaactactagacaggatcgcttcgccggtctgcacttttttaaccccgtgccagtcatgaaactagtggaagtgattaaaacacctatgactagccagaaaaccttcgaatcccttgtcgacttttcaaaggcattaggcaagcatccagtcagctgtaaggacacaccgggctttattgtgaatagattgttggtcccatacctcatggaagctatcaggctctacgaacggggggacgccagtaaagaagatattgacacagctatgaagctcggcgcaggctaccctatggggcctttcgagcttctggactatgttggtttggatacgactaaatttattgttgatggctggcacgagatggatgccgagaaccctctgcatcagccctcgccatcacttaataagcttgtggctgaaaataaatttggaaagaagaccggggaagggttctacaagtacaagtag

SEQ ID NO: 278212 - DNA, 957 bp, Artificial Sequence
  derived and/or modified sequence
atgtgtcgcacggccctcggtgttacaaccctccaggacttgggagtgtgttggaggaaagaacacgatcccgctgagatgcttcgagtgggtcgagccgagctgggaggctggaagccctcatgggaggccattgtgaaagaagtggccgctgcgactgggcataccgttgttctcgtcgatcaaaccgaggatatcttggcaaaatcgaagaagggtatagaggagtcccttaggaaagtggccaagaagaagtttgcggagaacttaaaagctggcgacgaatttgtcgagaagactctcagcaccattgccacaagcaccgacgccgcatcagtggtccacagtaccgacctggtggtcgaggcaatagtcgagaatctgaaagtgaagaacgagctgtttaaacgtctggataaattcgcagcagagcacaccatattcgcatcgaatacatcctccctgcagattactagtatcgcaaacgccactactcggcaggatagattcgcgggtctacatttttttaatccagttcctgttatgaagctggtcgaggtgattaaaaccccaatgacttctcaaaaaaccttcgaaagcctcgtggactttagcaaggccctgggaaagcaccctgtatcttgcaaggacactcccggttttattgtgaatagactgcttgttccgtatctcatggaggcgatacgattgtatgagcgcggtgacgccagcaaggaagacatcgacacggctatgaagctcggagcgggatatcctatgggcccttttgaactgttagactatgtcggacttgatacgaccaagtttattgttgacggatggcacgagatggacgccgaaaacccactgcaccagccctcccctagcctcaacaaattagtggcagagaataagtttggcaagaagacgggagaaggattctataaatacaaatag

SEQ ID NO: 278213 - DNA, 957 bp, Artificial Sequence
  derived and/or modified sequence
atgtgcagaactgcccttggggttaccactctccaggacctgggcgtgtgctggcgcaaagagcacgatccagccgagatgctgcgcgtcgggagagctgagcttggcggatggaagcctagctgggaagccattgttaaggaagtcgctgccgctactggacacactgtcgtgctggtggaccagaccgaggatatactggccaagtctaaaaaaggtatcgaagagagcctccgcaaggtggctaagaaaaaattcgccgagaatctgaaggcgggagacgaatttgtggagaagacgctgagtacaattgctacttctaccgacgctgctagtgttgtccactctaccgacttggtggtggaagctattgtggagaacctgaaggttaagaacgagcttttcaaacggctggacaaatttgctgccgagcacacaatatttgctagcaacacaagtagcctgcagattacgtctatagccaacgcgactacgaggcaggatcgcttcgcaggcttgcatttctttaacccagttcccgtgatgaagctggtggaggtgattaaaacccctatgacgagccagaagacgttcgaaagtttggtggacttctccaaggcattagggaagcatccagttagctgtaaggacaccccaggctttatcgtcaaccgcctgttagtgccctacttgatggaggccattaggctttatgagcggggagacgccagcaaagaagacatagacacggccatgaagctgggggctgggtaccctatggggccatttgagcttctggattacgtcgggctcgacactactaagttcattgtcgacggatggcacgaaatggacgccgaaaaccccctgcaccaaccttcccccagtctgaacaaactggttgctgagaataagttcggaaagaagactggagaaggtttttacaagtataagtag

SEQ ID NO: 278214 - DNA, 1910 bp, Artificial Sequence
  derived and/or modified sequence
ataaccatgaacttccatatctgtcataggaaagaggttggcctcagcagcaatgagggataattctttcaagaaaggaatgaagagagaagttagatggaaaagagatttttaaggtcaaaagaagcagctgaagaacatgtgtaggacagccttaggagttactacacttcaagacctgggtgtctgctggaggaaggaacatgaccctgcggagatgttaagggttgggagagctgagcttggaggctggaagcccagctgggaggctattgttaaagaggttgctgcagcaactggtcacacagtagtgttggtagaccagacagaggacatcctggcaaaatccaaaaagggaattgaggaaagccttaggaaagtggcaaagaagaagtttgcagaaaaccttaaggccggcgatgaatttgtggagaagaccctgagcaccatagcgaccagcacggatgcagcctccgttgtccacagcacagacttggtggtggaagccatcgtggagaatctgaaggtgaaaaacgagctcttcaaaaggctggacaagtttgctgctgaacatacaatctttgccagcaacacttcctccttgcagattacaagcatagctaatgccaccaccagacaagaccgattcgctggcctccatttcttcaacccagtgcctgtcatgaaacttgtggaggtcattaaaacaccaatgaccagccagaagacatttgaatctttggtagactttagcaaagccctaggaaagcatcctgtttcttgcaaggacactcctgggtttattgtgaaccgcctcctggttccatacctcatggaagcaatcaggctgtatgaacgaggtgacgcatccaaagaagacattgacactgctatgaaattaggagccggttaccccatgggcccatttgagcttctagattatgtcggactggatactacgaagttcatcgtggatgggtggcatgaaatggatgcagagaacccattacatcagcccagcccatccttaaataagctggtagcagagaacaagttcggcaagaagactggagaaggattttacaaatacaagtgatgtgcagcttctccggctctgagaagaacacctgagagcgctttccagccagtgccccgagtgcctgtgggaatgctctttggtcagacattccctcacacagtacagtttaataaatgtgcattttgattgtaatctatcgaagtgattattacaccagttacagcagtaatagattctccattaagaaataattcccttttttagtctgttcatttctgtgtattttctaaacagctttacacccttggtgccttggagcaaacatgttttttgaaccttgtcatttttgtgaagaattgcctagattccttctctcatcaacgggaaagtacttcctctgagagtgcgagtgcaccatgctcactgttgctgcgtgggagagtcacaagccactggcaagcaagtggtatagtctgtgaagcactgcagcgagcagcacctggatcttgcctttataagaacattttactacctgcagctttgagtcttgccctacattttgggcatgacataagatgtgtctttattcagctcgtcgtgaagatgctgctgctgaatgggtcagcatatctctgtttgcatggtttgcaggaggtcggttttcatggtcattcagttccacagatctgaatgattactgtctgtctgtgtcttttttccatgagaaatcactgttgcaaattgcctataaattgactctactaaaataacaatgtttcagtctgaaaatttgaattgaaaaaaatgtataatataaaattgtaatacactcaaatgattataaaagtaaaagttggtaatttaggcagaa

SEQ ID NO: 278215 - DNA, 2044 bp, Artificial Sequence
  derived and/or modified sequence
gtctcctcgctgtcgccgccgctgccacaccatggccttcgtcaccaggcagttcatgcgttccgtgtcctcctcgtccaccgcctcggcctcggccaagaagataatcgtcaagcacgtgacggtcatcggcggcgggctgatgggcgccggcattgcccaggaaagaggttggcctcagcagcaatgagggataattctttcaagaaaggaatgaagagagaagttagatggaaaagagatttttaaggtcaaaagaagcagctgaagaacatgtgtaggacagccttaggagttactacacttcaagacctgggtgtctgctggaggaaggaacatgaccctgcggagatgttaagggttgggagagctgagcttggaggctggaagcccagctgggaggctattgttaaagaggttgctgcagcaactggtcacacagtagtgttggtagaccagacagaggacatcctggcaaaatccaaaaagggaattgaggaaagccttaggaaagtggcaaagaagaagtttgcagaaaaccttaaggccggcgatgaatttgtggagaagaccctgagcaccatagcgaccagcacggatgcagcctccgttgtccacagcacagacttggtggtggaagccatcgtggagaatctgaaggtgaaaaacgagctcttcaaaaggctggacaagtttgctgctgaacatacaatctttgccagcaacacttcctccttgcagattacaagcatagctaatgccaccaccagacaagaccgattcgctggcctccatttcttcaacccagtgcctgtcatgaaacttgtggaggtcattaaaacaccaatgaccagccagaagacatttgaatctttggtagactttagcaaagccctaggaaagcatcctgtttcttgcaaggacactcctgggtttattgtgaaccgcctcctggttccatacctcatggaagcaatcaggctgtatgaacgaggtgacgcatccaaagaagacattgacactgctatgaaattaggagccggttaccccatgggcccatttgagcttctagattatgtcggactggatactacgaagttcatcgtggatgggtggcatgaaatggatgcagagaacccattacatcagcccagcccatccttaaataagctggtagcagagaacaagttcggcaagaagactggagaaggattttacaaatacaagtgatgtgcagcttctccggctctgagaagaacacctgagagcgctttccagccagtgccccgagtgcctgtgggaatgctctttggtcagacattccctcacacagtacagtttaataaatgtgcattttgattgtaatctatcgaagtgattattacaccagttacagcagtaatagattctccattaagaaataattcccttttttagtctgttcatttctgtgtattttctaaacagctttacacccttggtgccttggagcaaacatgttttttgaaccttgtcatttttgtgaagaattgcctagattccttctctcatcaacgggaaagtacttcctctgagagtgcgagtgcaccatgctcactgttgctgcgtgggagagtcacaagccactggcaagcaagtggtatagtctgtgaagcactgcagcgagcagcacctggatcttgcctttataagaacattttactacctgcagctttgagtcttgccctacattttgggcatgacataagatgtgtctttattcagctcgtcgtgaagatgctgctgctgaatgggtcagcatatctctgtttgcatggtttgcaggaggtcggttttcatggtcattcagttccacagatctgaatgattactgtctgtctgtgtcttttttccatgagaaatcactgttgcaaattgcctataaattgactctactaaaataacaatgtttcagtctgaaaatttgaattgaaaaaaatgtataatataaaattgtaatacactcaaatgattataaaagtaaaagttggtaatttaggcagaa

SEQ ID NO: 278216 - protein, 576 aa, Artificial Sequence
  derived and/or modified sequence
MKLLHVFLLFLCFHLRFCKVTYTSQEDLVEKKCLAKKYTHLSCDKVFCQPWQRCIEGTCVCKLPYQCPKNGTAVCATNRRSFPTYCQQKSLECLHPGTKFLNNGTCTAEGKFSVSLKHGNTDSEGIVEVKLVDQDKTMFICKSSWSMREANVACLDLGFQQGADTQRRFKLSDLSINSTECLHVHCRGLETSLAECTFTKRRTMGYQDFADVVCYTQKADSPMDDFFQCVNGKYISQMKACDGINDCGDQSDELCCKACQGKGFHCKSGVCIPSQYQCNGEVDCITGEDEVGCAEETEILTADMDAERRRIKSLLPKLSCGVKNRMHIRRKRIVGGKRAQLGDLPWQVAIKDASGITCGGIYIGGCWILTAAHCLRASKTHRYQIWTTVVDWIHPDLKRIVIEYVDRIIFHENYNAGTYQNDIALIEMKKDGNKKDCELPRSIPACVPWSPYLFQPNDTCIVSGWGREKDNERVFSLQWGEVKLISNCSKFYGNRFYEKEMECAGTYDGSIDACKGDSGGPLVCMDANNVTYVWGVVSWGENCGKPEFPGVYTKVANYFDWISYHVGRPFISQYNV

SEQ ID NO: 278217 - DNA, 1731 bp, Artificial Sequence
  derived and/or modified sequence
atgaagctattgcatgttttccttttgttcctctgcttccacctgcgtttctgtaaagtgacttacactagccaagaggacttagttgagaaaaaatgtctggcaaaaaagtatacccacctgtcgtgcgataaagtcttttgccagccctggcagaggtgcatcgaaggcacatgtgtatgcaagctgccttatcagtgccccaaaaacggtaccgccgtctgtgcgactaataggcggtcctttcccacttattgtcaacaaaaatccctggaatgtcttcaccccggaacaaagtttcttaataatgggacctgtactgccgagggcaaattctctgtttctcttaaacacggcaacactgattctgagggcatcgtagaagtcaaactggtggaccaagataaaaccatgttcatatgtaaatcatcgtggtcaatgcgggaagccaacgtcgcatgcctcgacctcggttttcagcagggggccgacactcagagacgttttaagttaagcgacctgagcataaactccactgaatgtctgcatgtgcactgtcgtggcctggagacctccctggctgagtgcactttcacaaaacgacgcacaatgggttatcaagattttgccgacgtcgtgtgttatacacagaaagcggatagccctatggacgacttcttccagtgcgtgaatggcaagtacatctctcaaatgaaagcctgcgacggaattaatgactgtggcgaccagtccgatgaactgtgctgcaaagcctgtcagggcaaagggtttcattgtaaaagcggtgtgtgcatcccctcacagtaccagtgtaacggcgaggtggactgcatcacaggggaagacgaagtagggtgtgctgaagaaacggaaatactgaccgctgacatggacgccgagcggagacgcataaagtccctgctgccaaagttgagctgtggggtgaagaacagaatgcatattcgaaggaaaaggatagtcgggggtaagagggcacagctgggggatttgccctggcaggtcgcaatcaaggacgcatccggcatcacttgcgggggaatctacattggcggctgttggatattgaccgccgcacactgcctgcgcgcctccaaaacacaccgctaccagatttggactaccgtggttgactggattcacccggacctgaaacgaatagtgatcgaatacgttgatagaataatctttcatgagaactacaatgccgggacctaccagaacgatattgcactgatagaaatgaaaaaagatggtaataaaaaggactgcgaactaccgaggtccatccccgcatgcgttccatggagcccctatttgtttcaaccgaacgatacatgtatcgtatcaggttgggggagggaaaaagacaacgagagagtgtttagcttacaatggggcgaggtcaagctgatctctaattgttcaaaattttatgggaatcgtttttatgagaaagagatggaatgtgcagggacttatgacggctccatagacgcatgtaagggagattcgggcggccccctggtctgcatggatgctaataatgttacttacgtctggggcgtagtgagctggggtgagaattgtggcaaacctgaatttcccggagtctataccaaggtcgccaactattttgactggattagttaccacgtagggagaccctttatctcccagtataacgtgtag

SEQ ID NO: 278218 - DNA, 1731 bp, Artificial Sequence
  derived and/or modified sequence
atgaagctgctgcacgtgttcctgctcttcctgtgcttccacctgcgcttctgcaaggtgacctacaccagccaggaggacctggtggagaagaagtgcctggccaagaagtacacccacctgagctgtgacaaggtgttctgccagccctggcagcgctgcatcgagggcacctgtgtgtgcaagctgccctaccagtgccccaagaatggaacagctgtgtgtgccaccaacagaagaagcttccccacctactgccagcagaagagcctggagtgcctgcaccctggcaccaagttcctgaacaacggcacctgcacagctgagggcaagttctctgtgtccctgaagcacggcaacacagattctgagggcatcgtggaggtgaagctggtggaccaggacaagaccatgttcatctgcaagagctcctggagcatgagggaggccaacgtggcctgcctggacctgggcttccagcagggcgctgacacccagaggcgcttcaagctgagtgacctgagcatcaacagcacagagtgcctgcacgtgcactgccggggcctggagaccagcctggctgaatgtaccttcaccaagaggaggaccatgggctaccaggactttgctgatgtggtgtgctacacccagaaggctgacagccccatggatgacttcttccagtgtgtgaatggcaagtacatcagccagatgaaggcctgtgatggcatcaatgactgtggggaccagagtgatgagctgtgctgcaaggcctgccagggcaagggcttccactgcaagagcggcgtgtgcatccccagccagtaccagtgcaatggagaggtggactgcatcaccggggaggatgaggtgggctgtgccgaggagacagagatcctgacagctgacatggatgctgagcggcggcgcatcaagagcctgctgcccaagctgagctgtggggtgaagaacaggatgcacatccggaggaagagaattgtgggcggcaagagggcccagctgggggacctgccctggcaggtggccatcaaggatgccagcggcatcacctgtggcggcatctacatcggcggctgctggatcctgacagctgcccactgcctgcgggccagcaagacccaccgctaccagatctggaccaccgtggtggactggatccacccagacctgaagagaattgtcatcgagtatgtggaccgcatcatcttccacgagaactacaatgccggcacctaccagaatgacatcgccctgattgagatgaagaaggatggcaacaagaaggactgtgagctgcccaggagcatcccagcctgtgtgccctggagcccctacctgttccagcccaatgacacctgcatcgtgtctggctggggccgggagaaggacaatgaaagagtcttcagcctgcagtggggcgaggtgaagctgatcagcaactgcagcaagttctacggcaaccgcttctatgagaaggagatggagtgtgccggcacctatgatggcagcattgatgcctgcaagggggacagcggcggccccctggtgtgcatggatgccaacaacgtgacctacgtgtggggcgtggtgtcctggggcgagaactgtgggaagccagagttccctggggtgtacaccaaggtggccaactactttgactggatctcctaccacgtgggccggcccttcatcagccagtacaacgtgtag

SEQ ID NO: 278219 - DNA, 1731 bp, Artificial Sequence
  derived and/or modified sequence
atgaagctgctgcacgtgttcctgctgttcctgtgcttccacctgcgcttctgcaaagtcacctacacgtctcaggaagatctggtggaaaaaaagtgtctggccaagaaatatactcatctgagttgtgacaaagttttctgtcagccttggcagcggtgtatagagggaacgtgtgtatgcaagctgccataccagtgtcccaagaatggtacagccgtctgtgccaccaacaggagatcatttcccacatactgtcagcaaaaaagtctggaatgcctccatcccgggaccaagttcttgaacaacggtacatgcacagcggagggtaagttctcagtgagtttgaagcacggcaacacagattccgagggtattgtcgaagtcaagctggtggatcaggacaagactatgttcatctgcaaatcttcctggtcaatgcgggaagcaaacgtggcatgcctagaccttgggttccagcagggagccgacacccaacgacgctttaaattgtctgatctttccatcaactcaacagagtgtctccatgttcattgccgcggccttgagacaagtctggccgagtgtaccttcacaaagagaagaaccatgggatatcaggacttcgccgacgtggtctgctacacccagaaggcagactcccctatggacgattttttccagtgtgtgaatggcaagtacataagccagatgaaagcatgtgacgggattaacgattgtggcgatcagtcagatgagctatgttgcaaggcatgccagggcaaaggtttccattgcaagtccggcgtgtgtattccctcacagtaccaatgcaatggagaagtagactgcataacaggtgaggacgaggtgggatgcgccgaagagaccgagattctcacggctgatatggacgccgagagacgacgtattaaatccctattgcccaagcttagttgcggagtgaagaatcgcatgcacatccgaaggaaaaggatcgttggagggaaacgagctcagctgggggacctgccatggcaagtggcaatcaaggatgccagtggtatcacctgcggcggaatatacatcggtgggtgctggatcctgaccgcagcccactgtcttcgcgcaagcaagacacacaggtatcagatatggacaacagtggtggactggatacatcctgatctgaaaaggattgttatcgagtacgtcgatcgcataattttccatgaaaactataatgctgggacctatcagaatgacatcgcccttatcgagatgaaaaaggatggcaataaaaaagattgtgagctgccccgttcaatcccagcgtgtgttccctggagcccttacctgttccagccaaacgatacttgcattgtcagcgggtggggccgggaaaaagacaatgaaagggtgttcagccttcaatggggtgaggtgaagctcatatccaactgctccaaattttatggaaaccggttttatgaaaaggaaatggagtgcgctggaacctacgatgggtcaatagacgcttgcaagggcgatagcgggggccccttagtgtgcatggacgctaacaacgttacctatgtatggggtgtcgtcagctggggagagaactgtggaaaacccgagtttcccggcgtttacaccaaggtagcaaactattttgactggatctcttatcatgtcgggaggccattcatctcacagtataacgtctag

SEQ ID NO: 278220 - DNA, 1731 bp, Artificial Sequence
  derived and/or modified sequence
atgaagctacttcatgtgtttttactatttctttgcttccacctccgtttttgtaaggtgacttatacaagccaagaggaccttgtagaaaagaaatgtctcgccaaaaagtacacccacctttcctgtgacaaagttttttgccaaccttggcagcgctgtattgagggcacctgtgtgtgcaaactgccatatcaatgccctaagaacgggacggcggtctgcgcaacgaaccgtagaagcttccctacctactgtcaacagaagagtttggagtgccttcaccctggcacaaaattcctgaacaatgggacttgcacagccgaaggtaagttctcagtgtccctgaaacacgggaatacagactctgagggtatcgtggaggttaagttggtggaccaagataagactatgttcatctgcaaatcttcttggtccatgcgcgaagctaatgtggcctgcctggaccttgggttccaacagggagccgatacccaacgcagattcaaactctccgacctgtctattaactccacagagtgtcttcacgtgcactgccggggtttagaaacgtcgctagccgagtgcacctttaccaagcggagaactatgggttatcaggatttcgccgatgtggtctgctacacgcagaaggcagattctcccatggacgacttcttccagtgtgtcaatggaaagtatatatcacagatgaaagcatgcgatggcattaacgactgtggagatcaatcagacgaactgtgctgtaaagcctgccagggcaagggcttccattgcaagagtggagtctgtattccctctcagtaccaatgcaatggcgaggtggactgtattaccggagaggatgaagtgggttgtgctgaggaaactgagatcctcaccgccgatatggacgcagagcgtagaagaataaagagtttgcttccaaaactatcttgcggggtgaagaatcgcatgcatattagacggaagagaattgttggaggcaagcgagctcagttaggggacctgccctggcaggtcgcgattaaggacgcaagtggcatcacatgcggtgggatctacatcggcggatgctggattctgacggccgctcattgtttacgtgcctctaaaacccaccggtaccagatctggacgaccgtcgtggattggatacaccctgatcttaaacggatagtgatcgagtacgtggatagaattatttttcatgaaaattataatgcgggaacttaccagaatgacatagccctgattgaaatgaaaaaggatgggaacaagaaagactgcgagctccctcgctctatacccgcatgcgtgccctggagcccttatctcttccaaccgaacgatacctgcattgttagtggttggggcagggagaaagacaatgagagagtgtttagtttacagtggggcgaggttaaactgatttcaaattgctccaaattctacggcaatagattttatgaaaaggaaatggagtgcgctggcacttatgatggctctatagacgcctgtaagggagatagcggcggtcccctcgtgtgcatggatgctaataatgtcacatacgtttggggagtggtgtcatggggagaaaattgcgggaagcctgagttccctggcgtgtacactaaggtggcaaactactttgactggatttcctaccacgtgggaaggccttttatttctcagtataacgtgtag

SEQ ID NO: 278221 - DNA, 1914 bp, Artificial Sequence
  derived and/or modified sequence
cgaacacctccaacatgaagcttcttcatgttttcctgttatttctgtgcttccacttaaggttttgcaaggtcacttatacatctcaagaggatctggtggagaaaaagtgcttagcaaaaaaatatactcacctctcctgcgataaagtcttctgccagccatggcagagatgcattgagggcacctgtgtttgtaaactaccgtatcagtgcccaaagaatggcactgcagtgtgtgcaactaacaggagaagcttcccaacatactgtcaacaaaagagtttggaatgtcttcatccagggacaaagtttttaaataacggaacatgcacagccgaaggaaagtttagtgtttccttgaagcatggaaatacagattcagagggaatagttgaagtaaaacttgtggaccaagataagacaatgttcatatgcaaaagcagctggagcatgagggaagccaacgtggcctgccttgaccttgggtttcaacaaggtgctgatactcaaagaaggtttaagttgtctgatctctctataaattccactgaatgtctacatgtgcattgccgaggattagagaccagtttggctgaatgtacttttactaagagaagaactatgggttaccaggatttcgctgatgtggtttgttatacacagaaagcagattctccaatggatgacttctttcagtgtgtgaatgggaaatacatttctcagatgaaagcctgtgatggtatcaatgattgtggagaccaaagtgatgaactgtgttgtaaagcatgccaaggcaaaggcttccattgcaaatcgggtgtttgcattccaagccagtatcaatgcaatggtgaggtggactgcattacaggggaagatgaagttggctgtgcagaagaaacagaaattttgactgctgacatggatgcagaaagaagacggataaaatcattattacctaaactatcttgtggagttaaaaacagaatgcacattcgaaggaaacgaattgtgggaggaaagcgagcacaactgggagacctcccatggcaggtggcaattaaggatgccagtggaatcacctgtgggggaatttatattggtggctgttggattctgactgctgcacattgtctcagagccagtaaaactcatcgttaccaaatatggacaacagtagtagactggatacaccccgaccttaaacgtatagtaattgaatacgtggatagaattattttccatgaaaactacaatgcaggcacttaccaaaatgacatcgctttgattgaaatgaaaaaagacggaaacaaaaaagattgtgagctgcctcgttccatccctgcctgtgtcccctggtctccttacctattccaacctaatgatacatgcatcgtttctggctggggacgagaaaaagataacgaaagagtcttttcacttcagtggggtgaagttaaactaataagcaactgctctaagttttacggaaatcgtttctatgaaaaagaaatggaatgtgcaggtacatatgatggttccatcgatgcctgtaaaggggactctggaggccccttagtctgtatggatgccaacaatgtgacttatgtctggggtgttgtgagttggggggaaaactgtggaaaaccagagttcccaggtgtttacaccaaagtggccaattattttgactggattagctaccatgtaggaaggccttttatttctcagtacaatgtataaaattgtgatctctctcttcattctattctttttctctcaagagttccatttaatggaaataaaacggtataattaataattctctaggggggaaaaatgaagcaaatctcactggatatttttaaaggtctccacagagtttatgccatattggaattttgttgtataa

SEQ ID NO: 278222 - DNA, 1731 bp, Artificial Sequence
  derived and/or modified sequence
atgaagctgctgcacgtgttcctgctgttcctgtgcttccacctgagattctgcaaggtgacctacaccagccaggaggacctggtggagaagaagtgcctggccaagaagtacacccacctgagctgcgacaaggtgttctgccagccctggcagagatgcatcgagggcacctgcgtgtgcaagctgccctaccagtgccccaagaacggcaccgccgtgtgcgccaccaacagaagaagcttccccacctactgccagcagaagagcctggagtgcctgcaccccggcaccaagttcctgaacaacggcacctgcaccgccgagggcaagttcagcgtgagcctgaagcacggcaacaccgacagcgagggcatcgtggaggtgaagctggtggaccaggacaagaccatgttcatctgcaagagcagctggagcatgagagaggccaacgtggcctgcctggacctgggcttccagcagggcgccgacacccagagaagattcaagctgagcgacctgagcatcaacagcaccgagtgcctgcacgtgcactgcagaggcctggagaccagcctggccgagtgcaccttcaccaagagaagaaccatgggctaccaggacttcgccgacgtggtgtgctacacccagaaggccgacagccccatggacgacttcttccagtgcgtgaacggcaagtacatcagccagatgaaggcctgcgacggcatcaacgactgcggcgaccagagcgacgagctgtgctgcaaggcctgccagggcaagggcttccactgcaagagcggcgtgtgcatccccagccagtaccagtgcaacggcgaggtggactgcatcaccggcgaggacgaggtgggctgcgccgaggagaccgagatcctgaccgccgacatggacgccgagagaagaagaatcaagagcctgctgcccaagctgagctgcggcgtgaagaacagaatgcacatcagaagaaagagaatcgtgggcggcaagagagcccagctgggcgacctgccctggcaggtggccatcaaggacgccagcggcatcacctgcggcggcatctacatcggcggctgctggatcctgaccgccgcccactgcctgagagccagcaagacccacagataccagatctggaccaccgtggtggactggatccaccccgacctgaagagaatcgtgatcgagtacgtggacagaatcatcttccacgagaactacaacgccggcacctaccagaacgacatcgccctgatcgagatgaagaaggacggcaacaagaaggactgcgagctgcccagaagcatccccgcctgcgtgccctggagcccctacctgttccagcccaacgacacctgcatcgtgagcggctggggcagagagaaggacaacgagagagtgttcagcctgcagtggggcgaggtgaagctgatcagcaactgcagcaagttctacggcaacagattctacgagaaggagatggagtgcgccggcacctacgacggcagcatcgacgcctgcaagggcgacagcggcggccccctggtgtgcatggacgccaacaacgtgacctacgtgtggggcgtggtgagctggggcgagaactgcggcaagcccgagttccccggcgtgtacaccaaggtggccaactacttcgactggatcagctaccacgtgggcagacccttcatcagccagtacaacgtgtag

SEQ ID NO: 278223 - protein, 496 aa, Artificial Sequence
  derived and/or modified sequence
MVEPHQEPRHSKVGLQDNPWFCDCHISKMIELSKVVDPAIVLLDPLMTCSEPERLTGILFQRAELEHCLKPSVMTSATKIMSALGSNVLLRCDATGFPTPQITWTRSDSSPVNYTVIQESPEEGVRWSIMSLTGISSKDAGDYKCKAKNLAGMSEAVVTVTVLGITTTPIPPDTSERTGDHPEWDVQPGSGRSTSVSSASSYLWSSSFSPTSSFSASTLSPPSTASFSLSPFSSSTVSSTTTLSTSISASTTMANKRSFQLHQGGKRNLKVAKNGSKLPPASTSKKEELALLDQTMLTETNAAIENLRVVSETKESVTLTWNMINTTHNSAVTVLYSKYGGKDLLLLNADSSKNQVTIDGLEPGGQYMACVCPKGVPPQKDQCITFSTERVEGDDSQWSLLLVVTSTACVVILPLICFLLYKVCKLQCKSEPFWEDDLAKETYIQFETLFPRSQSVGELWTRSHRDDSEKLLLCSRSSVESQVTFKSEGSRPEYYC

SEQ ID NO: 278224 - DNA, 1491 bp, Artificial Sequence
  derived and/or modified sequence
atggtggagccccaccaggagcccagacacagcaaggtgggcctgcaggacaacccctggttctgcgactgccacatcagcaagatgatcgagctgagcaaggtggtggaccccgccatcgtgctgctggaccccctgatgacctgcagcgagcccgagagactgaccggcatcctgttccagagagccgagctggagcactgcctgaagcccagcgtgatgaccagcgccaccaagatcatgagcgccctgggcagcaacgtgctgctgagatgcgacgccaccggcttccccaccccccagatcacctggaccagaagcgacagcagccccgtgaactacaccgtgatccaggagagccccgaggagggcgtgagatggagcatcatgagcctgaccggcatcagcagcaaggacgccggcgactacaagtgcaaggccaagaacctggccggcatgagcgaggccgtggtgaccgtgaccgtgctgggcatcaccaccacccccatcccccccgacaccagcgagagaaccggcgaccaccccgagtgggacgtgcagcccggcagcggcagaagcaccagcgtgagcagcgccagcagctacctgtggagcagcagcttcagccccaccagcagcttcagcgccagcaccctgagcccccccagcaccgccagcttcagcctgagccccttcagcagcagcaccgtgagcagcaccaccaccctgagcaccagcatcagcgccagcaccaccatggccaacaagagaagcttccagctgcaccagggcggcaagagaaacctgaaggtggccaagaacggcagcaagctgccccccgccagcaccagcaagaaggaggagctggccctgctggaccagaccatgctgaccgagaccaacgccgccatcgagaacctgagagtggtgagcgagaccaaggagagcgtgaccctgacctggaacatgatcaacaccacccacaacagcgccgtgaccgtgctgtacagcaagtacggcggcaaggacctgctgctgctgaacgccgacagcagcaagaaccaggtgaccatcgacggcctggagcccggcggccagtacatggcctgcgtgtgccccaagggcgtgcccccccagaaggaccagtgcatcaccttcagcaccgagagagtggagggcgacgacagccagtggagcctgctgctggtggtgaccagcaccgcctgcgtggtgatcctgcccctgatctgcttcctgctgtacaaggtgtgcaagctgcagtgcaagagcgagcccttctgggaggacgacctggccaaggagacctacatccagttcgagaccctgttccccagaagccagagcgtgggcgagctgtggaccagaagccacagagacgacagcgagaagctgctgctgtgcagcagaagcagcgtggagagccaggtgaccttcaagagcgagggcagcagacccgagtactactgctag

SEQ ID NO: 278225 - DNA, 1491 bp, Artificial Sequence
  derived and/or modified sequence
atggtggagcctcaccaggaacctcgtcactctaaagtcggcttgcaagataatccctggttttgcgattgtcacattagcaaaatgatcgagctcagtaaagtcgtcgaccctgccatcgtgctcctcgacccgttaatgacctgctccgaacctgagcggttaacggggattttgttccagagagctgagctggagcattgcttaaaaccatctgtaatgacgtctgccaccaagattatgtcagccctgggatcaaatgtgctcctacggtgcgatgccacagggttcccaacgccgcaaattacgtggactcggagcgactctagtcctgtcaattacacagtgattcaggaatctcccgaggagggggtgcgctggagcattatgtcattgactggaatttcttccaaggacgccggggattacaagtgcaaggcaaaaaatctggcaggaatgagcgaagcggttgtgactgtgactgtgttgggcatcacaaccaccccaataccccctgatacaagcgagagaacaggtgaccaccctgagtgggacgtgcagccagggtcgggcagatcaacttccgtgtcaagcgcatcctcttatctctggtccagttctttctctccgacctcctcattcagcgcaagtacactgtccccaccctctacagcaagtttctccctctctcctttttcctccagtacagtctcatctacaacaaccctgtcaacgagtattagcgccagtaccactatggccaataaaagatcgttccaactacaccaggggggaaagcgaaatttaaaggtagcaaaaaatggtagtaagcttccccccgccagtacctctaagaaggaagagctcgctctattagaccagacgatgctgaccgagactaatgccgctattgagaacttacgagtggtttcagagactaaagagagcgtgactctgacctggaatatgataaatacaacccacaatagcgctgtgaccgtcctgtatagcaagtacggagggaaggaccttctccttttaaatgctgacagttctaaaaatcaggtcactattgatggcttggagcctggaggccagtacatggcctgcgtgtgccctaagggtgtgcccccccaaaaggaccagtgcattacattcagtactgaacgggtggaaggcgatgattctcagtggtccctgctgctcgttgtgactagcacagcgtgcgtcgtgattctgcctcttatttgcttccttctgtataaggtgtgtaaattacagtgcaaatcagagcctttttgggaagacgatttagcaaaggaaacgtacatacagtttgaaaccctcttccctcgatctcaatcagttggagagctgtggactcgtagccacagagatgacagtgaaaaactgctgttgtgctcccgcagctctgtagaatctcaagtgaccttcaagtcagaggggtctagaccagaatattattgttag

SEQ ID NO: 278226 - DNA, 1491 bp, Artificial Sequence
  derived and/or modified sequence
atggtggaaccccatcaggaaccccggcactctaaagtcggcctgcaggataacccttggttctgtgactgtcatattagtaagatgattgaactgtccaaagtagtggacccggccattgttctactcgatccactcatgacatgctcagaacctgagagactgacaggcatcctcttccagcgtgctgagttagaacattgcctgaaaccttcagtgatgacgtccgccacaaagattatgagcgctctgggaagcaacgtgctgttacgctgtgacgccaccggtttccctaccccacaaattacgtggactcggtcagattcatcacccgtaaactatactgttattcaggagagccctgaagagggagtgagatggtctatcatgtctctgactggcatctctagcaaggatgccggggactataagtgtaaagccaaaaacctggctgggatgagtgaggcggtggtgaccgtgacagtgttgggtatcacaactacgccaatcccacccgatacaagcgaacgtactggcgaccaccctgagtgggacgtacaacctggcagtggccgctcgacgagcgtgtcatccgcttcctcatacttatggtccagctctttctcacctaccagctccttttccgcctcaacattgtccccacctagcaccgcttcattctcactttcacccttcagctcgagcacagtgtccagcactacaacattatcaacctccatttcagcaagcacaacaatggctaacaagcggtcctttcagctccatcagggcggcaagaggaatcttaaggtggccaaaaatggcagtaagctcccacccgccagcacttctaagaaagaggagttagccctcctggatcagaccatgttaactgaaactaatgcagcaatcgaaaacttgcgagtagtatctgaaaccaaagagtcagtcacccttacctggaatatgatcaacaccacacataacagtgcagttaccgtgttatactcaaagtacgggggaaaagacctcctgcttcttaacgccgattcatccaagaatcaggtgacgatagacgggctggaaccgggtggacagtacatggcatgcgtctgtcccaagggggtcccgccacagaaggaccaatgcatcacattctctactgagcgggttgagggagatgacagtcagtggagcttgctcctggtcgtgacatccactgcttgtgtcgtcatcctgcctctgatctgcttccttctgtataaagtttgcaagttgcagtgcaagtctgagcctttttgggaggatgacctcgcaaaggagacttatatccagttcgagactcttttccctaggtcccagtccgttggcgaattgtggactcggagtcatcgagatgatagcgagaagctactgttatgtagtcggtccagcgtggagtctcaggtgacctttaaatcagaaggatccagaccagaatactactgctag

SEQ ID NO: 278227 - DNA, 3781 bp, Artificial Sequence
  derived and/or modified sequence
cttagaccttggttagatttgaaccaaggccctcctcggcctcccaaagtgctgggattacaggcgtgagccactgcccagctgaaaattgatacatttttcaaatgagaagtatttttttcaaatgggtgttggaaagtgagtttcctcacattgttcatgttgtgacactaggttggtgctatgtaatgacatggatatgaacgagctgcctacgaacctccccgtggacactgtgaagcttcgcatagagaagactgtcatccgcagaatctctgcggaggccttctattacctggtggagctccagtatctctgggtgacttacaattccgtggccagcattgaccccagcagcttttacaacctgaagcaactgcatgagttgcgcttggatgggaattctctggctgctttcccttgggcatctctgctggacatgccccttctgaggaccctggacttgcacaataacaaaataaccagtgtgccaaatgaggcgctcaggtatctgaagaaccttgcctacttggatttatcaagcaacagactcaccacattgccaccagatttcctggagagctggactcatttagtttcaacaccttctggagtcctggacctttccccaagcaggattattcttggctgatagaacgttacggctgtaaaaagctctagcatttatctagtcaactctcccattttgccgatgagaaaacaggctcagcaaggttgcatcacccaggtcacagaattaactaatggttgagcctcatcaggaacccaggcacagtaaagttggtctacaggacaatccttggttctgtgactgtcatatttccaaaatgattgagttgtcaaaggtcgttgaccctgctatagtgcttctggatccactgatgacttgcagtgaacctgagcgcctcacaggaattttgtttcagcgggctgaattggagcattgtctgaaaccatcagtgatgacctcagccaccaaaatcatgtctgctctgggcagtaatgttctactgcggtgtgatgccactggcttccccaccccacagatcacatggaccagatctgacagctcgccagttaattatacagtaatacaagaatctccagaggaaggagtcagatggtccataatgagcttgacaggcatttcttccaaagacgctggggattacaaatgtaaggccaaaaatctggctgggatgtcagaagctgtggttactgtgacagtgcttggcattaccacaactccaataccaccagacacttctgaaagaactggagatcatcctgagtgggatgtccagccgggatctggaagatctacatctgtatctagcgcatcatcatatctttggtcctcttccttctcccccacatcttctttttctgcttctactttgtctcctccctctactgcttccttctctttatctcctttctcctcctccactgtttcttcaaccacaactctgagcacaagcatctcagcaagtaccaccatggccaacaagcgatcattccagctccaccaaggtgggaaaagaaatttaaaggtggcaaagaatggaagtaagcttcctccagccagcacaagtaagaaagaagagctggcattgttggatcaaacaatgcttacggagacaaatgccgcaatagaaaacctcagggtggtcagtgagactaaagagagtgtgacattgacgtggaatatgatcaacaccacacataactctgcagtgactgtgttgtattccaagtatggtgggaaggacctgctgctgttgaatgcagactccagcaagaaccaagtaaccatagatggcttggaacccggtgggcaatacatggcctgtgtctgtccaaaaggagtgcctccccagaaagaccaatgcatcaccttttctactgaaagagttgaaggagatgattctcaatggtctctccttctcgtggtgaccagtactgcctgtgttgttatcttaccattgatttgtttcttgttgtacaaagtttgcaaactgcaatgtaaatcagaacctttttgggaagatgatttggcaaaggagacttatatccaatttgagaccctgtttcccaggtctcaaagtgtaggtgagctctggacacgaagccacagggatgactcagagaaattgctgctttgttctaggtcaagtgtggaatctcaggtgacttttaaaagtgaaggttccagaccagagtattattgctaaggttctgcagctcaggtgcatgtgagctacaaaactagcatctaagggtataattgaccctaggtttggatgacttttggacagactttcacattgtacatgaaaatcacaaatggaatgcttttaagtatgtttaaaaaataccatgagacctctgaactgaaaagacaaataatgttgattttttttcttgtgtggaaaaggtctacagaaataatttttagagtggtgcttaataaattattaatactttttagggtaatgttttagttcttaaaaataagttcatgtgaaagtagcaagtgaactctgtatttaaaaatatagttttttgagtcatgaggaaacattagcaaaaccagctaagccttgatgtttattcatgttcgaagtgcattatagcatttgctgtggatgttttctgacattgcctaatggagagcgtgggatcataaaggattttgtgttcactaaggttaaatctaactcacgggagagagagggctctgtctcttggtaccattatgcattgtgatactatagagttgtgttcatatttcttgtaagaaaaatttttgcttttctttagaaatataggtattagcaaaagtaagtatacaaagaggattatgacaaatagaccatttctttaaaaatggtaactgttgcatttaaacacatcgactgacagattatatggatatttaaaaataactttaaatcaatcttttaatattttgctgtttgctcttatgttctcccttctttcttccttccttgtcttccctccctttccttccttcattctttctttcttctgctctgtcagaagatatacaagtagccaaagcatcacgagccaagctgtttgtcttttgccatattgtcttttgattctcttgataaagagaaagcttttgaaattacttactgccctttgaaagtctgttttacaaccccaaaggatattttaggactttaaaagggaagcttcagtggattcatttggttagattcttttcctaggttaaaaacatcggggaacttaaatacataggaaaggagttcacaaataaaatttagtttttttagaaagagaatattttaataactgtagtatactacaagaaacatctcatggctttaagattaacgatagcgataaggcccactcaagcatctcacagtggtgatattacatgtcacttagcaggatgcaacctggcctagggatttccagaagacaaggccacctcagcacagatgcaactttcataaattttagaacaaagcctaaccttactagattaaacttgctctatgaaagaaacacttggtaattgacccagactgaatacatgtataagaaatgggaaagatctcccaaactctgagaacggtcctcaaatagaagctctcctagtcagttggtcatctgacctctgactatatccggcctatgacaccagccagctcctgctttctgtcttgtaagagcactgctggaataaactacttgagcatta

SEQ ID NO: 278228 - DNA, 3016 bp, Artificial Sequence
  derived and/or modified sequence
atggttgagcctcatcaggaacccaggcacagtaaagttggtctacaggacaatccttggttctgtgactgtcatatttccaaaatgattgagttgtcaaaggtcgttgaccctgctatagtgcttctggatccactgatgacttgcagtgaacctgagcgcctcacaggaattttgtttcagcgggctgaattggagcattgtctgaaaccatcagtgatgacctcagccaccaaaatcatgtctgctctgggcagtaatgttctactgcggtgtgatgccactggcttccccaccccacagatcacatggaccagatctgacagctcgccagttaattatacagtaatacaagaatctccagaggaaggagtcagatggtccataatgagcttgacaggcatttcttccaaagacgctggggattacaaatgtaaggccaaaaatctggctgggatgtcagaagctgtggttactgtgacagtgcttggcattaccacaactccaataccaccagacacttctgaaagaactggagatcatcctgagtgggatgtccagccgggatctggaagatctacatctgtatctagcgcatcatcatatctttggtcctcttccttctcccccacatcttctttttctgcttctactttgtctcctccctctactgcttccttctctttatctcctttctcctcctccactgtttcttcaaccacaactctgagcacaagcatctcagcaagtaccaccatggccaacaagcgatcattccagctccaccaaggtgggaaaagaaatttaaaggtggcaaagaatggaagtaagcttcctccagccagcacaagtaagaaagaagagctggcattgttggatcaaacaatgcttacggagacaaatgccgcaatagaaaacctcagggtggtcagtgagactaaagagagtgtgacattgacgtggaatatgatcaacaccacacataactctgcagtgactgtgttgtattccaagtatggtgggaaggacctgctgctgttgaatgcagactccagcaagaaccaagtaaccatagatggcttggaacccggtgggcaatacatggcctgtgtctgtccaaaaggagtgcctccccagaaagaccaatgcatcaccttttctactgaaagagttgaaggagatgattctcaatggtctctccttctcgtggtgaccagtactgcctgtgttgttatcttaccattgatttgtttcttgttgtacaaagtttgcaaactgcaatgtaaatcagaacctttttgggaagatgatttggcaaaggagacttatatccaatttgagaccctgtttcccaggtctcaaagtgtaggtgagctctggacacgaagccacagggatgactcagagaaattgctgctttgttctaggtcaagtgtggaatctcaggtgacttttaaaagtgaaggttccagaccagagtattattgctaaggttctgcagctcaggtgcatgtgagctacaaaactagcatctaagggtataattgaccctaggtttggatgacttttggacagactttcacattgtacatgaaaatcacaaatggaatgcttttaagtatgtttaaaaaataccatgagacctctgaactgaaaagacaaataatgttgattttttttcttgtgtggaaaaggtctacagaaataatttttagagtggtgcttaataaattattaatactttttagggtaatgttttagttcttaaaaataagttcatgtgaaagtagcaagtgaactctgtatttaaaaatatagttttttgagtcatgaggaaacattagcaaaaccagctaagccttgatgtttattcatgttcgaagtgcattatagcatttgctgtggatgttttctgacattgcctaatggagagcgtgggatcataaaggattttgtgttcactaaggttaaatctaactcacgggagagagagggctctgtctcttggtaccattatgcattgtgatactatagagttgtgttcatatttcttgtaagaaaaatttttgcttttctttagaaatataggtattagcaaaagtaagtatacaaagaggattatgacaaatagaccatttctttaaaaatggtaactgttgcatttaaacacatcgactgacagattatatggatatttaaaaataactttaaatcaatcttttaatattttgctgtttgctcttatgttctcccttctttcttccttccttgtcttccctccctttccttccttcattctttctttcttctgctctgtcagaagatatacaagtagccaaagcatcacgagccaagctgtttgtcttttgccatattgtcttttgattctcttgataaagagaaagcttttgaaattacttactgccctttgaaagtctgttttacaaccccaaaggatattttaggactttaaaagggaagcttcagtggattcatttggttagattcttttcctaggttaaaaacatcggggaacttaaatacataggaaaggagttcacaaataaaatttagtttttttagaaagagaatattttaataactgtagtatactacaagaaacatctcatggctttaagattaacgatagcgataaggcccactcaagcatctcacagtggtgatattacatgtcacttagcaggatgcaacctggcctagggatttccagaagacaaggccacctcagcacagatgcaactttcataaattttagaacaaagcctaaccttactagattaaacttgctctatgaaagaaacacttggtaattgacccagactgaatacatgtataagaaatgggaaagatctcccaaactctgagaacggtcctcaaatagaagctctcctagtcagttggtcatctgacctctgactatatccggcctatgacaccagccagctcctgctttctgtcttgtaagagcactgctggaataaactacttgagcatt

SEQ ID NO: 278229 - DNA, 1491 bp, Artificial Sequence
  derived and/or modified sequence
atggtggagccccaccaggagcccaggcacagcaaggtgggcctgcaggacaacccctggttctgtgactgccacatcagcaagatgattgagctgagcaaggtggtggaccctgccatcgtgctgctggaccccctgatgacctgcagcgagcctgagcggctgaccggcatcctcttccagagagctgagctggagcactgcctgaagcccagcgtgatgaccagcgccaccaagatcatgtctgccctgggcagcaatgtgctgctgcgctgtgatgccaccggcttccccaccccccagatcacctggaccaggagtgacagcagccctgtgaactacaccgtcatccaggagagccctgaggagggcgtgcgctggagcatcatgagcctgaccggcatcagcagcaaggatgctggggactacaagtgcaaggccaagaacctggccggcatgtctgaggccgtggtgacagtgacagtgctgggcatcaccaccacccccatccccccagacaccagcgagaggactggagaccaccctgagtgggatgtgcagcccggcagcggccgcagcacctctgtgagcagcgccagcagctacctgtggagcagcagcttcagccccaccagcagcttcagcgccagcaccctgagcccccccagcacagccagcttcagcctgagccccttcagcagcagcacagtgagcagcaccaccaccctgagcaccagcatcagcgccagcaccaccatggccaacaagaggagcttccagctgcaccagggcggcaagaggaacctgaaggtggccaagaatggcagcaagctgcccccagccagcaccagcaagaaggaggagctggccctgctggaccagaccatgctgacagagaccaatgctgccatcgagaacctgcgggtggtgtctgagaccaaggagagcgtgaccctgacctggaacatgatcaacaccacccacaacagcgctgtgacagtgctgtacagcaaatatggaggcaaggacctgctgctgctgaatgctgacagcagcaagaaccaggtgaccattgatggcctggagcccggcggccagtacatggcctgtgtgtgccccaagggcgtgcccccccagaaggaccagtgcatcaccttcagcacagagcgggtggagggagatgacagccagtggagcctgctgctggtggtgaccagcacagcctgtgtggtgatcctgcccctcatctgcttcctgctgtacaaggtgtgcaagctgcagtgcaagtctgagcccttctgggaggatgacctggccaaggagacctacatccagtttgagaccctcttccccaggagccagagcgtgggggagctgtggaccaggagccacagagatgacagcgagaagctgctgctgtgcagccgcagctctgtggagagccaggtgaccttcaagtctgagggcagcaggcctgagtactactgctag

SEQ ID NO: 278230 - DNA, 1491 bp, Artificial Sequence
  derived and/or modified sequence
atggtggagccccaccaggagccccggcacagcaaggtgggcctgcaggataatccttggttttgtgactgtcacataagtaaaatgatcgagctgtcaaaagttgtggacccagcgattgtccttctggacccactgatgacatgttctgaacccgagaggctgactggtatacttttccagcgcgcagagctcgagcactgcctgaagccttctgtcatgacatcagctacgaagattatgtcagccctggggtccaatgttctgctccggtgcgacgcaacagggtttccaacaccgcagattacctggacccgaagcgacagctccccagtaaattacaccgtgatacaggagtccccggaggagggcgtgagatggagcattatgtcattgacaggcatttcctccaaggacgcgggtgactacaaatgcaaggccaagaatttggccgggatgtcagaagccgtggtgactgtgactgtgctggggatcacaactacgcctatccccccagacactagcgaacgcacaggggatcacccagagtgggatgtgcaaccaggctcaggccggtcaacgagtgtatcctcagcttcctcctacctgtggagcagttctttcagccccacttcatccttttctgcaagcaccttgagccctccttcaacagcctctttttccctgtctcctttctccagttctacggtgtcttccacaaccacactttcaactagtatttccgccagcacgactatggctaataagagaagcttccagctccaccaggggggaaaaaggaacttaaaagttgctaagaacggaagcaaactgccaccggcatcaacctcgaagaaggaggaactcgcacttctggaccagaccatgctcaccgaaaccaacgccgccatcgaaaacctgcgggttgtgtccgaaactaaagaaagcgtaaccctcacctggaacatgatcaacacaacgcacaattctgcggtgacagtgctctactccaaatacggcgggaaggatctcctcctgctgaacgcggatagctctaaaaatcaggtcaccatagatggcctggagccaggcggccagtatatggcctgtgtctgcccaaagggagtccccccccaaaaggatcaatgcatcacgttttccaccgagagagtcgaaggcgacgacagccagtggagtctgctcctagtggtcacaagcacagcttgcgtggtcatcctcccccttatatgtttcctgctttataaggtttgtaaactgcagtgcaagtcggaacctttctgggaggatgacctggcaaaggaaacctacattcagttcgaaacactgttccctcggtctcagagcgtaggcgaactctggaccaggtcacatagagatgactccgagaaactcctcctttgctctagaagttcagtggagtctcaagtgacctttaagtccgaggggtctagacctgaatactactgttag

SEQ ID NO: 278231 - DNA, 1491 bp, Artificial Sequence
  derived and/or modified sequence
atggtggagccccaccaggagccccggcacagcaaggtgggcctgcaagacaatccatggttctgcgattgtcatatatccaagatgattgaactgagtaaagtggtggatcctgcaattgtactactggacccgctcatgacatgttcagagcccgaacgtctaactggtatcctgttccagcgcgccgagcttgaacattgcctcaaacctagtgttatgacctcagctactaaaattatgtctgctctgggtagcaacgtattactccgctgcgacgctactggcttccctaccccgcaaatcacctggaccagatcggacagttcaccagttaattacactgttattcaagaaagtcccgaagaaggcgtaaggtggtccatcatgtcccttacgggtatcagctctaaggatgctggggactacaaatgcaaggcaaagaaccttgcaggcatgtcagaggccgtggtgaccgttaccgtcctcggaatcacgaccacccctatcccacccgacacaagtgaacggaccggcgaccaccctgaatgggacgtacagccggggtctggccggagtacttctgtgtcctcagccagcagttatctgtggagctcctcatttagccccacatcgtccttcagcgcttccaccctcagccccccatcaactgcatccttctccctatcgcccttctcctcctccactgtctcgagcactactacgctgagcacaagcatatcagcgagcacgacaatggcaaacaagaggtctttccagctccaccagggaggcaagcggaacctgaaagtggccaagaacgggagtaagctcccgccagcttctacttcgaagaaggaagaactcgcattgctcgatcaaaccatgcttactgaaactaacgccgccatagaaaacctgcgagtcgtaagtgagaccaaggagagtgttacactgacctggaatatgattaatacgacacacaattctgctgtcacggtcctctacagtaaatatggcggcaaggacctcctcctgctaaatgctgattcctctaagaaccaggtgacaattgatggcctggagccgggcggacagtacatggcctgtgtgtgccccaagggtgtgcctccgcagaaggatcagtgtatcaccttttccaccgagagggtagaaggcgacgatagccagtggagccttttgctggtggtaacatcaaccgcatgtgtcgtgatcttaccacttatatgcttcctgttatacaaggtgtgtaaactgcagtgcaaaagcgagcccttctgggaagacgacttggcgaaagaaacatatatccagtttgaaacattgttccccagaagtcagtccgtaggggagctatggacaaggagccatagagacgactcagagaaactcctgctgtgtagccgtagctcagtcgaatcacaggtcacattcaagtcagaagggtcccggcccgagtattattgctag

SEQ ID NO: 278232 - DNA, 1491 bp, Artificial Sequence
  derived and/or modified sequence
atggtcgagccgcaccaggagcctcgtcactctaaggttggactgcaggacaacccatggttttgcgattgccatatttctaagatgatagagctgtcaaaggtcgttgacccggcaattgtccttttggatccactgatgacctgtagcgaacccgagcggctcactgggattttattccaacgggcagaattggagcattgcttaaagccgagtgtcatgacttcggccactaagattatgtcagccctcggatctaacgtgctgttgcggtgcgacgccaccggcttccccaccccccagattacgtggacgcggagtgactcaagccccgtgaattacacagtcatccaagaatctccagaggaaggcgttcgatggtctatcatgtctctcaccggcatcagttctaaggatgccggagactacaaatgcaaagcaaagaatcttgccggaatgtccgaggctgtcgtcaccgtgaccgtcctcgggatcaccaccaccccgattcctcccgatacatcagaacggaccggagatcacccagagtgggacgtccaaccaggctcaggcagaagcacatccgtgtcatctgcaagttcgtacctgtggagcagtagcttttcccctacatctagtttttccgcctcgaccctgtctccgcctagcaccgccagtttcagcttatcgcccttctcatcttccacggtgtcatcaacaaccacacttagtactagtatcagcgcatccacaaccatggcgaacaagagaagctttcaactgcaccaaggaggtaaacggaatctgaaagttgctaagaatggcagcaagctgccacccgctagtacatccaagaaggaagagctggccctgctagaccagaccatgctcactgaaaccaacgcggctatcgagaatctccgggtagtatcagaaactaaggaaagtgtaacacttacctggaatatgattaacactactcacaactcagcagttacagtactttatagcaagtacggaggaaaggatctgctcctgctcaatgcggatagcagcaagaatcaggtcactatagacggcctggaaccaggtggccagtacatggcctgcgtctgtcccaagggcgtcccaccccaaaaggatcaatgtatcacattttccacagaaagagtcgagggcgatgatagccagtggagtctgttactggtcgtgacctctactgcatgcgtggtgatcctgcccctcatatgcttccttctatataaggtttgcaagctgcaatgtaaatcggaaccattttgggaagatgacctagccaaggaaacctacatccagttcgagacactgttccccagatcacagagcgtcggggagttgtggacccgttcacatcgagatgacagcgaaaagctgctgttgtgttccagaagttcagtggaatctcaggtcaccttcaagtccgaagggtcccggcctgaatactactgctag

SEQ ID NO: 278233 - DNA, 1491 bp, Artificial Sequence
  derived and/or modified sequence
atggttgaaccccatcaggaaccccgacactctaaagttggcctgcaagataatccgtggttctgtgactgtcacatatcaaagatgatcgaactttctaaagtggtcgacccagcaatcgtgctcctcgatccactgatgacctgctcagaaccagaaaggttgactggcatcctattccaacgcgctgagttagagcactgcctcaagcccagcgtgatgacatctgctaccaagatcatgtcagcactggggagcaacgtgctgttacggtgcgatgccacgggctttccaaccccacagatcacctggacacggagcgacagttcgcctgtgaactacactgtaatccaagagtccccagaagaaggagtgaggtggagcatcatgtctctgaccggtatcagcagcaaggatgctggagattataagtgcaaggctaagaatctggccggtatgagtgaagctgttgtgacagtaactgtcctgggaatcacgactactccaattcctcctgacaccagtgagagaaccggagatcaccctgaatgggacgtgcagccgggatctgggaggagcacttcagtatcatcagcttccagctacctttggtcatcctcttttagccctacaagttcattctcagcctccactctcagcccgccaagcaccgcttcattctcccttagcccgttcagttcttcaaccgtttcctctaccacgaccttatcaaccagcatcagcgccagtaccacaatggcaaataagcgcagtttccagctgcatcagggtggaaagcgcaatctgaaggtagctaagaacggatccaagctcccaccagcttcaacatctaaaaaggaggagctggccctgttggaccagaccatgcttacggaaaccaacgccgcaattgagaacttgcgtgttgtgtccgaaacaaaagaaagtgttaccctgacttggaacatgattaacactacccataacagtgcagtcacagtcctgtactccaaatatggaggaaaggacctgctgctgctgaatgcagacagttctaaaaatcaggtcaccatagatggcctggaacccggtggacagtacatggcctgtgtgtgtccaaagggtgtgcctccccagaaagatcagtgtataactttctccacggaaagggttgaaggggatgatagtcagtggtctctgctgctggtggttacctctaccgcttgcgtcgtgattttaccgttaatatgcttcctcctgtacaaggtgtgtaaacttcaatgtaaatctgagccattctgggaagatgacctcgctaaagagacctatatccagttcgagacccttttcccaagatctcagagcgttggcgaattatggacgagaagtcatcgggacgactccgaaaagttactcctgtgttcacgatcctccgtggagagccaggtaaccttcaagagcgaggggagcaggcctgaatattattgctag

SEQ ID NO: 278234 - protein, 176 aa, Artificial Sequence
  derived and/or modified sequence
MPVERMRMRPWLEEQINSNTIPGLKWLNKEKKIFQIPWMHAARHGWDVEKDAPLFRNWAIHTGKHQPGVDKPDPKTWKANFRCAMNSLPDIEEVKDKSIKKGNNAFRVYRMLPLSERPSKKGKKPKTEKEDKVKHIKQEPVESSLGLSNGVSDLSPEYAVLTSTIKNEVDSTVNII

SEQ ID NO: 278235 - DNA, 531 bp, Artificial Sequence
  derived and/or modified sequence
atgccggtagagcgtatgcggatgcgcccctggctcgaggagcagatcaatagtaacactattcccggcctgaagtggctgaataaggagaaaaagatctttcagatcccctggatgcacgcggcgaggcacggttgggacgttgagaaagacgcaccccttttcagaaactgggcaatccacacagggaaacatcagcccggggtcgacaagcctgaccctaagacatggaaggctaacttccgatgtgcgatgaactcacttcccgacattgaggaagtgaaagataagagtattaagaaaggaaataatgctttccgggtctacagaatgctgcccctctctgagcgtccttcaaagaagggcaaaaagccaaaaacagaaaaggaagacaaggtcaagcacattaaacaggagcccgtggagagctctttaggcttaagtaacggggtgtctgatctgtcccctgagtacgccgtcttaacctctaccatcaaaaacgaagtggacagcaccgtgaatatcatctag

SEQ ID NO: 278236 - DNA, 486 bp, Artificial Sequence
  derived and/or modified sequence
atgcccgtggaacggatgagaatgcggccgtggctcgaggagcagatcaactctaatacaataccaggcctgaagtggcttaacaaagaaaagaagatcttccagataccttggatgcatgcagctcggcatgggtgggacgttgaaaaggacgcacctcttttcagaaattgggctattcacacaggaaagcatcagccgggcgttgacaagccagaccccaaaacatggaaagccaacttccgctgcgccatgaacagcttgccagatatcgaggaagtgaaggacaaatcaatcaaaaaaggcaataatgcttttagggtgtaccgcatgctccccctgagcgaaaggccatcgaaaaaagggaagaaacctaagacagaaaaagaggacaaggtaaaacacatcaaacaagaaccagtggaaagttctctaggactgagtaacggcgtttctgacctttcacccgagtacgctgtcctgtag

SEQ ID NO: 278237 - DNA, 595 bp, Artificial Sequence
  derived and/or modified sequence
gcagatgcggagaggtggctccatggacacagacctgctgtgtgtgcttctgcgccccagggcaccatgccggtggaaaggatgcgcatgcgcccgtggctggaggagcagataaactccaacacgatcccggggctcaagtggcttaacaaggaaaagaagatttttcagatcccctggatgcatgcggctagacatgggtgggatgtggaaaaagatgcaccactctttagaaactgggcaatccatacaggaaagcatcaaccaggagtagataaacctgatcccaaaacatggaaggcgaatttcagatgcgccatgaattccttgcctgatattgaagaagtcaaggataaaagcataaagaaaggaaataatgccttcagggtctaccgaatgctgcccctatcagaacggccttctaagaaaggaaagaaaccaaagacagaaaaagaagacaaagttaagcacatcaagcaagaaccagttgagtcatctctggggcttagtaatggagtaagtgatctttctcctgagtatgcggtcctgacttcaactataaaaaatgaagtggatagtacggtgaacatcatag

SEQ ID NO: 278238 - DNA, 568 bp, Artificial Sequence
  derived and/or modified sequence
cagatgcggagaggtggctccatggacacagacctgctgtgtgtgcttctgcgccccaggtgttgtgtgtgggggtgcagggcaccatgccggtggaaaggatgcgcatgcgcccgtggctggaggagcagataaactccaacacgatcccggggctcaagtggcttaacaaggaaaagaagatttttcagatcccctggatgcatgcggctagacatgggtgggatgtggaaaaagatgcaccactctttagaaactgggcaatccatacaggaaagcatcaaccaggagtagataaacctgatcccaaaacatggaaggcgaatttcagatgcgccatgaattccttgcctgatattgaagaagtcaaggataaaagcataaagaaaggaaataatgccttcagggtctaccgaatgctgcccctatcagaacggccttctaagaaaggaaagaaaccaaagacagaaaaagaagacaaagttaagcacatcaagcaagaaccagttgagtcatctctggggcttagtaatggagtaagtgatctttctcctgagtatgcggtcct

SEQ ID NO: 278239 - DNA, 531 bp, Artificial Sequence
  derived and/or modified sequence
atgcctgtggagaggatgaggatgaggccctggctggaggagcagatcaacagcaacaccatccctggcctgaagtggctgaacaaggagaagaagatcttccagatcccctggatgcatgctgcccggcacggctgggatgtggagaaggatgcccccctcttcaggaactgggccatccacacaggcaagcaccagcccggggtggacaagccagaccccaagacctggaaggccaacttccgctgtgccatgaacagcctgcctgacatcgaggaggtgaaggacaagagcatcaagaagggcaacaatgccttccgggtgtacaggatgctgcccctgtctgagcggcccagcaagaagggcaagaagcccaagacagagaaggaggacaaggtgaagcacatcaagcaggagcctgtggagagcagcctgggcctgagcaatggagtgtctgacctgagcccagaatatgctgtgctgaccagcaccatcaagaatgaggtggacagcacagtgaacatcatctag

SEQ ID NO: 278240 - DNA, 486 bp, Artificial Sequence
  derived and/or modified sequence
atgcctgtggagaggatgaggatgaggccctggctggaggagcagatcaacagcaacaccatccctggcctgaagtggctgaacaaggagaagaagatcttccagatcccctggatgcatgctgcccggcacggctgggatgtggagaaggatgcccccctcttcaggaactgggccatccacacaggcaagcaccagcccggggtggacaagccagaccccaagacctggaaggccaacttccgctgtgccatgaacagcctgcctgacatcgaggaggtgaaggacaagagcatcaagaagggcaacaatgccttccgggtgtacaggatgctgcccctgtctgagcggcccagcaagaagggcaagaagcccaagacagagaaggaggacaaggtgaagcacatcaagcaggagcctgtggagagcagcctgggcctgagcaatggagtgtctgacctgagcccagaatatgctgtgctgtag

SEQ ID NO: 278241 - DNA, 531 bp, Artificial Sequence
  derived and/or modified sequence
atgcccgtggagcggatgcggatgcggccctggctggaggagcagatcaattccaacacaatccccggactcaagtggctaaacaaagaaaaaaagattttccagatcccatggatgcacgcggcgcggcatggctgggatgttgaaaaggacgcacctttgtttcgcaactgggcaatacacacggggaaacaccaacctggggttgataagcctgatcccaaaacttggaaggccaactttcggtgcgcaatgaactcactcccagacattgaggaggtcaaggacaagagtatcaagaaaggtaacaacgcttttagggtgtatcgcatgcttccattgagcgaacgaccctccaaaaaaggcaagaagcccaaaactgagaaagaggacaaagtgaagcatatcaagcaggagcctgtggaatccagcctgggactctctaacggggtgtctgatctttcgccagaatatgccgtcctgacttctaccataaagaatgaagttgatagcaccgtgaatatcatctag

SEQ ID NO: 278242 - DNA, 486 bp, Artificial Sequence
  derived and/or modified sequence
atgcccgtggagcggatgcggatgcggccctggctggaggagcagattaattccaatacgatccccggacttaaatggctgaataaagagaagaaaattttccagattccttggatgcatgccgccaggcacgggtgggacgtggagaaagatgcaccactgttccggaactgggcaatccatacaggcaagcaccaaccgggcgtcgataaacccgatcccaaaacttggaaagctaactttcgctgcgcgatgaattcattgcccgacatagaggaagtcaaggacaagtctattaaaaagggaaacaacgcatttcgcgtgtacagaatgctcccactgtccgaacggccctcaaaaaaaggaaagaagcccaaaacagagaaggaagacaaagtaaaacacattaagcaggaacctgttgagtccagcctgggactgagcaacggagtcagcgatttgagtccggaatacgccgtcttgtag

SEQ ID NO: 278243 - DNA, 531 bp, Artificial Sequence
  derived and/or modified sequence
atgcctgtggagcggatgaggatgaggccatggctcgaggagcagattaacagcaacacaatccctggattaaagtggctcaacaaagagaagaaaatattccagatcccctggatgcatgcggctcgccatggttgggacgtcgaaaaagatgccccactctttagaaactgggcaattcacacaggcaagcatcagccaggggtcgacaagccggaccctaagacctggaaggccaatttcaggtgcgccatgaatagcttgcccgatatagaggaagtcaaggataaatctatcaaaaagggcaacaacgctttccgggtctatagaatgctgcctcttagcgaacggccatcaaagaaagggaaaaaaccgaaaacagaaaaggaagacaaagtcaaacacataaaacaggagcccgtggaatcatctcttggactgtcaaatggagtctcagatttgtcaccagaatacgcagtcctcacctccacaatcaagaatgaagtggatagtacagtgaatatcatatag

SEQ ID NO: 278244 - DNA, 486 bp, Artificial Sequence
  derived and/or modified sequence
atgcctgtcgaacgaatgagaatgaggccctggttggaagagcagatcaacagcaacacaatacccggactcaagtggttaaataaggaaaaaaagatctttcagattccctggatgcacgcagcacgccacggatgggacgttgagaaggacgcccctctctttcgaaactgggctatccataccggcaaacaccagcccggagttgacaaacccgaccccaagacatggaaggcaaactttcgatgtgccatgaattctttacccgatatagaagaggttaaggataagagcattaaaaaaggcaataacgcttttagagtttatcggatgctgccactctccgaacgcccaagtaaaaaagggaaaaaaccaaagacagaaaaagaggacaaggttaaacacattaaacaggagcctgtcgaaagctccttaggcctaagtaacggtgtcagtgatctatcaccagaatacgccgtgctttag

SEQ ID NO: 278245 - DNA, 531 bp, Artificial Sequence
  derived and/or modified sequence
atgcccgtggagagaatgagaatgagaccctggctggaggagcagatcaacagcaacaccatccccggcctgaagtggctgaacaaggagaagaagatcttccagatcccctggatgcacgccgccagacacggctgggacgtggagaaggacgcccccctgttcagaaactgggccatccacaccggcaagcaccagcccggcgtggacaagcccgaccccaagacctggaaggccaacttcagatgcgccatgaacagcctgcccgacatcgaggaggtgaaggacaagagcatcaagaagggcaacaacgccttcagagtgtacagaatgctgcccctgagcgagagacccagcaagaagggcaagaagcccaagaccgagaaggaggacaaggtgaagcacatcaagcaggagcccgtggagagcagcctgggcctgagcaacggcgtgagcgacctgagccccgagtacgccgtgctgaccagcaccatcaagaacgaggtggacagcaccgtgaacatcatctag

SEQ ID NO: 278246 - DNA, 486 bp, Artificial Sequence
  derived and/or modified sequence
atgcccgtggagagaatgagaatgagaccctggctggaggagcagatcaacagcaacaccatccccggcctgaagtggctgaacaaggagaagaagatcttccagatcccctggatgcacgccgccagacacggctgggacgtggagaaggacgcccccctgttcagaaactgggccatccacaccggcaagcaccagcccggcgtggacaagcccgaccccaagacctggaaggccaacttcagatgcgccatgaacagcctgcccgacatcgaggaggtgaaggacaagagcatcaagaagggcaacaacgccttcagagtgtacagaatgctgcccctgagcgagagacccagcaagaagggcaagaagcccaagaccgagaaggaggacaaggtgaagcacatcaagcaggagcccgtggagagcagcctgggcctgagcaacggcgtgagcgacctgagccccgagtacgccgtgctgtag

SEQ ID NO: 278247 - DNA, 177 bp, Artificial Sequence
  derived and/or modified sequence
atgaatgttacctctctgttcagcttcacttcccccgccgtgaaaaggttgcttggatggaagcagggtgacgaagaggagaaatgggccgaaaaggccgtcgacgcactggtgaagaaactcaagaagaaaaagggcgcaatggaagagttagagaaggctctttcctgtccgtag

SEQ ID NO: 278248 - DNA, 288 bp, Artificial Sequence
  derived and/or modified sequence
atgaatgttacgtcattattcagcttcacaagtcctgctgtgaagaggttgttaggatggaagcagggcgatgaggaagagaaatgggccgagaaggccgtggacgccctagttaagaagctgaagaaaaaaaagggcgccatggaggagcttgaaaaagccctgagctgccccgggcagccctccaactgtgtgactatccccagaagcttagatggaagactgcaggtgagccataggaaggggctgcctcatgtgatctattgtagggtgtggagatggccctag

SEQ ID NO: 278249 - DNA, 402 bp, Artificial Sequence
  derived and/or modified sequence
atgaatgtgaccagtctgttcagctttacttctcctgctgtcaagcgtctactgggctggaaacaaggagatgaagaggagaaatgggcggagaaggcagttgatgctcttgtcaaaaagctcaagaagaagaagggcgccatggaagaactagagaaggccctaagttgcccgggacagccttctaactgcgttactatacctagaagcttggatgggcgcttgcaggtcagccacaggaaaggcctgcctcacgtcatctactgtcgggtctggcgctggcccgacctgcagtctcaccatgagctcaagcctctggagtgctgcgaattcccttttggaagtaaacaaaaagaagtctgtataaatccttatcattataagcgtgtggaatcgccctag

SEQ ID NO: 278250 - DNA, 321 bp, Artificial Sequence
  derived and/or modified sequence
atgaacgttacaagcctcttttcctttacatctcctgctgtgaagcggctactgggctggaaacagggtgatgaggaagagaagtgggccgaaaaggctgtcgatgccctggtgaagaaactgaagaagaaaaagggagcaatggaagagttggagaaggctctgtcatgtcctggtcagccttccaactgcgtgaccataccccggtccctggatggccgtctccaagtttctcatcgcaagggcctgccacacgtgatctactgccgcgtgtggcgctggcctgatctacagtctcaccatgagctgaaaccgctctag

SEQ ID NO: 278251 - DNA, 339 bp, Artificial Sequence
  derived and/or modified sequence
atgaacgtgactagcctgttttcttttacatcaccagctgtgaaaaggctattagggtggaagcaaggggacgaggaagaaaaatgggccgaaaaggcagtggacgccttggtaaagaaacttaaaaagaagaagggggccatggaggagcttgaaaaggctctctcatgccctgggcagccgagcaattgcgtgacaattcctcggtcactcgacggtcggcttcaggtgtctcataggaaaggcctccctcatgtgatctattgccgagtatggcgctggcctgatttgcagagtcaccacgagttaaaacccctcgagtgttgtgagtttccatag

SEQ ID NO: 278252 - DNA, 177 bp, Artificial Sequence
  derived and/or modified sequence
atgaatgtgaccagcctcttctccttcaccagccctgctgtgaagaggctgctgggctggaagcagggagatgaggaggagaagtgggccgagaaggctgtggatgccctggtgaagaagctgaagaagaagaagggggccatggaggagctggagaaggccctgagctgcccctag

SEQ ID NO: 278253 - DNA, 288 bp, Artificial Sequence
  derived and/or modified sequence
atgaatgtgaccagcctcttctccttcaccagccctgctgtgaagaggctgctgggctggaagcagggagatgaggaggagaagtgggccgagaaggctgtggatgccctggtgaagaagctgaagaagaagaagggggccatggaggagctggagaaggccctgagctgccccggccagcccagcaactgtgtgaccatccccaggagcctggatggccgcctgcaggtgagccacaggaagggcctgccccacgtgatctactgccgggtgtggcgctggccctag

SEQ ID NO: 278254 - DNA, 402 bp, Artificial Sequence
  derived and/or modified sequence
atgaatgtgaccagcctcttctccttcaccagccctgctgtgaagaggctgctgggctggaagcagggagatgaggaggagaagtgggccgagaaggctgtggatgccctggtgaagaagctgaagaagaagaagggggccatggaggagctggagaaggccctgagctgccccggccagcccagcaactgtgtgaccatccccaggagcctggatggccgcctgcaggtgagccacaggaagggcctgccccacgtgatctactgccgggtgtggcgctggccagacctgcagagccaccacgagctgaagcccctggagtgctgtgagttccccttcggcagcaagcagaaggaggtgtgcatcaacccctaccactacaagagggtggagagcccctag

SEQ ID NO: 278255 - DNA, 321 bp, Artificial Sequence
  derived and/or modified sequence
atgaatgtgaccagcctcttctccttcaccagccctgctgtgaagaggctgctgggctggaagcagggagatgaggaggagaagtgggccgagaaggctgtggatgccctggtgaagaagctgaagaagaagaagggggccatggaggagctggagaaggccctgagctgccccggccagcccagcaactgtgtgaccatccccaggagcctggatggccgcctgcaggtgagccacaggaagggcctgccccacgtgatctactgccgggtgtggcgctggccagacctgcagagccaccacgagctgaagcccctgtag

SEQ ID NO: 278256 - DNA, 339 bp, Artificial Sequence
  derived and/or modified sequence
atgaatgtgaccagcctcttctccttcaccagccctgctgtgaagaggctgctgggctggaagcagggagatgaggaggagaagtgggccgagaaggctgtggatgccctggtgaagaagctgaagaagaagaagggggccatggaggagctggagaaggccctgagctgccccggccagcccagcaactgtgtgaccatccccaggagcctggatggccgcctgcaggtgagccacaggaagggcctgccccacgtgatctactgccgggtgtggcgctggccagacctgcagagccaccacgagctgaagcccctggagtgctgtgagttcccctag

SEQ ID NO: 278257 - DNA, 177 bp, Artificial Sequence
  derived and/or modified sequence
atgaacgtgaccagcctgttcagcttcaccagccccgccgtgaagaggttgcttgggtggaagcagggtgacgaggaggagaagtgggccgaaaaagccgttgatgcactcgtaaaaaagctcaaaaaaaaaaagggggcgatggaagagctggagaaagccctgagctgtccctag

SEQ ID NO: 278258 - DNA, 288 bp, Artificial Sequence
  derived and/or modified sequence
atgaacgtgaccagcctgttcagcttcaccagccccgccgtgaagaggttgttgggttggaagcagggagatgaggaggagaaatgggcggagaaggcggttgatgctcttgttaaaaagctcaaaaagaagaagggtgccatggaagaactcgaaaaggcactgagctgccctggacagccgtcaaattgcgtgaccattcctagaagcctggacggaagactccaggtgtcccacaggaagggactgccacatgtcatttactgccgggtgtggcgctggccctag

SEQ ID NO: 278259 - DNA, 402 bp, Artificial Sequence
  derived and/or modified sequence
atgaacgtgaccagcctgttcagcttcaccagccccgccgtgaagaggctcttgggatggaaacagggggacgaagaagagaagtgggctgagaaagcggtggacgccctagtcaagaagctaaaaaaaaaaaagggagccatggaggaactggagaaggcccttagctgtccagggcagccttcgaactgcgtaaccattcctcgaagccttgacggccgacttcaagtatcccacagaaagggcctacctcacgtcatctattgtagagtttggcgctggcctgatctccagtcgcaccacgagctaaaacctctcgaatgttgtgaatttcctttcgggtctaagcagaaagaagtctgcatcaacccataccattataagagagtggagtccccatag

SEQ ID NO: 278260 - DNA, 321 bp, Artificial Sequence
  derived and/or modified sequence
atgaacgtgaccagcctgttcagcttcaccagccccgccgtgaagaggctgcttggctggaagcagggagatgaggaagaaaagtgggctgagaaagctgtcgacgctttggtcaagaagttgaaaaagaagaagggcgcaatggaagaactggagaaggcgctgagttgccctggacagccaagtaactgtgtgactattcctagatcattggacggacgcctgcaagtgagccatagaaaaggcctgccgcatgtgatttattgcagggtttggagatggcccgatcttcaatcacaccacgaacttaagccattgtag

SEQ ID NO: 278261 - DNA, 339 bp, Artificial Sequence
  derived and/or modified sequence
atgaacgtgaccagcctgttcagcttcaccagccccgccgtgaagcgactgctgggctggaaacagggggatgaggaagagaagtgggctgaaaaggccgtggatgccctagtcaagaaactcaagaaaaagaagggtgcaatggaagagctggagaaagctctttcatgtcctggtcagcctagtaactgcgtaacgatcccaaggtctctggacggcagattgcaggtgagtcacagaaaagggctccctcatgttatctactgtagggtgtggcggtggccagacctacagagccatcacgaacttaagcccctcgagtgctgcgagttcccatag

SEQ ID NO: 278262 - DNA, 177 bp, Artificial Sequence
  derived and/or modified sequence
atgaacgtaacatccctgttctctttcaccagccccgcagttaaacgccttttggggtggaagcagggcgatgaagaggagaaatgggctgaaaaagccgtggatgccctcgtaaagaaactaaagaaaaagaaaggcgctatggaggaactcgagaaggcattgtcttgcccatag

SEQ ID NO: 278263 - DNA, 288 bp, Artificial Sequence
  derived and/or modified sequence
atgaatgtgacctccctgtttagttttacctctcccgcagtaaagcggctgcttggctggaagcaaggcgacgaggaggaaaagtgggcagaaaaggcagtagatgctctcgtgaagaaacttaagaaaaagaagggcgctatggaggaactggagaaggctctttcctgtcccggtcagccgtcgaactgtgtgacaatccccagatccctggacggtcgattgcaggtgtcacaccgtaagggattaccacacgtcatttactgtagagtatggaggtggccctag

SEQ ID NO: 278264 - DNA, 402 bp, Artificial Sequence
  derived and/or modified sequence
atgaacgtaacatcattgttcagcttcaccagccctgctgtgaaacgtctccttggctggaagcagggggacgaagaagagaagtgggcagaaaaggccgtggatgccctggtcaaaaaacttaaaaagaagaagggagccatggaggaactggagaaggcacttagctgtccagggcaaccctctaactgcgttaccatcccacgatcacttgatgggagactgcaggtaagccaccgaaagggactaccccatgttatctactgtagagtgtggaggtggccggacctgcagtcccaccacgaactgaagccactggaatgctgtgagtttccctttggcagcaaacagaaggaggtgtgcattaacccttatcactataaacgggtcgaatcaccctag

SEQ ID NO: 278265 - DNA, 321 bp, Artificial Sequence
  derived and/or modified sequence
atgaacgtgaccagcttgttcagttttacaagtcccgcagtaaagagactattgggttggaagcagggagatgaggaggagaagtgggcagagaaggcagttgatgcgctcgtcaagaagctgaagaagaagaagggcgcaatggaagaactggagaaagctctgtcatgtcccggacagcctagcaattgtgtgaccatccctcgatccttggacggaaggctgcaggtaagccaccggaaggggctaccccacgtaatttattgtagagtttggcgctggcccgacttacaatcgcaccacgagctgaaacctctctag

SEQ ID NO: 278266 - DNA, 339 bp, Artificial Sequence
  derived and/or modified sequence
atgaacgtgactagcctctttagctttacctctcccgctgtcaaacgattactggggtggaagcagggtgacgaggaggagaagtgggctgaaaaggcagtagatgcgctagttaagaaacttaaaaaaaagaaaggcgcaatggaggaacttgagaaggcattgtcttgccccggacagccgagcaactgtgtgaccatcccccgaagccttgacggcaggctgcaggtgtcacaccgcaaggggcttccgcacgttatctattgcagggtgtggaggtggcccgatctgcaaagccaccatgaattaaagcctctggagtgttgtgaattcccctag

SEQ ID NO: 278267 - DNA, 573 bp, Artificial Sequence
  derived and/or modified sequence
attgtgtcccccgcgccggcggggcgacccctgcgggagctggaggacgaccgctggcgctgctctccaaggcgcctggtggagcgggtctcgcgggcgggggaccccggcgccccgggcccctccacatcccgcacgggttttcttctcggccccagcaagcctctttggggtcgaggtcaaggaaagttcgcaccgagatcccctctaatttattcaaaggtgctgactgggttacttttttaaacactaggaatggtaatttctactcttctggacttcaaactaagaagttaaagagacttctctgtaaataaacaaatctcttctgctgtccttttgcatttggagacagctttatttcaccatatccaaggagtataactagtgctgtcattatgaatgtgacaagtttattttcctttacaagtccagctgtgaagagacttcttgggtggaaacagggcgatgaagaagaaaaatgggcagagaaagctgttgatgctttggtgaaaaaactgaagaaaaagaaaggtgccatggaggaactggaaaaggccttgagctgcccag

SEQ ID NO: 278268 - DNA, 558 bp, Artificial Sequence
  derived and/or modified sequence
caattctgggtacgtacaacttctggggcctgcaaattattggagagtgagtgaggggcaacgaaagatagacataaaagggcgcgtctcgaaaggtgctgactgggttacttttttaaacactaggaatggtaatttctactcttctggacttcaaactaagaagttaaagagacttctctgtaaataaacaaatctcttctgctgtccttttgcatttggagacagctttatttcaccatatccaaggagtataactagtgctgtcattatgaatgtgacaagtttattttcctttacaagtccagctgtgaagagacttcttgggtggaaacagggcgatgaagaagaaaaatgggcagagaaagctgttgatgctttggtgaaaaaactgaagaaaaagaaaggtgccatggaggaactggaaaaggccttgagctgcccagggcaaccgagtaactgtgtcaccattccccgctctctggatggcaggctgcaagtctcccaccggaagggactgcctcatgtcatttactgccgtgtgtggcgctggcccga

SEQ ID NO: 278269 - DNA, 847 bp, Artificial Sequence
  derived and/or modified sequence
ggagaaagcaggcgggcgggcggagaaaggagaggccgagcggctcaacccgggccgaggctcggggagcggagagtggcgcagcgcccggccgtccggacccgggccgcgagaccccgctcgcccggccactcgtgctcccacacggacgggcgcgccgccaacccgcatgcaatttttaaatacacggtgcaagataaccagtaaaggcgcgttccttctgaaaattgaggccggtctcagaaccatctcctgagaaagcatccttttcgtgctgactgggttacttttttaaacactaggaatggtaatttctactcttctggacttcaaactaagaagttaaagagacttctctgtaaataaacaaatctcttctgctgtccttttgcatttggagacagctttatttcaccatatccaaggagtataactagtgctgtcattatgaatgtgacaagtttattttcctttacaagtccagctgtgaagagacttcttgggtggaaacagggcgatgaagaagaaaaatgggcagagaaagctgttgatgctttggtgaaaaaactgaagaaaaagaaaggtgccatggaggaactggaaaaggccttgagctgcccagggcaaccgagtaactgtgtcaccattccccgctctctggatggcaggctgcaagtctcccaccggaagggactgcctcatgtcatttactgccgtgtgtggcgctggcccgatcttcagagccaccatgaactaaaaccactggaatgctgtgagtttccttttggttccaagcagaaggaggtctgcatcaatccctaccactataagagagtagaaagccctg

SEQ ID NO: 278270 - DNA, 616 bp, Artificial Sequence
  derived and/or modified sequence
attatttggagcaacaaggttacctactcgaatcactggatcctgagttgacacaaaacgcatctgttgactcagggtttgtataaccacgtgcagtatttactaggctatccaattctgggtgctgactgggttacttttttaaacactaggaatggtaatttctactcttctggacttcaaactaagaagttaaagagacttctctgtaaataaacaaatctcttctgctgtccttttgcatttggagacagctttatttcaccatatccaaggagtataactagtgctgtcattatgaatgtgacaagtttattttcctttacaagtccagctgtgaagagacttcttgggtggaaacagggcgatgaagaagaaaaatgggcagagaaagctgttgatgctttggtgaaaaaactgaagaaaaagaaaggtgccatggaggaactggaaaaggccttgagctgcccagggcaaccgagtaactgtgtcaccattccccgctctctggatggcaggctgcaagtctcccaccggaagggactgcctcatgtcatttactgccgtgtgtggcgctggcccgatcttcagagccaccatgaactaaaaccactgg

SEQ ID NO: 278271 - DNA, 569 bp, Artificial Sequence
  derived and/or modified sequence
aatttggagaggatccctggtcgcgcggcagcggcggcggcgcgcgggtgagcgggtgctgactgggttacttttttaaacactaggaatggtaatttctactcttctggacttcaaactaagaagttaaagagacttctctgtaaataaacaaatctcttctgctgtccttttgcatttggagacagctttatttcaccatatccaaggagtataactagtgctgtcattatgaatgtgacaagtttattttcctttacaagtccagctgtgaagagacttcttgggtggaaacagggcgatgaagaagaaaaatgggcagagaaagctgttgatgctttggtgaaaaaactgaagaaaaagaaaggtgccatggaggaactggaaaaggccttgagctgcccagggcaaccgagtaactgtgtcaccattccccgctctctggatggcaggctgcaagtctcccaccggaagggactgcctcatgtcatttactgccgtgtgtggcgctggcccgatcttcagagccaccatgaactaaaaccactggaatgctgtgagtttccttt

SEQ ID NO: 278272 - DNA, 177 bp, Artificial Sequence
  derived and/or modified sequence
atgaacgtgaccagcctgttcagcttcaccagccccgccgtgaagagactgctgggctggaagcagggcgacgaggaggagaagtgggccgagaaggccgtggacgccctggtgaagaagctgaagaagaagaagggcgccatggaggagctggagaaggccctgagctgcccctag

SEQ ID NO: 278273 - DNA, 288 bp, Artificial Sequence
  derived and/or modified sequence
atgaacgtgaccagcctgttcagcttcaccagccccgccgtgaagagactgctgggctggaagcagggcgacgaggaggagaagtgggccgagaaggccgtggacgccctggtgaagaagctgaagaagaagaagggcgccatggaggagctggagaaggccctgagctgccccggccagcccagcaactgcgtgaccatccccagaagcctggacggcagactgcaggtgagccacagaaagggcctgccccacgtgatctactgcagagtgtggagatggccctag

SEQ ID NO: 278274 - DNA, 402 bp, Artificial Sequence
  derived and/or modified sequence
atgaacgtgaccagcctgttcagcttcaccagccccgccgtgaagagactgctgggctggaagcagggcgacgaggaggagaagtgggccgagaaggccgtggacgccctggtgaagaagctgaagaagaagaagggcgccatggaggagctggagaaggccctgagctgccccggccagcccagcaactgcgtgaccatccccagaagcctggacggcagactgcaggtgagccacagaaagggcctgccccacgtgatctactgcagagtgtggagatggcccgacctgcagagccaccacgagctgaagcccctggagtgctgcgagttccccttcggcagcaagcagaaggaggtgtgcatcaacccctaccactacaagagagtggagagcccctag

SEQ ID NO: 278275 - DNA, 321 bp, Artificial Sequence
  derived and/or modified sequence
atgaacgtgaccagcctgttcagcttcaccagccccgccgtgaagagactgctgggctggaagcagggcgacgaggaggagaagtgggccgagaaggccgtggacgccctggtgaagaagctgaagaagaagaagggcgccatggaggagctggagaaggccctgagctgccccggccagcccagcaactgcgtgaccatccccagaagcctggacggcagactgcaggtgagccacagaaagggcctgccccacgtgatctactgcagagtgtggagatggcccgacctgcagagccaccacgagctgaagcccctgtag

SEQ ID NO: 278276 - DNA, 339 bp, Artificial Sequence
  derived and/or modified sequence
atgaacgtgaccagcctgttcagcttcaccagccccgccgtgaagagactgctgggctggaagcagggcgacgaggaggagaagtgggccgagaaggccgtggacgccctggtgaagaagctgaagaagaagaagggcgccatggaggagctggagaaggccctgagctgccccggccagcccagcaactgcgtgaccatccccagaagcctggacggcagactgcaggtgagccacagaaagggcctgccccacgtgatctactgcagagtgtggagatggcccgacctgcagagccaccacgagctgaagcccctggagtgctgcgagttcccctag

SEQ ID NO: 278277 - DNA, 390 bp, Artificial Sequence
  derived and/or modified sequence
atgaaaaccggacattttgagatcgtgaccatgctgctggccacgatgatcctggtagatatcttccaggtgaaagcagaagtcctagatatggccgacaacgcctttgacgatgaatacttaaagtgcactgacaggatggagattaagtatgtgcctcagcttctcaaagaggagaaggcctcccatcagcagcttgacacagtatgggagaacgccaaggccaagtgggcggcccgcaagacccagattttcctgcccatgaattttaaggataatcacggcatcgctctgatggcttacataagcgaggcccaggagcagaccccattttaccacctcttcagtgaagcagtgaaaatggccgggcaaagccgagaagactattag

SEQ ID NO: 278278 - DNA, 528 bp, Artificial Sequence
  derived and/or modified sequence
atgaagaccggccatttcgagatagtgactatgctgcttgcaaccatgattttggtggacatttttcaggtcaaagcagaagtcttggacatggcagacaacgccttcgatgatgaataccttaaatgtactgaccgcatggaaatcaaatatgttccccagctgctgaaggaggaaaaagcaagccatcaacagctggatacagtatgggagaatgcaaaggccaaatgggccgcaaggaagacccagatattcttgcccatgaacttcaaggacaatcacggaattgcacttatggcgtacatctctgaagcccaagaacagacaccattctaccatctcttttccgaagctgtgaaaatggcgggtcagagccgggaggactacatttatggatttcaattcaaggcttttcacttctacctgactcgggccctgcaactcctgcgaaaaccctgcgaggcctcaagcaagactgttgtgtacaggactagccaagggacgtcatttacatttggcgggttgtag

SEQ ID NO: 278279 - DNA, 609 bp, Artificial Sequence
  derived and/or modified sequence
atgaagacaggccacttcgagattgttacaatgcttctggccacaatgatattggtggacattttccaagtgaaggcagaagtcctggacatggctgacaatgcattcgatgatgaatacctaaaatgtactgatcggatggaaatcaagtacgtgcctcagctgctaaaggaggagaaagcctcgcatcagcagctggacactgtatgggaaaatgcaaaagccaagtgggcggctcgcaagactcagatctttctccctatgaactttaaagataaccacggcatagctttgatggcatacatctcggaggcccaagagcagaccccattttaccacctattctctgaagccgttaagatggctgggcagagtcgcgaggattacatctacggcttccagtttaaggcctttcacttctacctgactcgagctttacagctgttacggaagccttgtgaagcttcttctaaaacagttgtgtaccgaacatcccaggggacatcctttacattcggcggattgaaccaggccaggtttgggcactttacgctcgcctactcggcaaagccacaggcggcaaacgatcaactgacggtgctgtcttag

SEQ ID NO: 278280 - DNA, 324 bp, Artificial Sequence
  derived and/or modified sequence
atgaaaacgggccactttgaaattgttaccatgctgttggctaccatgatcctcgtagacatcttccaagttaaggccgaggtgctggatatggctgacaatgcattcgacgacgaatatctgaagtgcactgatcgcatggagataaaatacgtgcctcagctgctgaaggaggaaaaggctagccatcagcagctcgacacggtctgggagaatgctaaagcaaagtgggctgccagaaagacacagatatttctcccaatgaattttaaggacaaccacgggatcgcgcttatggcttacatttcagaggcccaggaatag

SEQ ID NO: 278281 - DNA, 545 bp, Artificial Sequence
  derived and/or modified sequence
aaatgctaatgtaaccccaaagaactttacaaagcggaattcttagttttcacaagtgtggcccagcctccctcttgaatctttttggttgtggaatcgaggtgttctgtttaattatccagtgtgactgactctgtggcagggacgaagagaaaaatgaagacgggacattttgaaatagtcaccatgctgctggcaaccatgattctagtggacattttccaggtgaaggctgaagtgttagacatggcagataatgcatttgatgatgaatacctgaaatgtacggacaggatggaaattaaatacgttccccaactgctaaaggaggaaaaagcaagccaccagcaattagatactgtgtgggaaaatgcaaaagccaaatgggcagcccgaaagactcaaatctttctccctatgaattttaaggataaccatggaatagccctgatggcatatatttccgaagctcaagagcaaactcccttttaccatctgttcagtgaagctgtgaagatggctggccaatctcgagaagattatat

SEQ ID NO: 278282 - DNA, 560 bp, Artificial Sequence
  derived and/or modified sequence
ttcttgttcccgccttcagaaagttataagagaaaaatgaagacgggacattttgaaatagtcaccatgctgctggcaaccatgattctagtggacattttccaggtgaaggctgaagtgttagacatggcagataatgcatttgatgatgaatacctgaaatgtacggacaggatggaaattaaatacgttccccaactgctaaaggaggaaaaagcaagccaccagcaattagatactgtgtgggaaaatgcaaaagccaaatgggcagcccgaaagactcaaatctttctccctatgaattttaaggataaccatggaatagccctgatggcatatatttccgaagctcaagagcaaactcccttttaccatctgttcagtgaagctgtgaagatggctggccaatctcgagaagattatatctatggcttccagttcaaagctttccacttttacctcacaagagccctgcagttgctgagaaaaccttgtgaggccagttccaaaactgtggtatatagaacaagccagggcacttcatttacatttggagggct

SEQ ID NO: 278283 - DNA, 801 bp, Artificial Sequence
  derived and/or modified sequence
gttgccgctgggtacgtttgctgccagtgctgatccagccggaggcgaagagaagcactttgggggcaaaagaatcttctgatggcatgctaacaattgtagatggcaactgtgttggaaactaggggatcccatctgagttggtcaaagtctgccaaaaagaaaaaagaaaaccaatatttaagagaagagaaaaatgaagacgggacattttgaaatagtcaccatgctgctggcaaccatgattctagtggacattttccaggtgaaggctgaagtgttagacatggcagataatgcatttgatgatgaatacctgaaatgtacggacaggatggaaattaaatacgttccccaactgctaaaggaggaaaaagcaagccaccagcaattagatactgtgtgggaaaatgcaaaagccaaatgggcagcccgaaagactcaaatctttctccctatgaattttaaggataaccatggaatagccctgatggcatatatttccgaagctcaagagcaaactcccttttaccatctgttcagtgaagctgtgaagatggctggccaatctcgagaagattatatctatggcttccagttcaaagctttccacttttacctcacaagagccctgcagttgctgagaaaaccttgtgaggccagttccaaaactgtggtatatagaacaagccagggcacttcatttacatttggagggctaaaccaagccaggtttggccattttaccttggcatattcagccaaacctcaggctgctaatgaccagctcactgtgttatc

SEQ ID NO: 278284 - DNA, 502 bp, Artificial Sequence
  derived and/or modified sequence
ttccagaaccttcttcagtgaggaggttatacccggaggtctcgacgctcgctcgtgctgctcgtgttgccgctgggtacgtttgctgccagtgctgatccagccggaggcgaagagaagcactttgggggcaaaaggccaaaaagaaaaaagaaaaccaatatttaagagaagagaaaaatgaagacgggacattttgaaatagtcaccatgctgctggcaaccatgattctagtggacattttccaggtgaaggctgaagtgttagacatggcagataatgcatttgatgatgaatacctgaaatgtacggacaggatggaaattaaatacgttccccaactgctaaaggaggaaaaagcaagccaccagcaattagatactgtgtgggaaaatgcaaaagccaaatgggcagcccgaaagactcaaatctttctccctatgaattttaaggataaccatggaatagccctgatggcatatatttccgaagctcaagagc

SEQ ID NO: 278285 - DNA, 390 bp, Artificial Sequence
  derived and/or modified sequence
atgaagacaggccactttgagatcgtgaccatgctgctggccaccatgatcctggtggacatcttccaggtgaaggccgaggtgctggacatggctgacaatgcctttgatgatgagtacctgaagtgcacagacaggatggagatcaagtatgtgccccagctgctgaaggaggagaaggccagccaccagcagctggacacagtgtgggagaatgccaaggccaagtgggccgccaggaagacccagatcttcctgcccatgaacttcaaggacaaccacggcatcgccctgatggcctacatcagcgaggcccaggagcagacccccttctaccacctgttcagcgaggccgtgaagatggccggccagagccgggaggactactag

SEQ ID NO: 278286 - DNA, 528 bp, Artificial Sequence
  derived and/or modified sequence
atgaagacaggccactttgagatcgtgaccatgctgctggccaccatgatcctggtggacatcttccaggtgaaggccgaggtgctggacatggctgacaatgcctttgatgatgagtacctgaagtgcacagacaggatggagatcaagtatgtgccccagctgctgaaggaggagaaggccagccaccagcagctggacacagtgtgggagaatgccaaggccaagtgggccgccaggaagacccagatcttcctgcccatgaacttcaaggacaaccacggcatcgccctgatggcctacatcagcgaggcccaggagcagacccccttctaccacctgttcagcgaggccgtgaagatggccggccagagccgggaggactacatctacggcttccagttcaaggccttccacttctacctgacccgggccctgcagctgctgaggaagccctgtgaggccagcagcaagacagtggtgtaccgcaccagccagggcaccagcttcaccttcggcggcctgtag

SEQ ID NO: 278287 - DNA, 609 bp, Artificial Sequence
  derived and/or modified sequence
atgaagacaggccactttgagatcgtgaccatgctgctggccaccatgatcctggtggacatcttccaggtgaaggccgaggtgctggacatggctgacaatgcctttgatgatgagtacctgaagtgcacagacaggatggagatcaagtatgtgccccagctgctgaaggaggagaaggccagccaccagcagctggacacagtgtgggagaatgccaaggccaagtgggccgccaggaagacccagatcttcctgcccatgaacttcaaggacaaccacggcatcgccctgatggcctacatcagcgaggcccaggagcagacccccttctaccacctgttcagcgaggccgtgaagatggccggccagagccgggaggactacatctacggcttccagttcaaggccttccacttctacctgacccgggccctgcagctgctgaggaagccctgtgaggccagcagcaagacagtggtgtaccgcaccagccagggcaccagcttcaccttcggcggcctgaaccaggcccgcttcggccacttcaccctggcctacagcgccaagccccaggccgccaatgaccagctgactgtgctgtcctag

SEQ ID NO: 278288 - DNA, 324 bp, Artificial Sequence
  derived and/or modified sequence
atgaagacaggccactttgagatcgtgaccatgctgctggccaccatgatcctggtggacatcttccaggtgaaggccgaggtgctggacatggctgacaatgcctttgatgatgagtacctgaagtgcacagacaggatggagatcaagtatgtgccccagctgctgaaggaggagaaggccagccaccagcagctggacacagtgtgggagaatgccaaggccaagtgggccgccaggaagacccagatcttcctgcccatgaacttcaaggacaaccacggcatcgccctgatggcctacatcagcgaggcccaggagtag

SEQ ID NO: 278289 - DNA, 390 bp, Artificial Sequence
  derived and/or modified sequence
atgaagaccggccacttcgagatcgtgaccatgctgctggccaccatgatcctggtcgacatcttccaggtgaaggctgaagtcctggacatggcagataatgctttcgacgacgagtatctcaagtgtacggaccgcatggagattaagtatgtccctcaactcctcaaagaagagaaggcatcgcatcagcaactggacactgtctgggagaacgcaaaggcaaagtgggcagccaggaagactcagattttcctgcccatgaactttaaggacaaccatggaatagcccttatggcctatatctccgaagcccaggagcagactcccttctaccaccttttctccgaggcagtaaaaatggcggggcagtctagggaggactactag

SEQ ID NO: 278290 - DNA, 528 bp, Artificial Sequence
  derived and/or modified sequence
atgaagaccggccacttcgagatcgtgaccatgctgctggccaccatgattcttgtcgacatcttccaggtgaaggccgaggttctcgacatggccgacaatgctttcgacgacgagtatttgaaatgcactgacaggatggagattaaatacgtgccgcagcttctgaaggaagaaaaggccagtcaccagcagcttgacacagtatgggaaaacgctaaagccaaatgggccgcccgcaaaactcaaatcttcctgcccatgaatttcaaagataatcacggcattgctctgatggcctacatttccgaggcccaggagcagacacctttctaccacctcttcagtgaggctgtgaaaatggccgggcagtcgcgcgaagactacatttacggcttccagtttaaggcatttcacttttacctgacgagagctctgcagcttctaaggaagccgtgcgaggcctcctccaagacagtcgtttaccggacttcccaaggcacgtcattcaccttcggaggactgtag

SEQ ID NO: 278291 - DNA, 609 bp, Artificial Sequence
  derived and/or modified sequence
atgaagaccggccacttcgagatcgtgaccatgctgctggccaccatgatcctggtagatattttccaagttaaggccgaagtgctggacatggccgataatgcgtttgatgacgagtacctgaagtgcacagatagaatggaaataaagtacgtgccgcagctgctgaaggaagaaaaggcctcccaccagcagctggacacagtgtgggaaaacgctaaggccaagtgggctgcaagaaagacccagatctttctgcccatgaatttcaaggacaatcatggcattgctcttatggcatatattagtgaggctcaggagcaaacccctttttaccatctttttagcgaggctgtgaagatggctgggcagtccagagaggattacatttacggattccagtttaaagcttttcatttctatctcactcgtgctctgcagctgttacggaaaccctgcgaggcaagctcgaaaacggtggtctatcgtacgagccaaggtacgtcttttacgttcggcggcctgaatcaagccagatttggccatttcactctagcatacagtgctaaacctcaggctgccaacgatcaactgacggtgctcagttag

SEQ ID NO: 278292 - DNA, 324 bp, Artificial Sequence
  derived and/or modified sequence
atgaagaccggccacttcgagatcgtgaccatgctgctggccaccatgattttggttgacatttttcaggtgaaagccgaggtgcttgatatggcagacaatgcctttgatgatgagtatctgaagtgcactgatcgcatggaaattaagtacgtgccccaattactgaaggaagagaaagcctcgcaccagcagctggacacagtatgggaaaatgctaaagcgaaatgggccgcacgtaagacccagatctttctgccaatgaacttcaaagacaatcatggcatcgcactcatggcttatatctccgaagctcaagaatag

SEQ ID NO: 278293 - DNA, 390 bp, Artificial Sequence
  derived and/or modified sequence
atgaagactgggcacttcgagattgtaacgatgctgctcgctaccatgattttggtagacatttttcaggtgaaggcagaggtcctcgacatggcagataatgcctttgacgatgagtacctgaagtgcaccgatcggatggaaatcaagtacgtcccacaattgctgaaagaggagaaagccagtcatcagcagctagacactgtctgggaaaacgcgaaagccaaatgggctgcacgcaagactcagatattcctaccaatgaatttcaaggataaccacggcatagccctgatggcctatattagcgaggcgcaggaacaaacccctttctatcatctttttagcgaggcggtgaagatggccggacagagccgcgaagactactag

SEQ ID NO: 278294 - DNA, 528 bp, Artificial Sequence
  derived and/or modified sequence
atgaaaactgggcacttcgagattgtcaccatgctcctcgccaccatgattctggtcgacatcttccaggttaaggcagaagtcctcgacatggctgataacgccttcgatgacgaatacctgaaatgtacagacagaatggaaatcaagtacgtgccccagcttctgaaagaggagaaggcctctcaccaacagctggatactgtgtgggaaaatgcaaaagcaaaatgggccgcacggaaaacccagatctttctccccatgaatttcaaagacaaccacgggattgccttgatggcctacataagcgaggcacaggaacagactccgttttaccacttgttctcagaggccgtgaagatggctgggcagtctagagaagattatatttacggattccagttcaaggctttccatttctatcttactagggctctacaactcctacggaagccatgcgaggcaagttctaagaccgtcgtgtatcgaacatctcaaggtacgagcttcactttcggcggtctgtag

SEQ ID NO: 278295 - DNA, 609 bp, Artificial Sequence
  derived and/or modified sequence
atgaagaccgggcatttcgaaatagtgaccatgctgctcgcgacaatgattctggtcgatatattccaggtgaaagccgaggttttggacatggcagataatgcttttgacgacgagtacttaaaatgtacagacagaatggaaatcaaatacgttcctcaactcctgaaggaggagaaggcctcacatcagcagctggatacagtctgggagaacgcaaaggccaagtgggccgctaggaaaacccagatttttctccccatgaacttcaaagacaaccatgggattgctctgatggcttacataagcgaggctcaagagcagacccccttctatcacctcttttccgaggccgtaaaaatggccggtcagtcccgcgaagactacatatatggctttcaatttaaggcctttcatttctatctgactcgcgcactacagctgttgcgcaaaccttgcgaggctagctctaaaacagtggtctatcgcacttcgcaggggacaagcttcacattcgggggactgaaccaagccaggttcggtcatttcactttggcctatagtgctaaacctcaagccgcaaacgaccagttgacggttctcagctag

SEQ ID NO: 278296 - DNA, 324 bp, Artificial Sequence
  derived and/or modified sequence
atgaagacaggccacttcgagattgtcaccatgctgctggccaccatgatcctagtcgatatcttccaggtcaaagccgaggtcctcgacatggccgataatgcctttgatgatgagtacctgaagtgcactgaccggatggagatcaagtacgtgccacagctgcttaaggaagagaaagcatcacatcaacagctcgataccgtttgggaaaatgcgaaggccaagtgggccgctcgcaagactcaaattttcctgcctatgaatttcaaggacaaccatggtattgctctcatggcttacattagcgaggcccaggagtag

SEQ ID NO: 278297 - DNA, 390 bp, Artificial Sequence
  derived and/or modified sequence
atgaagaccggccacttcgagatcgtgaccatgctgctggccaccatgatcctggtggacatcttccaggtgaaggccgaggtgctggacatggccgacaacgccttcgacgacgagtacctgaagtgcaccgacagaatggagatcaagtacgtgccccagctgctgaaggaggagaaggccagccaccagcagctggacaccgtgtgggagaacgccaaggccaagtgggccgccagaaagacccagatcttcctgcccatgaacttcaaggacaaccacggcatcgccctgatggcctacatcagcgaggcccaggagcagacccccttctaccacctgttcagcgaggccgtgaagatggccggccagagcagagaggactactag

SEQ ID NO: 278298 - DNA, 528 bp, Artificial Sequence
  derived and/or modified sequence
atgaagaccggccacttcgagatcgtgaccatgctgctggccaccatgatcctggtggacatcttccaggtgaaggccgaggtgctggacatggccgacaacgccttcgacgacgagtacctgaagtgcaccgacagaatggagatcaagtacgtgccccagctgctgaaggaggagaaggccagccaccagcagctggacaccgtgtgggagaacgccaaggccaagtgggccgccagaaagacccagatcttcctgcccatgaacttcaaggacaaccacggcatcgccctgatggcctacatcagcgaggcccaggagcagacccccttctaccacctgttcagcgaggccgtgaagatggccggccagagcagagaggactacatctacggcttccagttcaaggccttccacttctacctgaccagagccctgcagctgctgagaaagccctgcgaggccagcagcaagaccgtggtgtacagaaccagccagggcaccagcttcaccttcggcggcctgtag

SEQ ID NO: 278299 - DNA, 609 bp, Artificial Sequence
  derived and/or modified sequence
atgaagaccggccacttcgagatcgtgaccatgctgctggccaccatgatcctggtggacatcttccaggtgaaggccgaggtgctggacatggccgacaacgccttcgacgacgagtacctgaagtgcaccgacagaatggagatcaagtacgtgccccagctgctgaaggaggagaaggccagccaccagcagctggacaccgtgtgggagaacgccaaggccaagtgggccgccagaaagacccagatcttcctgcccatgaacttcaaggacaaccacggcatcgccctgatggcctacatcagcgaggcccaggagcagacccccttctaccacctgttcagcgaggccgtgaagatggccggccagagcagagaggactacatctacggcttccagttcaaggccttccacttctacctgaccagagccctgcagctgctgagaaagccctgcgaggccagcagcaagaccgtggtgtacagaaccagccagggcaccagcttcaccttcggcggcctgaaccaggccagattcggccacttcaccctggcctacagcgccaagccccaggccgccaacgaccagctgaccgtgctgagctag

SEQ ID NO: 278300 - DNA, 324 bp, Artificial Sequence
  derived and/or modified sequence
atgaagaccggccacttcgagatcgtgaccatgctgctggccaccatgatcctggtggacatcttccaggtgaaggccgaggtgctggacatggccgacaacgccttcgacgacgagtacctgaagtgcaccgacagaatggagatcaagtacgtgccccagctgctgaaggaggagaaggccagccaccagcagctggacaccgtgtgggagaacgccaaggccaagtgggccgccagaaagacccagatcttcctgcccatgaacttcaaggacaaccacggcatcgccctgatggcctacatcagcgaggcccaggagtag

SEQ ID NO: 278301 - protein, 406 aa, Artificial Sequence
  derived and/or modified sequence
MAFTERVNSSGNSLYNDDRNLLRIREKERRNQEAHQEKEAFPEKIPLFGEPYKTAKGDELSSRIQNMLGNYEEVKEFLSTKSHTHRLDASENRLGKPKYPLIPDKGSSIPSSSFHTSVHHQSIHTPASGPLSVGNISHNPKMAQPRTEPMPSLHAKSCGPPDSQHLTQDRLGQEGFGSSHHKKGDRRADGDHCASVTDSAPERELSPLISLPSPVPPLSPIHSNQQTLPRTQGSSKVHGSSNNSKGYCPAKSPKDLAVKVHDKETPQDSLVAPAQPPSQTFPPPSLPSKSVAMQQKPTAYVRPMDGQDQAPSESPELKPLPEDYRQQTFEKTDLKVPAKAKLTKLKMPSQSVETYSNEVHCVEEILKEMTHSWPPPLTAIHTPSTAEPSKFPFPTKDSQHVSSVTQ

SEQ ID NO: 278302 - protein, 490 aa, Artificial Sequence
  derived and/or modified sequence
MPSQSVEQTYSNEVHCVEEILKEMTHSWPPPLTAIHTPSTAEPSKFPFPTKDSQHVSSVTQNQKQYDTSSKTHSNSQQGTSSMLEDDLQLSDSEDSDSEQTPEKPPHLHLQVLHSPFQNQWHQHIPAVQSQKAPVTQTVPQTQRARAVQDSEENEPLETPAPEPEPPTTNKWQLDNWLTKVSQPAAPPEGPRSTEPPRRHPESKGSSDSATSQEHSESKDPPPKSSSKAPRAPPEAPHPGKRSCQKSPAQQEPPQRQTVGTKQPKKPVKASARAGSRTSLQGEREPGLLPYGSRDQTSKDKPKVKTKGRPRAAASNEPKPAVPPSSEKKKHKSSLPAPSKALSGPEPAKDNVEDRTPEHFALVPLTESQGPPHSGSGSRTSGCRQAVVVQEDSRKDRLPLPLRDTKLLSPLRDTPPPQSLMVKITLDLLSRIPQPPGKGSRQRKAEDKQPPAGKKHSSEKRSSDSSSKLAKKRKGEAERDCDNKKIRLEK

SEQ ID NO: 278303 - DNA, 1266 bp, Artificial Sequence
  derived and/or modified sequence
atggcctttaccgagcgggtcaattcctccgggaattctttatataatgacgatcgaaatctcctgcgtatacgtgagaaggagcgccggaaccaggaagctcatcaggagaaagaggccttccccgagaagattcctcttttcggagaaccctataaaacagccaaaggtgatgagttgtcgagtaggattcagaatatgctgggaaactatgaagaagtgaaagaatttctttcgacaaaatctcacacccatcgtttagacgcttctgagaataggttggggaaacccaagtatccactgatccctgataaaggtagctctattccttcaagctcatttcacacttccgtccaccatcagagtattcacacgcccgcctctggcccacttagtgtaggcaacatctcacacaatcctaaaatggcgcagcctcggaccgaacctatgccaagtttgcatgccaaatcatgcggccctcctgactcacagcacttgacccaagatcggttaggccaggagggcttcggcagttctcaccataaaaaaggcgacagaagggctgacggcgaccactgtgcctcggttacagactccgcgcccgagcgcgaactctcccccctgatctcacttccatctcccgtccccccattgtccccaatccactcaaatcagcagaccctcccccgcacccagggatcaagtaaagtgcatggttctagcaacaattccaagggctattgcccagctaaatcacccaaagatcttgccgtcaaagttcatgacaaagagactccccaggatagtctggtggccccagcccaaccgccaagtcagactttccccccgccgagcctcccgagcaaatccgtggccatgcagcagaagcctacagcttacgtccggcccatggacggacaggatcaggcaccttccgaaagcccagaactcaaaccacttccagaggattacagacagcagacttttgaaaagaccgacctcaaagtccccgcaaaagccaaactgacaaagcttaaaatgccttctcagagcgtggaacagacatactcaaacgaagtgcactgtgtggaagaaatcctcaaggactctcagcacgtgtcttccgtaacacagaatcagaaacagtatgatacctctagcaaaactcattccaattctcaacaggggacctcttcaatgctcgaggacgatctccaacttagcgattccgaggacagtgacagcgagcagacacctgcaccatag

SEQ ID NO: 278304 - DNA, 1221 bp, Artificial Sequence
  derived and/or modified sequence
atggcattcaccgaacgggttaatagtagcggtaatagtctctataacgacgatcggaatctactgcggattagagagaaggagagacgcaaccaggaggcacaccaggagaaggaggcctttccagagaagatccccctgttcggggagccctataagaccgcaaagggcgatgagctgtcaagtagaattcagaatatgttaggtaattacgaagaggttaaagaattcctgagtaccaagtctcatacccaccggttggatgcctccgaaaaccgattggggaagccaaagtaccctctcatcccggacaaaggaagtagcattcctagctcttcattccatacttctgtgcaccaccagtctatacacacacccgcctcaggtcctctgtcagtcgggaatatctcccataaccccaagatggctcagcccaggactgaaccaatgcccagcctgcatgctaaaagttgcggcccaccagattcacagcacttgactcaggatcgcctgggccaggagggattcggttcatctcatcataaaaagggggataggcgcgctgacggagatcattgtgcctcagtgaccgactctgcccccgagcgggaacttagccccttaatcagtttgccttcccccgtgcccccactctcccccatacactctaaccagcagaccctgccaagaactcaaggcagcagcaaggtacatggcagttctaacaacagcaagggttactgcccagctaagtccccaaaagacctggctgtgaaggttcatgacaaagaaactccccaggacagtcttgtggcgcccgcacagcccccgtcacagacatttcctccaccctcactaccctctaagagcgttgctatgcagcagaagcctacagcgtacgtgaggcctatggacggacaggaccaggccccttccgaaagtccagaactgaaacctttgcctgaggactacaggcagcaaactttcgaaaagactgatctaaaagtacctgcaaaagccaaattgacaaagctgaagatgccctctcaatccgtagaaacctacagtaatgaagtccattgtgtcgaggaaatacttaaagagatgactcactcatggccaccacccctcaccgcgatccatactccctctacggccgaacctagcaagtttcctttccccaccaaggattcacagcacgtttcaagtgtgactcaatag

SEQ ID NO: 278305 - DNA, 1473 bp, Artificial Sequence
  derived and/or modified sequence
atgccaagtcagtcagtagagcaaacctactcaaatgaagtccattgcgtggaggaaattcttaaggaaatgacgcacagctggccccctccgctcacagccattcatacaccctctacagccgagccctccaagtttcctttccccactaaagattcacagcatgtgagctccgtgacgcaaaaccagaagcagtacgacaccagcagtaagacccactcgaactcccagcaggggaccagttctatgttagaagacgacctccagctgtccgattcagaagattccgacagcgaacagactccagagaaaccaccgcatctgcaccttcaggtactgcatagcccttttcagaaccagtggcaccagcacatccccgcggttcaaagtcagaaggcccctgtgactcaaacggtgccacagacgcaaagagcccgggcggtgcaggacagcgaagaaaatgagcccctcgagacacccgctcctgagccagaaccaccaactactaataagtggcagctagataattggctcacaaaagtgagccaacctgcagcaccacccgaaggcccgcgatccactgaaccacccagacggcacccagaaagtaagggaagcagtgattctgccactagccaggagcattccgaaagtaaggaccccccgccaaagtcgagctcaaaggcaccaagggcaccccccgaggcgccgcatcccgggaaacgatcctgccaaaaaagccctgcacagcaggagccgccgcagagacagacggtaggcacaaagcaacctaaaaaaccggttaaagcctccgctcgggctggtagtcgaacttcactgcagggggaacgggaacccgggctcctgccatacgggtcaagggatcagactagcaaggacaagcccaaggttaagacaaagggaagaccacgggcggctgcgtcaaatgagcccaagcctgcagtgccaccttcaagcgaaaagaagaagcacaaatctagcctgccagctccctccaaagcactgagtggcccagagccagccaaggataacgtggaggataggaccccggagcatttcgctttggtaccactgacagagtctcagggccccccccacagtgggtccggcagccgcacatccggttgccggcaagcggtggtggtccaggaagacagcaggaaggatagacttccactccccctgagggataccaagctgctcagcccccttagggataccccaccgcctcagtctttgatggttaaaatcacattggacctccttagccgcatcccacagcctccaggaaagggctctaggcaacggaaggcagaggacaaacagccgcctgcagggaaaaaacatagttccgagaaaaggtctagcgattcgtcctccaaattggccaaaaaaaggaaaggcgaggctgaacgcgactgtgataacaagaagattagactcgagaaatag

SEQ ID NO: 278306 - DNA, 1266 bp, Artificial Sequence
  derived and/or modified sequence
atggccttcacagagcgggtgaacagcagcggcaacagcctgtacaatgatgacaggaacctgctgcgcatccgggagaaggagaggaggaaccaggaggcccaccaggagaaggaggccttccctgagaagatccccctgtttggagagccctacaagacagccaagggagatgagctgagcagccgcatccagaacatgctgggcaactatgaggaggtgaaggagttcctgagcaccaagagccacacccaccggctggatgcctctgaaaatcggctgggcaagcccaagtaccccctcatcccagacaagggcagcagcatccccagcagcagcttccacacctctgtgcaccaccagagcatccacaccccagccagcggccccctgtctgtgggcaacatcagccacaaccccaagatggcccagcccaggacagagcccatgcccagcctgcacgccaagagctgtggccccccagacagccagcacctgacccaggaccggctgggccaggagggcttcggcagcagccaccacaagaagggggaccggcgggcagatggagaccactgtgcctctgtgacagattctgcccctgagcgggagctgagccccctcatcagcctgcccagccctgtgccccccctgagccccatccacagcaaccagcagaccctgcccaggacccagggcagcagcaaggtgcacggcagcagcaacaacagcaagggctactgcccagccaagagccccaaggacctggccgtgaaggtgcatgacaaggagaccccccaggacagcctggtggccccagcccagccccccagccagaccttccccccacccagcctgcccagcaagtctgtggccatgcagcagaagcccacagcctacgtgcggcccatggatggccaggaccaggcccccagcgagagccctgagctgaagcccctgcctgaggactaccggcagcagacctttgagaagacagacctgaaggtgcctgccaaggccaagctgaccaagctgaagatgcccagccagagcgtggagcagacctacagcaatgaggtgcactgtgtggaggagatcctgaaggacagccagcacgtgtcctctgtgacccagaaccagaagcagtatgacaccagcagcaagacccacagcaacagccagcagggcaccagctccatgctggaggatgacctgcagctgagtgacagtgaagattctgattctgagcagaccccagccccctag

SEQ ID NO: 278307 - DNA, 1221 bp, Artificial Sequence
  derived and/or modified sequence
atggccttcacagagcgggtgaacagcagcggcaacagcctgtacaatgatgacaggaacctgctgcgcatccgggagaaggagaggaggaaccaggaggcccaccaggagaaggaggccttccctgagaagatccccctgtttggagagccctacaagacagccaagggagatgagctgagcagccgcatccagaacatgctgggcaactatgaggaggtgaaggagttcctgagcaccaagagccacacccaccggctggatgcctctgaaaatcggctgggcaagcccaagtaccccctcatcccagacaagggcagcagcatccccagcagcagcttccacacctctgtgcaccaccagagcatccacaccccagccagcggccccctgtctgtgggcaacatcagccacaaccccaagatggcccagcccaggacagagcccatgcccagcctgcacgccaagagctgtggccccccagacagccagcacctgacccaggaccggctgggccaggagggcttcggcagcagccaccacaagaagggggaccggcgggcagatggagaccactgtgcctctgtgacagattctgcccctgagcgggagctgagccccctcatcagcctgcccagccctgtgccccccctgagccccatccacagcaaccagcagaccctgcccaggacccagggcagcagcaaggtgcacggcagcagcaacaacagcaagggctactgcccagccaagagccccaaggacctggccgtgaaggtgcatgacaaggagaccccccaggacagcctggtggccccagcccagccccccagccagaccttccccccacccagcctgcccagcaagtctgtggccatgcagcagaagcccacagcctacgtgcggcccatggatggccaggaccaggcccccagcgagagccctgagctgaagcccctgcctgaggactaccggcagcagacctttgagaagacagacctgaaggtgcctgccaaggccaagctgaccaagctgaagatgcccagccagagcgtggagacctacagcaatgaggtgcactgtgtggaggagatcctgaaggagatgacccacagctggcccccacccctgacagccatccacacccccagcacagctgagcccagcaagttccccttccccaccaaggacagccagcacgtgtcctctgtgacccagtag

SEQ ID NO: 278308 - DNA, 1473 bp, Artificial Sequence
  derived and/or modified sequence
atgcccagccagagcgtggagcagacctacagcaatgaggtgcactgtgtggaggagatcctgaaggagatgacccacagctggcccccacccctgacagccatccacacccccagcacagctgagcccagcaagttccccttccccaccaaggacagccagcacgtgtcctctgtgacccagaaccagaagcagtatgacaccagcagcaagacccacagcaacagccagcagggcaccagctccatgctggaggatgacctgcagctgagtgacagcgaggacagcgacagcgagcagaccccagagaagccaccccacctgcacctgcaggtgctgcacagccccttccagaaccagtggcaccagcacatcccagctgtgcagagccagaaggcccctgtgacccagacagtgccccagacccagagggcccgggctgtgcaggacagtgaagaaaatgagcccctggagaccccagcccctgagcctgagccccccaccaccaacaagtggcagctggacaactggctgaccaaggtgtcccagcctgctgcccctcctgagggccccaggagcacagagcccccccggcggcaccctgagagcaagggcagcagtgacagcgccaccagccaggagcacagcgagagcaaggaccccccacccaagagcagcagcaaggccccccgggcccctcctgaggccccccaccctgggaagaggagctgccagaagagccctgcccagcaggagcccccccagaggcagacagtgggcaccaagcagcccaagaagcctgtgaaggccagcgcccgggccggcagcaggaccagcctgcagggcgagcgggagcccggcctgctgccctacggcagccgggaccagaccagcaaggacaagcccaaggtgaagaccaagggccggcccagggctgctgccagcaatgagcccaagccagctgtgccccccagcagcgagaagaagaagcacaagagcagcctgcctgcccccagcaaggccctgagcggccctgagcccgccaaggacaacgtggaggacaggaccccagagcactttgccctggtgcccctgacagagagccagggccccccccacagcggcagcggcagcaggaccagcggctgccggcaggccgtggtggtgcaggaggacagcaggaaggaccggctgcccctgcccctgcgggacaccaagctgctgagccccctgcgggacaccccaccaccccagagcctgatggtgaagatcaccctggacctgctgagccgcatcccccagcccccaggcaagggcagccggcagaggaaggccgaggacaagcagcccccagctgggaagaagcacagcagcgagaagaggagcagtgacagcagcagcaagctggccaagaagaggaagggggaggccgagcgggactgtgacaacaagaagatccggctggagaagtag

SEQ ID NO: 278309 - DNA, 1266 bp, Artificial Sequence
  derived and/or modified sequence
atggccttcaccgagcgggtgaacagcagcggcaacagcctgtacaatgacgacagaaatttgctgaggatacgggagaaggagaggaggaatcaggaggcacatcaggagaaggaggccttccccgaaaaaatccctcttttcggtgaaccatacaagaccgcgaagggagatgaattatccagccggattcagaatatgcttggaaactacgaagaggtgaaggagttcctgtcgacaaagtctcatacacatcgacttgacgcctctgaaaataggctcgggaagccaaagtatccgctgattccggataaaggttcctctatcccctcgagctcattccatacaagcgtgcaccatcagtctattcacacacccgcaagtggccccctctccgtaggcaacataagccacaaccccaaaatggctcagccacgtactgagcctatgccttccttgcatgccaaaagctgcgggcctcccgactcccagcatctcacccaggaccgtttaggacaggaagggttcggatctagccaccacaaaaaaggtgacaggcgggcagacggagaccattgtgcatccgttaccgactcggcccctgaaagagagttatcccctctcatcagtttgccgtcgcccgtgccgcccttatccccaattcactctaaccaacagacccttcccagaactcaagggtcttcaaaggttcatggctcaagcaacaacagcaaaggttattgtccggctaagtcacccaaagaccttgccgtcaaggtgcacgataaggagaccccgcaggactctctggtggcgcccgcccagcctccaagccagacttttcctcctccctctttaccttcaaagagtgtcgcaatgcaacagaagccaacagcttatgtgagacccatggatggacaggaccaggcaccatcagaaagtcctgaactgaagccccttccagaagattacagacagcaaacatttgaaaagacagatctaaaggtcccagccaaggccaagctgaccaagctgaaaatgccctcccaaagcgtagaacagacctactcaaatgaggtacattgcgtcgaagaaatcctgaaagactcacagcatgtgtcctccgtgactcagaatcagaagcagtacgacacgtcgtctaaaacccacagcaatagccagcagggtacctcttcaatgctggaggatgacctgcagctcagtgattccgaggacagcgacagtgaacagacccccgccccttag

SEQ ID NO: 278310 - DNA, 1221 bp, Artificial Sequence
  derived and/or modified sequence
atggccttcaccgagcgggtgaacagcagcggcaacagcctgtacaatgacgacagaaatctactccggatccgagaaaaagagcgcagaaatcaggaggcgcatcaggagaaggaagctttcccagaaaagatcccactgtttggggagccctacaaaacggcaaagggtgacgaacttagttcaagaatccagaatatgctcggaaactacgaggaagtgaaagaattcctctctaccaaatcccacactcataggttggacgcgtctgaaaatagactcggcaaacctaagtaccccctgatccccgataagggctcctcaataccatctagctcattccatacctccgtacatcaccagtctatccacacccctgccagcggcccactgtctgtgggcaacatcagccacaaccctaagatggctcagccacggaccgagccgatgccgtctctgcacgcgaagtcctgcggaccgcctgattcccagcacctgacacaggaccgcctgggacaggaagggtttggaagctcacatcataagaaaggcgatcgacgcgccgacggagatcactgtgcaagtgtgacggacagtgctccagagcgcgagctctctccgcttatcagtctaccatcgcctgttcctcctttgtccccgattcattccaaccagcagaccctccccaggacccagggtagctctaaggtgcatggcagctccaacaactctaagggctactgccccgccaagagcccaaaggatctcgccgtgaaggtgcacgacaaagaaacccctcaggattccctcgtggcacctgcccagccaccttcccagacattcccccctccctctctcccatcaaagtcagtggccatgcagcagaagcctactgcctatgtgcggcccatggacggacaggaccaggcgcccagcgagtctcctgagctgaagccactgccggaagactatcgacagcagaccttcgagaagactgacctgaaggttcctgccaaagcgaagcttacgaagctcaagatgccgtcccaatcagtagagacctacagtaacgaggtgcactgtgtggaagagattctaaaggagatgacgcactcctggcccccaccgctgaccgccatacacaccccctccacggctgagccttcgaaatttcccttccccactaaagatagtcaacacgttagtagcgtgactcaatag

SEQ ID NO: 278311 - DNA, 1473 bp, Artificial Sequence
  derived and/or modified sequence
atgcccagccagagcgtggagcagacctacagcaacgaggtgcactgtgtggaggagattttgaaggaaatgactcacagctggcccccccccctgactgctattcacacgccaagcaccgccgagccctctaagtttccgttccccactaaggactcccagcacgtgagctcagtcactcaaaatcagaaacagtacgacactagttccaagacacatagtaacagtcagcagggaacatcaagtatgctggaagatgatctgcaattgtccgattctgaggacagcgattcagaacagacaccagaaaagcctccccatctccacctgcaagtattgcacagcccctttcagaatcagtggcaccagcatatacccgctgttcagtcacagaaagcccccgtcacgcagacagtgccacagactcagcgcgcacgcgccgtccaagattccgaagagaacgaacctctcgagactccagcacctgagcctgaaccgcccaccaccaataagtggcaactggataattggctgacgaaagtgagtcagcccgccgcgcctcccgagggcccgcgcagcaccgaacctcccaggcggcacccagagagcaagggttcatcagattctgcaacatctcaggagcattccgagtccaaagatcctccgcccaagagttctagtaaggcccctagggcacctcccgaagctccccatccaggaaaaaggagttgtcaaaaatccccagcccagcaggagcctccacagcgacaaacagtgggaactaaacagccaaagaagccggtcaaagctagtgcgcgcgccggcagtcgcacgtcccttcagggcgaaagagagcctggattgctgccttacggcagtagagatcagacttccaaggataagccaaaggtgaaaaccaaagggcggcctcgagccgctgcttctaacgaaccaaaaccggcagttcctccatcctcagagaagaagaagcacaaaagcagtttgccagccccatcgaaggcgctgtccggtccagaaccagccaaagacaacgtggaggatcggacccccgagcacttcgctctggttcccctgacggaaagtcaggggccaccccactccggaagcggatctagaaccagcggatgtcgccaagctgtagtggttcaggaagattcccgaaaggatcggctcccccttcctcttcgggacactaaattattgtcacccctgcgcgatacgcctcccccccagtctcttatggtgaagattacgctcgacctgctgtccaggataccccagccacctgggaagggaagtcgtcagcgtaaggccgaggacaagcaacccccggccgggaaaaagcactcctccgagaagaggagcagcgattcttccagtaagctagctaagaagaggaaaggtgaagccgagcgcgactgtgacaataaaaagataagacttgagaaatag

SEQ ID NO: 278312 - DNA, 1538 bp, Artificial Sequence
  derived and/or modified sequence
gagcttgccagccagctagcgagcgacgggcgcgcgcggcccctgcgcactcggccgccgcctgcgcgcgttgcggccgcagctgcacctttgcctccgcggttccgcagccgagccccgggaggaggcgctcccctgcgtcgtccgcacttgcgccctttcccaccgcaacaggtcaggggagggcggaggtgacgagggcgcccgacccgggactagaggacggaagggtctggaagatgaacagactagccactttgcattgactggaaacaatggcatttacagaaagagtcaacagcagtggcaacagtttgtacaatgacgacagaaacctgcttcgaattagagagaaggaaagacgcaaccaggaagcccaccaagagaaagaggcatttcctgaaaagattcccctttttggagagccctacaagacagcaaaaggtgatgagctgtctagtcgaatacagaacatgttgggaaactacgaagaagtgaaggagttccttagtactaagtctcacactcatcgcctggatgcttctgaaaataggttgggaaagccgaaatatcctttaattcctgacaaagggagcagcattccatccagctccttccacactagtgtccaccaccagtccattcacactcctgcgtctggaccactttctgttggcaacattagccacaatccaaagatggcgcagccaagaactgaaccaatgccaagtctccatgccaaaagctgcggcccaccggacagccagcacctgacccaggatcgccttggtcaggaggggttcggctctagtcatcacaagaaaggtgaccgaagagctgacggagaccactgtgcttcggtgacagattcggctccagagagggagctttctcccttaatctctttgccttccccagttccccctttgtcacctatacattccaaccagcaaactcttccccggacgcaaggaagcagcaaggttcatggcagcagcaataacagtaaaggctattgcccagccaaatctcccaaggacctagcagtgaaagtccatgataaagagacccctcaagacagtttggtggcccctgcccagccgccttctcagacatttccacctccctccctcccctcaaaaagtgttgcaatgcagcagaagcccacggcttatgtccggcccatggatggtcaagatcaggcccctagtgaatcccctgaactgaaaccactgccggaggactatcgacagcagacctttgaaaaaacagacttgaaagtgcctgccaaagccaagctcaccaaactgaagatgccttctcagtcagttgagcagacctactccaatgaagtccattgtgttgaagagattctgaaggactctcagcatgtcagttctgtaacccaaaaccaaaaacaatatgatacatcttcaaaaactcactcaaattctcagcaaggaacgtcatccatgctcgaagacgaccttcagctcagtgacagtgaggacagtgacagtgaacaaaccccagctccg

SEQ ID NO: 278313 - DNA, 1486 bp, Artificial Sequence
  derived and/or modified sequence
agccagctagcgagcgacgggcgcgcgcggcccctgcgcactcggccgccgcctgcgcgcgttgcggccgcagctgcacctttgcctccgcggttccgcagccgagccccgggaggaggcgctcccctgcgtcgtccgcacttgcgccctttcccaccgcaacaggtcaggggagggcggaggtgacgagggcgcccgacccgggactagaggacggaagggtctggaagatgaacagactagccactttgcattgactggaaacaatggcatttacagaaagagtcaacagcagtggcaacagtttgtacaatgacgacagaaacctgcttcgaattagagagaaggaaagacgcaaccaggaagcccaccaagagaaagaggcatttcctgaaaagattcccctttttggagagccctacaagacagcaaaaggtgatgagctgtctagtcgaatacagaacatgttgggaaactacgaagaagtgaaggagttccttagtactaagtctcacactcatcgcctggatgcttctgaaaataggttgggaaagccgaaatatcctttaattcctgacaaagggagcagcattccatccagctccttccacactagtgtccaccaccagtccattcacactcctgcgtctggaccactttctgttggcaacattagccacaatccaaagatggcgcagccaagaactgaaccaatgccaagtctccatgccaaaagctgcggcccaccggacagccagcacctgacccaggatcgccttggtcaggaggggttcggctctagtcatcacaagaaaggtgaccgaagagctgacggagaccactgtgcttcggtgacagattcggctccagagagggagctttctcccttaatctctttgccttccccagttccccctttgtcacctatacattccaaccagcaaactcttccccggacgcaaggaagcagcaaggttcatggcagcagcaataacagtaaaggctattgcccagccaaatctcccaaggacctagcagtgaaagtccatgataaagagacccctcaagacagtttggtggcccctgcccagccgccttctcagacatttccacctccctccctcccctcaaaaagtgttgcaatgcagcagaagcccacggcttatgtccggcccatggatggtcaagatcaggcccctagtgaatcccctgaactgaaaccactgccggaggactatcgacagcagacctttgaaaaaacagacttgaaagtgcctgccaaagccaagctcaccaaactgaagatgccttctcagtcagttgagacctactccaatgaagtccattgtgttgaagagattctgaaggaaatgacccattcatggccgcctcctttgacagcaatacatacgcctagtacagctgagccatccaagtttcctttccctacaaaggactctcagcatgtcagttctgtaacccaaaa

SEQ ID NO: 278314 - DNA, 1266 bp, Artificial Sequence
  derived and/or modified sequence
atggcctttacagaacgggtcaacagctcagggaatagcctgtataacgacgatcggaaccttttgagaattcgggagaaagagagacgtaatcaggaggctcaccaggaaaaagaagcgtttccagagaagatccctctctttggcgaaccttacaagaccgcaaagggcgatgaactaagcagcagaatccagaatatgttaggtaactacgaggaggttaaagagtttctgagcacgaagagccacacacacagactggacgccagcgagaaccgcctgggaaagcctaaataccccctaatcccggataaggggagctccatcccttcttcctctttccacacatctgttcaccaccaatcgatccatacccccgctagtggaccactcagcgtcggaaatatcagtcataatcccaaaatggcccagccacgcacggagccaatgccctcactgcacgctaagagttgtggacccccagattctcagcatctcacacaggaccggctggggcaagaaggttttgggagcagccatcataaaaagggcgatcgcagggctgacggggaccactgcgcaagcgtgaccgattcggcccctgagagggaactgagtcccttgataagcctaccctcccctgttcccccactgtcccctattcatagcaaccagcagactcttcctagaactcaagggagttccaaggtgcacggaagcagtaataacagcaaggggtattgtccagctaaaagcccgaaggaccttgcagttaaagttcatgataaggaaaccccccaggactccctcgtcgcgcctgcacagcctccgtcgcaaacgtttcccccacctagcctacccagcaagtcggtcgcaatgcagcagaagccaaccgcatatgtcaggccgatggacggacaggaccaggcaccctccgagagtccagagctaaaacccttacctgaggattatcgccagcaaactttcgagaagacagatttaaaagtgccggcaaaggctaaactgaccaaactgaagatgccttctcagtctgtggagcagacctactccaacgaagtgcactgcgtggaggaaattttgaaagacagccagcatgtctccagcgtgacacaaaatcagaagcagtacgatacctctagtaagactcatagcaattcccaacaaggcacaagttccatgctggaagacgatctgcagctgtctgactcagaagactcagattccgaacagacacctgcgccttag

SEQ ID NO: 278315 - DNA, 1221 bp, Artificial Sequence
  derived and/or modified sequence
atggcgttcacagagagagtgaatagctcaggtaattctctctacaatgatgaccgcaacttgctgcgcattcgggagaaggagcgacggaatcaagaagcccaccaagagaaagaagcatttccggagaaaattccgctgttcggcgagccttacaagacggccaaaggagatgaattgtctagcagaattcagaatatgcttggtaactacgaggaggtaaaagagttcctttcaactaaatctcatactcatcgtctggatgctagcgaaaaccggcttggtaagccaaaataccctctgattccagacaaggggagctcgatcccgtcctcttcctttcacacttccgtgcaccatcaaagtatccatactcctgcatcagggccactctcagtaggcaatatctctcacaatcccaaaatggctcagcctcgcacagaaccaatgccctctctccacgccaagagttgtggccctccggactctcaacatctcacacaggatcgtctgggtcaggaagggttcggcagctcacatcacaagaagggagaccgcagggcagatggagatcactgcgccagcgtcactgactcagctcctgaaagagagctttccccactcatatctctgccgtcaccagtgccgcctctgtccccaatccactcaaaccaacagacactaccgaggacccagggcagtagcaaggtccatggttctagcaataattcaaagggctactgccctgccaaaagtccgaaggatcttgctgttaaagtgcatgacaaggaaacaccgcaggatagcctagtcgcaccagcccagcccccatcccaaacgtttccccctcctagtctcccctcgaaatccgttgctatgcagcagaagcctaccgcctatgtgcgcccaatggatgggcaggatcaggccccttccgagtcacccgagctgaaacctctaccagaggattataggcagcagacattcgaaaaaaccgatctaaaggtccctgccaaggctaagctcacaaaactcaagatgccgtcccaatccgtggaaacctacagcaatgaagtccactgcgttgaagagattttaaaggagatgacgcactcttggcctcctcccctcaccgctattcacacccctagcacggcagagccttccaaatttccctttcccaccaaagattctcagcacgtaagttctgtgactcagtag

SEQ ID NO: 278316 - DNA, 1473 bp, Artificial Sequence
  derived and/or modified sequence
atgcccagccagagcgtcgagcagacatacagcaatgaggttcattgcgtggaagaaatcctcaaggaaatgacacacagctggccgcctccccttaccgccattcacacccccagcactgcagaaccatctaagttcccctttcccacaaaggatagtcaacatgtgtcaagcgtgacacagaaccagaaacaatatgatacatcaagtaagacacactccaactcccaacagggtacctctagtatgctggaggacgatctgcagcttagcgactccgaggatagcgactccgagcagactcctgagaagcctcctcacctccatttgcaggtgttacactccccttttcagaaccagtggcaccaacacattcccgctgttcaatcccaaaaggctcccgtcacgcagacggtgccacagactcagcgagctagagcagtgcaagactccgaagagaacgagcctctggagactcctgcccctgagccagaaccccctacgacaaacaaatggcagttggacaactggctaactaaggttagccagccagcggctccgcctgagggtcctcgaagcaccgagccacccaggaggcaccccgagtcaaaagggagttccgactccgccacatctcaggaacatagtgaatcaaaggatcccccacccaaaagtagtagcaaggcccctagagcgccacccgaagccccacatcccggaaagagatcctgtcaaaaatctcctgctcagcaagaacccccacaacgacagactgttgggacaaaacagcccaaaaagcctgtgaaggcttcagctagagcgggatcgaggacctcattgcagggcgagcgcgagccagggctcctgccctatggcagtcgggaccaaacaagtaaggataaacccaaagttaagacaaaagggcgacctcgggcagcagcttctaatgaacccaaacctgccgtgcctccaagcagcgagaagaagaagcacaagtccagcctgcctgcgccaagcaaggcactgagcggacccgagccagccaaggacaacgtggaggatcgcaccccagagcacttcgccctggtcccactgaccgagtcccaaggacccccacacagtgggagcgggagccgcacgagcggctgcaggcaggcagttgtagttcaggaagactccaggaaggataggctgcccctgcctcttcgtgacaccaagcttctatcaccactgcgggacacccccccacctcagagcctcatggttaagataacattagacctgctctcccgcattccacaacctccgggaaagggctctagacaaaggaaagccgaagataaacagcctcccgcaggcaaaaagcatagctccgagaagaggtcatccgactcttcatcaaaattggcaaagaagcggaaaggtgaagctgaacgcgattgtgataataagaagatccgattggagaaatag

SEQ ID NO: 278317 - DNA, 1266 bp, Artificial Sequence
  derived and/or modified sequence
atggccttcaccgagagagtgaacagcagcggcaacagcctgtacaacgacgacagaaacctgctgagaatcagagagaaggagagaagaaaccaggaggcccaccaggagaaggaggccttccccgagaagatccccctgttcggcgagccctacaagaccgccaagggcgacgagctgagcagcagaatccagaacatgctgggcaactacgaggaggtgaaggagttcctgagcaccaagagccacacccacagactggacgccagcgagaacagactgggcaagcccaagtaccccctgatccccgacaagggcagcagcatccccagcagcagcttccacaccagcgtgcaccaccagagcatccacacccccgccagcggccccctgagcgtgggcaacatcagccacaaccccaagatggcccagcccagaaccgagcccatgcccagcctgcacgccaagagctgcggcccccccgacagccagcacctgacccaggacagactgggccaggagggcttcggcagcagccaccacaagaagggcgacagaagagccgacggcgaccactgcgccagcgtgaccgacagcgcccccgagagagagctgagccccctgatcagcctgcccagccccgtgccccccctgagccccatccacagcaaccagcagaccctgcccagaacccagggcagcagcaaggtgcacggcagcagcaacaacagcaagggctactgccccgccaagagccccaaggacctggccgtgaaggtgcacgacaaggagaccccccaggacagcctggtggcccccgcccagccccccagccagaccttccccccccccagcctgcccagcaagagcgtggccatgcagcagaagcccaccgcctacgtgagacccatggacggccaggaccaggcccccagcgagagccccgagctgaagcccctgcccgaggactacagacagcagaccttcgagaagaccgacctgaaggtgcccgccaaggccaagctgaccaagctgaagatgcccagccagagcgtggagcagacctacagcaacgaggtgcactgcgtggaggagatcctgaaggacagccagcacgtgagcagcgtgacccagaaccagaagcagtacgacaccagcagcaagacccacagcaacagccagcagggcaccagcagcatgctggaggacgacctgcagctgagcgacagcgaggacagcgacagcgagcagacccccgccccctag

SEQ ID NO: 278318 - DNA, 1221 bp, Artificial Sequence
  derived and/or modified sequence
atggccttcaccgagagagtgaacagcagcggcaacagcctgtacaacgacgacagaaacctgctgagaatcagagagaaggagagaagaaaccaggaggcccaccaggagaaggaggccttccccgagaagatccccctgttcggcgagccctacaagaccgccaagggcgacgagctgagcagcagaatccagaacatgctgggcaactacgaggaggtgaaggagttcctgagcaccaagagccacacccacagactggacgccagcgagaacagactgggcaagcccaagtaccccctgatccccgacaagggcagcagcatccccagcagcagcttccacaccagcgtgcaccaccagagcatccacacccccgccagcggccccctgagcgtgggcaacatcagccacaaccccaagatggcccagcccagaaccgagcccatgcccagcctgcacgccaagagctgcggcccccccgacagccagcacctgacccaggacagactgggccaggagggcttcggcagcagccaccacaagaagggcgacagaagagccgacggcgaccactgcgccagcgtgaccgacagcgcccccgagagagagctgagccccctgatcagcctgcccagccccgtgccccccctgagccccatccacagcaaccagcagaccctgcccagaacccagggcagcagcaaggtgcacggcagcagcaacaacagcaagggctactgccccgccaagagccccaaggacctggccgtgaaggtgcacgacaaggagaccccccaggacagcctggtggcccccgcccagccccccagccagaccttccccccccccagcctgcccagcaagagcgtggccatgcagcagaagcccaccgcctacgtgagacccatggacggccaggaccaggcccccagcgagagccccgagctgaagcccctgcccgaggactacagacagcagaccttcgagaagaccgacctgaaggtgcccgccaaggccaagctgaccaagctgaagatgcccagccagagcgtggagacctacagcaacgaggtgcactgcgtggaggagatcctgaaggagatgacccacagctggcccccccccctgaccgccatccacacccccagcaccgccgagcccagcaagttccccttccccaccaaggacagccagcacgtgagcagcgtgacccagtag

SEQ ID NO: 278319 - DNA, 1473 bp, Artificial Sequence
  derived and/or modified sequence
atgcccagccagagcgtggagcagacctacagcaacgaggtgcactgcgtggaggagatcctgaaggagatgacccacagctggcccccccccctgaccgccatccacacccccagcaccgccgagcccagcaagttccccttccccaccaaggacagccagcacgtgagcagcgtgacccagaaccagaagcagtacgacaccagcagcaagacccacagcaacagccagcagggcaccagcagcatgctggaggacgacctgcagctgagcgacagcgaggacagcgacagcgagcagacccccgagaagcccccccacctgcacctgcaggtgctgcacagccccttccagaaccagtggcaccagcacatccccgccgtgcagagccagaaggcccccgtgacccagaccgtgccccagacccagagagccagagccgtgcaggacagcgaggagaacgagcccctggagacccccgcccccgagcccgagccccccaccaccaacaagtggcagctggacaactggctgaccaaggtgagccagcccgccgccccccccgagggccccagaagcaccgagccccccagaagacaccccgagagcaagggcagcagcgacagcgccaccagccaggagcacagcgagagcaaggaccccccccccaagagcagcagcaaggcccccagagccccccccgaggccccccaccccggcaagagaagctgccagaagagccccgcccagcaggagcccccccagagacagaccgtgggcaccaagcagcccaagaagcccgtgaaggccagcgccagagccggcagcagaaccagcctgcagggcgagagagagcccggcctgctgccctacggcagcagagaccagaccagcaaggacaagcccaaggtgaagaccaagggcagacccagagccgccgccagcaacgagcccaagcccgccgtgccccccagcagcgagaagaagaagcacaagagcagcctgcccgcccccagcaaggccctgagcggccccgagcccgccaaggacaacgtggaggacagaacccccgagcacttcgccctggtgcccctgaccgagagccagggccccccccacagcggcagcggcagcagaaccagcggctgcagacaggccgtggtggtgcaggaggacagcagaaaggacagactgcccctgcccctgagagacaccaagctgctgagccccctgagagacaccccccccccccagagcctgatggtgaagatcaccctggacctgctgagcagaatcccccagccccccggcaagggcagcagacagagaaaggccgaggacaagcagccccccgccggcaagaagcacagcagcgagaagagaagcagcgacagcagcagcaagctggccaagaagagaaagggcgaggccgagagagactgcgacaacaagaagatcagactggagaagtag

SEQ ID NO: 278320 - protein, 238 aa, Artificial Sequence
  derived and/or modified sequence
MRTVHSVIKRTPRKYLAEIVLIDDFSNKEHLKEKLDEYIKLWNGLVKVFRNERREGLIQARSIGAQKAKLGQVLIYLDAHCEVAVNWYAPLVAPISKDRTTCTVPLIDYIDGNDYSIEPQQGGDEDGFARGAWDWSLLWKRIPLSHKEKAKRKHKTEPYRSPAMAGGLFAIEREFFFELGLYDPGLQIWGGKTLRSHTRYGSVVANYYLFLVLVLDISTVLRAGKEILRPFMLGLLQL

SEQ ID NO: 278321 - DNA, 717 bp, Artificial Sequence
  derived and/or modified sequence
atgagaaccgtgcacagcgtgatcaagagaacccccagaaagtacctggccgagatcgtgctgatcgacgacttcagcaacaaggagcacctgaaggagaagctggacgagtacatcaagctgtggaacggcctggtgaaggtgttcagaaacgagagaagagagggcctgatccaggccagaagcatcggcgcccagaaggccaagctgggccaggtgctgatctacctggacgcccactgcgaggtggccgtgaactggtacgcccccctggtggcccccatcagcaaggacagaaccacctgcaccgtgcccctgatcgactacatcgacggcaacgactacagcatcgagccccagcagggcggcgacgaggacggcttcgccagaggcgcctgggactggagcctgctgtggaagagaatccccctgagccacaaggagaaggccaagagaaagcacaagaccgagccctacagaagccccgccatggccggcggcctgttcgccatcgagagagagttcttcttcgagctgggcctgtacgaccccggcctgcagatctggggcggcaagaccctgagaagccacaccagatacggcagcgtggtggccaactactacctgttcctggtgctggtgctggacatcagcaccgtgctgagagccggcaaggagatcctgagacccttcatgctgggcctgctgcagctgtag

SEQ ID NO: 278322 - DNA, 717 bp, Artificial Sequence
  derived and/or modified sequence
atgcgtacagtacatagtgtcatcaagagaaccccacgaaagtacttggctgagatcgtcttgatagatgatttttctaataaggagcatttgaaggaaaaactggatgaatatattaagctgtggaatgggctcgtgaaagtcttccgcaatgaaaggagagagggcctgatccaagctagatccatcggagctcagaaggcaaagctcggccaggtgttgatctacttagatgctcactgtgaggtggcagtcaactggtacgccccactcgtcgcccccatttctaaagacaggacaacgtgcacagtaccattgatcgattatatcgacggaaacgattacagtatcgaaccccagcagggaggcgatgaggacggctttgccaggggtgcctgggattggagtctcctgtggaagcgcatccctctgtcacacaaggaaaaagctaagcgtaaacacaagaccgaaccatatcgcagcccagccatggctggcgggctttttgctattgagcgcgaatttttcttcgaactcgggctgtatgaccctggcctacagatctggggaggaaagacccttcgttctcatacccggtatggctccgtggtggccaactattatctatttttggtgctagtgctcgacatatcaactgttctgagggcaggaaaggagatcttacgtccgtttatgttaggactgctccagctatag

SEQ ID NO: 278323 - DNA, 717 bp, Artificial Sequence
  derived and/or modified sequence
atgaggacagtgcacagcgtcatcaagaggacccccaggaagtacctggccgagatcgtgctgattgatgacttcagcaacaaggagcacctgaaggagaagctggatgagtacatcaagctgtggaatggcctggtgaaggtgttcagaaatgaaagaagagagggcctcatccaggcccggagcattggagcccagaaggccaagctgggccaggtgctgatctacctggatgcccactgtgaggtggccgtgaactggtacgcccccctggtggcccccatcagcaaggacaggaccacctgcaccgtgcccctgattgactacattgatggaaatgactacagcattgagccccagcagggcggagatgaagatggctttgcccggggggcctgggactggagcctgctgtggaagaggatccccctgagccacaaggagaaggccaagaggaagcacaagacagagccctaccgcagccctgccatggccggcggcctgtttgccatcgagcgggagttcttctttgagctgggcctgtatgaccccggcctgcagatctggggcggcaagaccctgcggagccacaccaggtatggctctgtggtggccaactactacctgttcctggtgctggtgctggacatcagcacagtgctgcgggccggcaaggagatcctgcggcccttcatgctgggcctgctgcagctgtag

SEQ ID NO: 278324 - DNA, 717 bp, Artificial Sequence
  derived and/or modified sequence
atgcggaccgtgcacagcgtgatcaagcggaccccccggaagtacctggctgaaatcgtcctgatcgacgacttttccaataaggagcacctcaaggagaaactggacgaatatatcaagctctggaacggtctggtgaaggtctttcggaacgagcggcgggagggcttgatacaggcacggtccattggcgcgcagaaggccaaactgggccaggtgctgatctatctcgacgctcattgtgaggtggcagttaattggtatgcaccactggtggcacccatctcaaaggataggacaacctgcacggtcccactgattgattacattgacgggaacgattacagtatagaaccacagcaggggggtgacgaagacggtttcgcacgcggcgcatgggattggagccttctatggaagcggattcccctctcccataaggagaaggctaagagaaaacacaagactgagccgtatcggtcccccgcaatggccggaggcctcttcgcaattgagcgtgaatttttttttgagctgggcctgtatgatcctggcctccaaatatgggggggaaaaaccctgagaagccacacgcgttatggtagcgtggtggcaaactattacctcttcttggtccttgttctggatatcagtacggtgcttcgggcagggaaggagatacttaggccgttcatgctgggcctgctgcaactgtag

SEQ ID NO: 278325 - DNA, 717 bp, Artificial Sequence
  derived and/or modified sequence
atgagaacagtgcattccgtgattaaaaggactccccgtaagtatctggctgagattgtacttatcgatgacttcagtaataaagaacaccttaaggagaaattggacgagtatatcaagttgtggaatggcctggtcaaggtgttcaggaacgagcggagggaggggctgatccaagccagatctatcggtgcgcagaaagccaaactggggcaggtcctgatatatctggacgcccactgcgaggtggctgttaattggtatgcccctctcgttgcacccatctcaaaggatcgcaccacgtgcaccgtgcccctcattgattacattgacggcaatgactactctattgaacctcaacagggaggcgatgaggacgggtttgccagaggggcttgggattggagtctcctctggaaaaggatcccattgtcccacaaagagaaagccaagaggaagcataagactgaaccgtaccggtcacctgctatggcaggcggactgttcgctattgagcgggagttcttttttgagctgggcctttacgatcctgggctgcagatctggggcggaaaaaccttgcgatcccatactagatatggcagcgtcgtggcgaattattaccttttcctcgtgctcgtgctggatatatcgaccgtgctcagagctggtaaagaaattcttcggccatttatgctgggattgttgcaactctag

SEQ ID NO: 278326 - DNA, 1657 bp, Artificial Sequence
  derived and/or modified sequence
aaaacttgctcacttcgagcgttgtcattgtcttccataatgaaggatggtcaaccctcatgagaacagtccacagtgtaattaaaaggactccaaggaaatatttagcagaaattgtgttaattgacgatttcagtaataaagaacacttaaaagaaaaactggatgaatatattaagctgtggaatggcctagtgaaggtatttcgaaatgaaagaagggaaggtttaattcaagcacgaagtattggtgctcagaaggctaaacttggacaggttttgatataccttgatgcccactgtgaggtggcagttaactggtatgcaccacttgtagctcccatatctaaggacagaactacatgtactgtgcctctaatagattacatagatgggaatgattattccattgaaccacagcaaggtggggatgaagatggttttgccagaggggcctgggactggagtttactatggaaacgtattcctctaagccacaaggaaaaggccaaaagaaaacataaaactgaaccttatcggtccccagccatggctgggggattatttgccattgaacgagagttcttctttgaattgggtctctatgatccaggtctccagatttggggtggtaaaactttgagatctcatacaagatatggcagtgtggtggcaaattattatttgttccttgttctcgtgttggacatatctaccgtcttgagggctggcaaggaaatcctccgcccatttatgttgggtcttctccaactctgaagaattatgttagagttgtggaggtttggtgggatgaatataaagactacttctatgctagtcgtcctgaatcgcaggcattaccatatggggatatatcggagctgaaaaaatttcgagaagatcacaactgcaaaagttttaagtggttcatggaagaaatagcttatgatatcacctcacactaccctttgccacccaaaaatgttgactggggagaaatcagaggcttcgaaactgcttactgcattgatagcatgggaaaaacaaatggaggctttgttgaactaggaccctgccacaggatgggagggaatcagcttttcagaatcaatgaagcaaatcaactcatgcagtatgaccagtgtttgacaaagggagctgatggatcaaaagttatgattacacactgtaatctaaatgaatttaaggaatggcagtacttcaagaacctgcacagatttactcatattccttcaggaaagtgtttagatcgctcagaggtcctgcatcaagtattcatctccaattgtgactccagtaaaacgactcaaaaatgggaaatgaataacatccatagtgtttagagagaaaaaaataaaccaataacctacctactgacaagtaaatttatacaggactgaaaaccgcctgaaacctgctgcaactattgttattaactctgtatagctccaaacctggaacctcctgatcagtttgaaggacattgataaactgtgattttacaataacattatcatctgcagttactgtttacaagactgcttttaccttaaactttgtagatgtttacatctttttgttgtgttttaagatgatgttggtaatttgtgcctttagctctgttttattagacagag

SEQ ID NO: 278327 - protein, 1114 aa, Artificial Sequence
  derived and/or modified sequence
MEAAVGVPDGGDQGGAGPREDATPMDAYLRKLGLYRKLVAKDGSCLFRAVAEQVLHSQSRHVEVRMACIHYLRENREKFEAFIEGSFEEYLKRLENPQEWVGQVEISALSLMYRKDFIIYREPNVSPSQVTENNFPEKVLLCFSNGNHYDIVYPIKYKESSAMCQSLLYELLYEKVFKTDVSKIVMELDTLEVADEDNSEISDSEDDSCKSKTAAAAADVNGFKPLSGNEQLKNNGNSTSLPLSRKVLKSLNPAVYRNVEYEIWLKSKQAQQKRDYSIAAGLQYEVGDKCQVRLDHNGKFLNADVQGIHSENGPVLVEELGKKHTSKNLKAPPPESWNTVSGKKMKKPSTSGQNFHSDVDYRGPKNPSKPIKAPSALPPRLQHPSGVRQHAFSSHSSGSQSQKFSSEHKNLSRTPSQIIRKPDRERVEDFDHTSRESNYFGLSPEERREKQAIEESRLLYEIQNRDEQAFPALSSSSVNQSASQSSNPCVQRKSSHVGDRKGSRRRMDTEERKDKDSIHGHSQLDKRPEPSTLENITDDKYATVSSPSKSKKLECPSPAEQKPAEHVSLSNPAPLLVSPEVHLTPAVPSLPATVPAWPSEPTTFGPTGVPAPIPVLSVTQTLTTGPDSAVSQAHLTPSPVPVSIQAVNQPLMPLPQTLSLYQDPLYPGFPCNEKGDRAIVPPYSLCQTGEDLPKDKNILRFFFNLGVKAYSCPMWAPHSYLYPLHQAYLAACRMYPKVPVPVYPHNPWFQEAPAAQNESDCTCTDAHFPMQTEASVNGQMPQPEIGPPTFSSPLVIPPSQVSESHGQLSYQADLESETPGQLLHADYEESLSGKNMFPQPSFGPNPFLGPVPIAPPFFPHVWYGYPFQGFIENPVMRQNIVLPSDEKGELDLSLENLDLSKDCGSVSTVDEFPEARGEHVHSLPEASVSSKPDEGRTEQSSQTRKADTALASIPPVAEGKAHPPTQILNRERETVPVELEPKRTIQSLKEKTEKVKDPKTAADVVSPGANSVDSRVQRPKEESSEDENEVSNILRSGRSKQFYNQTYGSRKYKSDWGYSGRGGYQHVRSEESWKGQPSRSRDEGYQYHRNVRGRPFRGDRRRSGMGDGHRGQHT

SEQ ID NO: 278328 - protein, 1049 aa, Artificial Sequence
  derived and/or modified sequence
MACIHYLRENREKFEAFIEGSFEEYLKRLENPQEWVGQVEISALSLMYRKDFIIYREPNVSPSQVTENNFPEKVLLCFSNGNHYDIVYPIKYKESSAMCQSLLYELLYEKVFKTDVSKIVMELDTLEVADEDNSEISDSEDDSCKSKTAAAAADVNGFKPLSGNEQLKNNGNSTSLPLSRKVLKSLNPAVYRNVEYEIWLKSKQAQQKRDYSIAAGLQYEVGDKCQVRLDHNGKFLNADVQGIHSENGPVLVEELGKKHTSKNLKAPPPESWNTVSGKKMKKPSTSGQNFHSDVDYRGPKNPSKPIKAPSALPPRLQHPSGVRQHAFSSHSSGSQSQKFSSEHKNLSRTPSQIIRKPDRERVEDFDHTSRESNYFGLSPEERREKQAIEESRLLYEIQNRDEQAFPALSSSSVNQSASQSSNPCVQRKSSHVGDRKGSRRRMDTEERKDKDSIHGHSQLDKRPEPSTLENITDDKYATVSSPSKSKKLECPSPAEQKPAEHVSLSNPAPLLVSPEVHLTPAVPSLPATVPAWPSEPTTFGPTGVPAPIPVLSVTQTLTTGPDSAVSQAHLTPSPVPVSIQAVNQPLMPLPQTLSLYQDPLYPGFPCNEKGDRAIVPPYSLCQTGEDLPKDKNILRFFFNLGVKAYSCPMWAPHSYLYPLHQAYLAACRMYPKVPVPVYPHNPWFQEAPAAQNESDCTCTDAHFPMQTEASVNGQMPQPEIGPPTFSSPLVIPPSQVSESHGQLSYQADLESETPGQLLHADYEESLSGKNMFPQPSFGPNPFLGPVPIAPPFFPHVWYGYPFQGFIENPVMRQNIVLPSDEKGELDLSLENLDLSKDCGSVSTVDEFPEARGEHVHSLPEASVSSKPDEGRTEQSSQTRKADTALASIPPVAEGKAHPPTQILNRERETVPVELEPKRTIQSLKEKTEKVKDPKTAADVVSPGANSVDSRVQRPKEESSEDENEVSNILRSGRSKQFYNQTYGSRKYKSDWGYSGRGGYQHVRSEESWKGQPSRSRDEGYQYHRNVRGRPFRGDRRRSGMGDGHRGQHT

SEQ ID NO: 278329 - protein, 139 aa, Artificial Sequence
  derived and/or modified sequence
MACIHYLRENREKFEAFIEGSFEEYLKRLENPQEWVGQVEISALSLMYRKDFIIYREPNVSPSQVTENNFPEKVLLCFSNGNHYDIVYPIKYKESSAMCQSLLYELLYEKVFKTDVSKIVMELDTLEVADEDNSEISDS

SEQ ID NO: 278330 - DNA, 3345 bp, Artificial Sequence
  derived and/or modified sequence
atggaggcagccgtgggggtgccagatggtggggatcagggtggcgcggggcctcgggaggacgctacacccatggacgcttatttgcgtaagcttgggctgtatcgcaaactggtggcgaaggatggctcatgcctttttcgggcggtggccgaacaggtcttacactcccagagtagacacgtggaagtgcggatggcttgtatccattatttacgcgagaacagagagaagttcgaagccttcatagagggcagctttgaggagtacctaaaacgccttgaaaacccacaggagtgggtgggacaggtcgagatttccgctctgtcccttatgtatcgcaaagattttattatatatagggagcccaacgtatctccaagtcaggtaaccgagaataactttcccgaaaaagtccttctttgtttctcaaacggtaatcactacgacattgtgtaccctataaaatataaggagtcgagcgccatgtgccagagcctactgtatgaattactgtacgaaaaagtcttcaaaaccgatgttagcaaaattgtcatggagctggatactcttgaggtggctgacgaagacaattccgagatatcggacagtgaagatgactcttgtaagtcaaaaactgcagcggccgctgccgacgtaaacggatttaagcccttaagcggcaatgagcagctgaaaaataacgggaatagtacgagcctccccctgtctcgcaaggttctgaaatctcttaatcccgctgtctataggaatgtggagtacgaaatctggcttaagtccaaacaggcccagcagaagagagactacagtatcgccgcgggcctgcagtacgaggtcggcgacaaatgtcaggtgcgactggaccacaacggcaagttcctgaacgctgacgtacagggaattcactccgaaaatggacctgtccttgtggaggaactgggaaagaaacacacatctaagaacctgaaggctcctcctcctgaatcatggaatacagttagcggtaagaaaatgaagaagccgtccacaagtggacagaactttcattctgacgtggactatcggggtcccaagaatccatctaagcccatcaaggccccgtcagcccttcctcctcgcctgcagcacccttcaggggtgagacagcatgctttttcttcacattccagtggctcacagagtcagaaattcagctccgaacacaaaaatctgtcccggacgccatcccagattatccgaaaacctgaccgagagagagtggaggacttcgaccatacttcacgggaaagtaactatttcgggctgtctcccgaagagcgaagagagaagcaagctatcgaggagagtaggctactgtacgagattcagaaccgcgacgagcaggcattccccgctctctcttcctcttctgttaaccagtccgcctcgcagagctcaaatccatgtgtccagagaaaatcctcccatgtgggagaccgcaaagggagtaggcgccggatggacaccgaagaaagaaaagacaaagattcaatccatggccacagtcaactagataagaggcctgaaccatctactctggaaaacattacggacgataagtacgccacggtgtcatcgccctccaaatctaagaagctggaatgtccgagtccggccgagcagaagcctgcagaacatgttagtctttcaaacccagccccactgctggtgtcaccagaggtgcacctcacccctgctgttccttccctgccggccacggtccccgcatggccgagtgaacccaccacattcggaccgaccggagtccctgcccccattccagttctttctgtcacacagacactgaccaccggtcccgactccgcagtctcgcaagcgcacttgaccccctcccctgtccccgtgtcaatccaggcggtgaaccagccgctcatgccgctcccccagactttgtctctataccaggaccctctttacccaggatttccctgtaatgagaaaggcgatcgtgccatcgtccctccttactcactttgtcagactggagaggacctgcccaaagataaaaatatcctgagattcttttttaatctcggtgtcaaggcttacagctgccctatgtgggcaccgcactcctacctgtacccacttcaccaagcatacttggcagcctgtcggatgtaccctaaagtaccagttccagtgtatcctcacaatccctggttccaggaggcacccgccgcacaaaacgaaagtgattgtacttgtactgatgctcattttccaatgcagactgaggcatccgttaatggacagatgcctcaacctgagatcgggccacccacgttcagctcgccactggtgataccgccctcccaggtgagcgagtcacacgggcagctaagctaccaggccgatctggaatcagagactccaggacaattactgcacgccgattacgaggagagtctcagcgggaaaaatatgtttccccagccctcatttgggccaaatccttttttggggcccgtgccaatagcacccccctttttccctcacgtgtggtatggatacccgttccaaggatttattgagaacccagtaatgagacaaaacattgtactaccgtcagacgagaaaggcgaactggacctctctctagaaaacctggacttgagtaaagattgtggctccgtcagcacggttgatgaattcccagaggctcgcggggaacacgttcactcactgcctgaggcctccgtctcttctaagcccgacgaaggtcgaactgagcagagcagccagactcggaaggctgacacggctctggcttcaatccctcccgtagcagagggaaaagctcaccccccgacccagattctaaatcgggagagagaaaccgtgcccgtcgaactggagccgaagcggacaattcagtcactgaaggaaaagacagagaaagtcaaagaccctaagaccgccgcggatgtcgtcagtcccggagctaactctgtggactcccgcgtccaacgccccaaagaggagagttctgaggatgagaacgaagtgagcaacattcttaggtccggaaggtctaaacagttttataaccagacatatggaagcagaaaatacaagtctgactgggggtatagcggaagaggcggatatcagcacgttaggagcgaggagtcctggaaaggtcagccgtcacggagcagggacgagggctaccagtatcacaggaacgtcagaggtaggcccttcaggggtgaccgtcgccgcagcggcatgggcgatgggcacagaggacagcacacttag

SEQ ID NO: 278331 - DNA, 3345 bp, Artificial Sequence
  derived and/or modified sequence
atggaggccgctgtgggcgtgcctgatggaggagaccagggcggggccggcccccgggaggatgccacccccatggatgcctacctgaggaagctgggcctgtacaggaagctggtggccaaggatggcagctgcctcttccgggctgtggccgagcaggtgctgcacagccagagcagacatgtggaggtgaggatggcctgcatccactacctgcgggagaaccgggagaagtttgaggccttcatcgagggcagctttgaggagtacctgaagaggctggagaacccccaggagtgggtgggccaggtggagatcagcgccctgagcctgatgtacaggaaggacttcatcatctaccgggagcccaacgtgagccccagccaggtgacagagaacaacttccctgagaaggtgctgctgtgcttcagcaatggaaaccactatgacatcgtgtaccccatcaagtacaaggagagcagcgccatgtgccagagcctgctgtatgagctgctgtatgagaaggtgttcaagacagatgtgtccaagatcgtgatggagctggacaccctggaggtggctgatgaggacaacagcgagatcagtgacagtgaagatgacagctgcaagagcaagacagctgctgctgctgctgatgtgaatggcttcaagcccctgtctggaaatgagcagctgaagaacaatggaaacagcaccagcctgcccctgagcaggaaggtgctgaagagcctgaacccagctgtgtacagaaatgtggagtatgagatctggctgaagagcaagcaggcccagcagaagagggactacagcattgctgctggcctgcagtatgaggtgggggacaagtgccaggtgcggctggaccacaacgggaagttcctgaatgctgatgtgcagggcatccacagtgaaaatggacctgtgctggtggaggagctgggcaagaagcacaccagcaagaacctgaaggcccctcctcctgagagctggaacacagtgtctgggaagaagatgaagaagcccagcaccagcggccagaacttccacagtgatgtggactaccggggccccaagaaccccagcaagcccatcaaggcccccagcgccctgcccccccggctgcagcaccccagcggcgtgcggcagcacgccttcagcagccacagcagcggcagccagagccagaagttcagcagcgagcacaagaacctgagcaggacccccagccagatcatcaggaagccagaccgggagcgggtggaggactttgaccacaccagccgggagagcaactacttcggcctgagccctgaggagcggcgggagaagcaggccatcgaggagagccggctgctgtatgagatccagaacagagatgagcaggccttccctgccctgagcagcagctctgtgaaccagagcgccagccagagcagcaacccctgtgtgcagaggaagagcagccacgtgggggacaggaagggcagcagaagaaggatggacacagaggagaggaaggacaaggacagcatccacggccacagccagctggacaagaggcctgagcccagcaccctggagaacatcacagatgacaagtatgccaccgtgagcagccccagcaagagcaagaagctggagtgccccagccctgctgagcagaagccagctgagcacgtgtccctgagcaacccagcccccctgctggtgtccccagaggtgcacctgaccccagctgtgcccagcctgcctgccaccgtgcctgcctggcccagcgagcccaccaccttcggccccactggagtgcctgcccccatccctgtgctgtctgtgacccagaccctgaccaccggccctgacagcgctgtgtcccaggcccacctgacccccagccctgtgcctgtgtccatccaggccgtgaaccagcccctgatgcccctgccccagaccctgagcctgtaccaggaccccctgtacccaggcttcccctgcaatgagaagggggaccgggccatcgtgcccccctacagcctgtgccagacaggagaggacctgcccaaggacaagaacatcctgcgcttcttcttcaacctgggcgtgaaggcctacagctgccccatgtgggccccccacagctacctgtaccccctgcaccaggcctacctggccgcctgcaggatgtaccccaaggtgcctgtgcctgtgtacccccacaacccctggttccaggaggccccagctgcccagaatgaaagtgactgcacctgcacagatgcccacttccccatgcagacagaggcctctgtgaatggccagatgccccagcctgagatcggcccccccaccttcagcagccccctggtgattcctcccagccaggtgtctgagagccacggccagctgagctaccaggccgacctggagagcgagaccccaggccagctgctgcatgctgactatgaggagagcctgagcggcaagaacatgttcccccagcccagctttggccccaaccccttcctgggccctgtgcccatcgccccacccttcttcccccacgtgtggtacggctaccccttccagggcttcatcgagaaccctgtgatgaggcagaacatcgtgctgcccagtgatgagaagggggagctggacctgagcctggagaacctggacctgagcaaggactgtggctctgtgtccacagtggatgagttccctgaggcccggggggagcacgtgcacagcctgcctgaggcctctgtgagcagcaagccagatgagggccgcacagagcagagcagccagaccaggaaggctgacacagccctggccagcatcccccctgtggccgagggcaaggcccacccccccacccagatcctgaaccgggagcgggagaccgtgcctgtggagctggagcccaagaggaccatccagagcctgaaggagaagacagagaaggtgaaggaccccaagacagctgctgatgtggtgtcccctggggccaacagcgtggacagccgggtgcagaggcccaaggaggagagcagtgaagatgaaaatgaggtgagcaacatcctgcggagcggccgcagcaagcagttctacaaccagacctacggcagcaggaagtacaagagtgactggggctacagcggccggggcggctaccagcacgtgcgctctgaggagagctggaagggccagcccagccgcagcagagatgagggctaccagtaccacagaaatgtgcggggccggcccttccggggggacagaagaagaagtggcatgggagatggccaccggggccagcacacctag

SEQ ID NO: 278332 - DNA, 3345 bp, Artificial Sequence
  derived and/or modified sequence
atggaggccgccgtgggcgtgcccgacggcggcgaccagggcggcgcgggtcctcgggaagatgccacaccaatggacgcatatttgcgcaagctgggtctctataggaaactggttgctaaggacgggtcctgcctattccgagcagttgcagaacaggtactgcattctcagagtcgccacgtggaggtgcgcatggcttgcattcattacttaagagaaaacagggaaaagttcgaggcctttattgagggttcatttgaggagtatttgaagcgcttagagaatccccaggagtgggtcggccaggttgagattagtgctctttctctgatgtataggaaagactttatcatttacagagagcctaatgtgtcaccgtcccaagttacagagaataatttcccagagaaggtgctgctctgctttagcaatggcaatcactacgatattgtctaccctatcaagtacaaggagtcttcagccatgtgccagagtctgctatacgaactgctctacgagaaagtctttaagaccgacgtctccaaaatcgtcatggaactcgatactttggaagtggccgacgaggacaactccgagataagcgattctgaggatgattcgtgcaaaagtaagaccgccgccgctgctgcagacgtcaacggattcaaacccctgagcgggaacgaacaactaaaaaataacggcaatagtacctccctcccgcttagtagaaaggtcctgaaatctctcaaccccgccgtctatcggaatgtggaatatgagatttggctgaagtccaagcaagctcaacaaaagagggactactccattgcggcggggctccaatatgaggtgggggataaatgccaggttcggctcgaccacaacggcaagtttctgaacgccgacgtgcagggaatacattccgagaacgggccggtcctggtggaagaacttgggaagaagcatacatctaagaaccttaaagccccaccccctgaatcctggaacactgttagcggaaagaaaatgaagaagccaagcaccagcggtcagaactttcactctgacgttgattaccgggggccaaaaaacccatctaagccaataaaggccccatcagccttgcccccacggttacagcaccctagtggcgtgaggcagcacgcattttctagccatagttccggcagtcagtctcagaagttttcgtcagaacataagaaccttagccgtacacccagccaaatcatacgaaagcccgatcgggaaagagtggaagacttcgaccacacctcacgtgaatccaactactttggcctgagtccggaggaaagaagagagaagcaggccattgaggaaagtaggctcctatatgaaatccaaaaccgggacgagcaagcatttccagctttgagttcctcgtctgtcaaccagagcgccagccagagctcaaatccctgcgtccagaggaagagctcacatgtgggggataggaaggggtctcggcgaagaatggataccgaggagaggaaggataaggactcgatccacggacactcacagctggacaagcggcctgagccttcaacattggaaaacatcactgatgacaaatatgcaaccgtgtctagtccaagtaaatccaagaagttagagtgcccgagccccgccgagcagaaacctgccgaacacgtgagtctttccaaccccgcaccgctgctggttagcccagaggtgcacttgactcccgctgtccccagtctccctgctaccgtccccgcttggccatccgagcctacgacctttggccctacgggcgtgccggcccccatccctgtcctgagtgtcactcagacgctgaccaccggaccggacagtgcggtgtcccaagcacaccttaccccttcacctgtgccggtttctatccaggctgtgaatcaacccctgatgcctctcccacagaccctgtcactttatcaggatcctctgtacccagggtttccctgtaacgagaagggcgatagagccatcgtgccaccatattctttgtgtcagaccggtgaggacctgccaaaagacaaaaacatcttgcgattttttttcaacctcggagtaaaggcgtattcctgcccaatgtgggccccacatagctatttatatcctctgcatcaagcctatctggcagcatgccgcatgtaccctaaagtgccagttcccgtttatccccataatccatggtttcaggaggcacctgcagcacagaacgagtccgattgcacatgtacggatgctcactttcctatgcagacagaggcgagtgtgaatggccagatgccacagcctgaaatcggcccgccaaccttctccagtccactagtaatacccccttcccaggtgtcggagagtcacgggcaactatcctaccaggcagaccttgagtccgagacaccaggacagctcttgcacgcagattacgaagaatcattgtctggcaaaaatatgttcccccagccgagctttggccctaacccatttctgggacccgtgcctattgctccccccttctttccccacgtgtggtatggctatccctttcaggggttcatcgagaatcccgtcatgaggcagaacatagtgttgccttccgacgagaagggggagctggatctgtctctcgagaatctcgacctaagcaaggactgcggtagcgtaagtaccgtcgatgaatttcccgaggctcggggtgagcacgtgcactctctccccgaggcaagtgtctcgtcaaagccggacgaaggaaggaccgagcaatcctcccaaaccagaaaagccgacaccgccctggcctccattcccccagtcgccgagggcaaggcgcaccccccaacacaaattctgaatagagagagagagaccgtcccggtggagctggagccaaagagaactatacagagcttgaaagagaaaacggagaaagtgaaggacccaaaaaccgccgcagacgtggtttcccccggtgctaattcagtggattcacgtgtacagaggcccaaagaagaatcttctgaggacgagaatgaggtgagtaatatcctacgtagcgggcggagcaagcagttttacaaccagacttacggatcgagaaagtacaagtccgattgggggtattcagggaggggtggataccagcatgtgaggagcgaggaaagctggaagggacaacctagcagatctagggacgaaggctatcagtaccatagaaatgtccggggaagaccgttcaggggggaccgtcgcaggagtggcatgggggatggccacaggggacagcatacctag

SEQ ID NO: 278333 - DNA, 938 bp, Artificial Sequence
  derived and/or modified sequence
cccattgtaacgccggagtgggacgctgctttgcgtctgaaaggtgcaaattgaaactcgaaagcccgcaaattaacggggtgtctctctcctgatgaagaggtattgcactctcagtctcgccatgttgaagtcagaatggcctgtattcactatcttcgagagaacagagagaaatttgaagcgtttatagaaggatcatttgaagaatatttaaagcgtttggaaaatccacaggaatgggtaggacaagtggaaataagtgccctttctcttatgtacaggaaagattttataatttatcgggaaccaaatgtttctccttcacaagtaacagaaaataattttcctgaaaaggtgttactgtgtttttcaaatggaaatcattatgatattgtgtatcccataaagtataaagaaagctctgctatgtgtcagtctctcctttatgaattgctgtatgagaaggtatttaaaactgatgttagtaaaattgtgatggaactagacacgttggaagtagctgatgaagataacagtgaaatatcagattcagaggatgacagttgcaagtaagaatgaaatcctaaaatacctttcttagtgccatacaaggaaagttaagtaaatgtctttacatttcagtaaatgtctttctataacatatattgaggtattaatggtattcataaaatacagcagtctgctgaagtttctttatccctgtcactaattttacctaatttctattatgggactgtttgttttgaaagttggtgtttttggttgatgagaatttacgtctgcaatctagatgcatatttgtagaataaatttggtcctacctatatgtgtgtgtattgtaaaattttaaagttaacttgtcaattgttcacatacccagtaatgaaataaaatggccgtttggatttccttca

SEQ ID NO: 278334 - DNA, 3829 bp, Artificial Sequence
  derived and/or modified sequence
ggcagggcttccctatgcgcccggagagcgcggaccgctgcctcgggccgccgccgcctgccgccgctcgcggagcccgagccccagcccgagccgccgcctgccccaggccggggcgtcgagcagccggcggcctggccatgtggggctagccctcgccgcgcctggcctgcagcaggaccagcaacatggaggctgccgtcggcgtccccgacggcggggaccagggcggcgcggggccccgcgaggacgcgacgcccatggacgcctatctgcggaaactgggcttgtatcggaaactggtcgccaaggacgggtcgtgcctgttccgggccgtggcggagcaggtattgcactctcagtctcgccatgttgaagtcagaatggcctgtattcactatcttcgagagaacagagagaaatttgaagcgtttatagaaggatcatttgaagaatatttaaagcgtttggaaaatccacaggaatgggtaggacaagtggaaataagtgccctttctcttatgtacaggaaagattttataatttatcgggaaccaaatgtttctccttcacaagtaacagaaaataattttcctgaaaaggtgttactgtgtttttcaaatggaaatcattatgatattgtgtatcccataaagtataaagaaagctctgctatgtgtcagtctctcctttatgaattgctgtatgagaaggtatttaaaactgatgttagtaaaattgtgatggaactagacacgttggaagtagctgatgaagataacagtgaaatatcagattcagaggatgacagttgcaagagtaagactgctgctgctgctgctgatgtgaatggatttaaacctttgtcaggcaatgagcagctgaagaacaatgggaactctactagcctgcctttgtctagaaaggttcttaagtcactcaatcctgcagtctatagaaatgtggaatatgaaatttggctgaagtctaaacaagctcagcaaaaacgtgattattccattgctgctggcttacaatatgaagttggagacaaatgtcaagttaggttggatcacaatggaaaatttttgaatgcagatgttcaaggaattcattctgagaatggaccagttttggttgaagaactgggaaagaagcacacatcaaagaacctcaaggcacctcccccagaaagctggaacacagtgtcagggaagaagatgaaaaaaccttccacttctggacaaaatttccattctgatgtggattacagagggccaaagaatccaagcaagccaataaaagccccatcagcactacctcctcgactgcagcatccttcaggagtaagacaacatgcgttctctagtcattcttcagggtcacagtctcagaaattctccagtgagcacaaaaatcttagccggacaccttcacagatcataagaaaacctgatcgtgaaagagttgaggattttgatcacacaagtcgagaatctaactatttcggcctttccccagaagagcgcagagagaagcaagctatagaagaatcccgtttactctatgagattcagaacagagatgaacaggctttcccagccctttccagctcatcagtcaatcagtcagcttctcagagtagcaatccatgtgtccagagaaaatcatcacatgtaggtgatagaaaaggaagcaggcggagaatggatacagaagaacgaaaagacaaagactctattcatggacatagtcagttggataaaagacccgaaccaagcacattggagaatattactgatgataaatatgcaacagtttcatcaccatcaaagtcaaagaagttagagtgcccttctcctgcggaacaaaagccagcagaacatgtgtctttgtcaaatccagctccccttctagtttctccagaggtacatctaactcctgcggtgccttctttaccagccactgtgccagcctggccaagtgaacctacaacttttggaccaacaggtgtccctgctccaattcccgttttgtcagtgacacagactttgaccactggacctgattcagctgtatcccaagctcatttaacaccctctccagttcctgtgtcaatacaggcagttaaccagcccttgatgcctttgcctcagacattgagcctttatcaagacccactctatcctgggtttccttgtaatgaaaagggagatcgagccattgtaccaccttattcactgtgtcagactggggaggacctacctaaagataagaatattcttcgattcttcttcaatcttggtgtgaaggcatacagttgtcctatgtgggccccacattcttacctgtaccctctgcaccaggcctacctggcagcctgcaggatgtacccaaaggtccctgtccctgtttatcctcataatccctggttccaagaggctcctgctgctcagaatgaaagtgattgtacctgtactgatgcccactttcctatgcagactgaggccagtgttaatggtcaaatgccacagccagagattggaccgccgacattttcttcacctctggttatccctccatctcaggtgtctgaaagtcatggacaattgtcttaccaggctgatcttgaatctgagacccctgggcagcttctgcatgctgattatgaagagtcactaagtggcaagaatatgttcccccagccatcttttggacccaatccattcttaggcccagttcctattgcacctcctttctttcctcatgtttggtatgggtacccttttcagggattcatagaaaatccagtaatgaggcagaatattgtcctgccctctgatgaaaaaggagaattggatctgtctctggaaaatctggatctgtctaaagattgtggttcagtttcaacagtagatgagtttccagaagccaggggtgaacatgtacattctctccctgaagcaagtgtgagcagtaagccggacgaaggccggacagagcaatcttcccagacacgaaaggcagatacggcattggcttccatccctcctgtagcagagggaaaggctcatcctcccactcagattctaaacagagagagagaaactgtgcctgttgaacttgaacctaaaaggaccattcaaagcctgaaagaaaaaacagaaaaagtaaaagatcctaagactgctgctgatgtggtcagccctggggccaactctgttgatagcagagtgcaaagaccaaaagaagagagttcagaagatgaaaatgaagtgtctaatattttgagaagtggtagatccaagcagttctataatcaaacttatggaagcaggaagtacaaaagtgattggggctattctggtaggggtggatatcaacatgtgagaagtgaggagtcctggaaaggacagccaagcagaagtcgggatgaaggttatcagtaccatcgaaatgtcagagggcgaccatttaggggagataggaggagatcagggatgggagatggccataggggacagcacacttgatggttgttgccgaagtattttctaacagaaactcttaggtggaatgtttctgaaggctttaaaaaaaatacaataaagtaaaaaccgcagttggaactctttcctctccccagccccccttaccttcactcccatactggacaagacattttggacatgagttcaagggggcaggttaattcctggcattgccagttttcttcattcagaatctgtttgttgatcaagtgactgtccccgtaaaaagtagaagataagtttgttaaagtattttttataaacagcttaatataaaa

SEQ ID NO: 278335 - DNA, 7069 bp, Artificial Sequence
  derived and/or modified sequence
cccattgtaacgccggagtgggacgctgctttgcgtctgaaaggtgcaaattgaaactcgaaagcccgcaaattaacggggtgtctctctcctgatgaagaggtattgcactctcagtctcgccatgttgaagtcagaatggcctgtattcactatcttcgagagaacagagagaaatttgaagcgtttatagaaggatcatttgaagaatatttaaagcgtttggaaaatccacaggaatgggtaggacaagtggaaataagtgccctttctcttatgtacaggaaagattttataatttatcgggaaccaaatgtttctccttcacaagtaacagaaaataattttcctgaaaaggtgttactgtgtttttcaaatggaaatcattatgatattgtgtatcccataaagtataaagaaagctctgctatgtgtcagtctctcctttatgaattgctgtatgagaaggtatttaaaactgatgttagtaaaattgtgatggaactagacacgttggaagtagctgatgaagataacagtgaaatatcagattcagaggatgacagttgcaagagtaagactgctgctgctgctgctgatgtgaatggatttaaacctttgtcaggcaatgagcagctgaagaacaatgggaactctactagcctgcctttgtctagaaaggttcttaagtcactcaatcctgcagtctatagaaatgtggaatatgaaatttggctgaagtctaaacaagctcagcaaaaacgtgattattccattgctgctggcttacaatatgaagttggagacaaatgtcaagttaggttggatcacaatggaaaatttttgaatgcagatgttcaaggaattcattctgagaatggaccagttttggttgaagaactgggaaagaagcacacatcaaagaacctcaaggcacctcccccagaaagctggaacacagtgtcagggaagaagatgaaaaaaccttccacttctggacaaaatttccattctgatgtggattacagagggccaaagaatccaagcaagccaataaaagccccatcagcactacctcctcgactgcagcatccttcaggagtaagacaacatgcgttctctagtcattcttcagggtcacagtctcagaaattctccagtgagcacaaaaatcttagccggacaccttcacagatcataagaaaacctgatcgtgaaagagttgaggattttgatcacacaagtcgagaatctaactatttcggcctttccccagaagagcgcagagagaagcaagctatagaagaatcccgtttactctatgagattcagaacagagatgaacaggctttcccagccctttccagctcatcagtcaatcagtcagcttctcagagtagcaatccatgtgtccagagaaaatcatcacatgtaggtgatagaaaaggaagcaggcggagaatggatacagaagaacgaaaagacaaagactctattcatggacatagtcagttggataaaagacccgaaccaagcacattggagaatattactgatgataaatatgcaacagtttcatcaccatcaaagtcaaagaagttagagtgcccttctcctgcggaacaaaagccagcagaacatgtgtctttgtcaaatccagctccccttctagtttctccagaggtacatctaactcctgcggtgccttctttaccagccactgtgccagcctggccaagtgaacctacaacttttggaccaacaggtgtccctgctccaattcccgttttgtcagtgacacagactttgaccactggacctgattcagctgtatcccaagctcatttaacaccctctccagttcctgtgtcaatacaggcagttaaccagcccttgatgcctttgcctcagacattgagcctttatcaagacccactctatcctgggtttccttgtaatgaaaagggagatcgagccattgtaccaccttattcactgtgtcagactggggaggacctacctaaagataagaatattcttcgattcttcttcaatcttggtgtgaaggcatacagttgtcctatgtgggccccacattcttacctgtaccctctgcaccaggcctacctggcagcctgcaggatgtacccaaaggtccctgtccctgtttatcctcataatccctggttccaagaggctcctgctgctcagaatgaaagtgattgtacctgtactgatgcccactttcctatgcagactgaggccagtgttaatggtcaaatgccacagccagagattggaccgccgacattttcttcacctctggttatccctccatctcaggtgtctgaaagtcatggacaattgtcttaccaggctgatcttgaatctgagacccctgggcagcttctgcatgctgattatgaagagtcactaagtggcaagaatatgttcccccagccatcttttggacccaatccattcttaggcccagttcctattgcacctcctttctttcctcatgtttggtatgggtacccttttcagggattcatagaaaatccagtaatgaggcagaatattgtcctgccctctgatgaaaaaggagaattggatctgtctctggaaaatctggatctgtctaaagattgtggttcagtttcaacagtagatgagtttccagaagccaggggtgaacatgtacattctctccctgaagcaagtgtgagcagtaagccggacgaaggccggacagagcaatcttcccagacacgaaaggcagatacggcattggcttccatccctcctgtagcagagggaaaggctcatcctcccactcagattctaaacagagagagagaaactgtgcctgttgaacttgaacctaaaaggaccattcaaagcctgaaagaaaaaacagaaaaagtaaaagatcctaagactgctgctgatgtggtcagccctggggccaactctgttgatagcagagtgcaaagaccaaaagaagagagttcagaagatgaaaatgaagtgtctaatattttgagaagtggtagatccaagcagttctataatcaaacttatggaagcaggaagtacaaaagtgattggggctattctggtaggggtggatatcaacatgtgagaagtgaggagtcctggaaaggacagccaagcagaagtcgggatgaaggttatcagtaccatcgaaatgtcagagggcgaccatttaggggagataggaggagatcagggatgggagatggccataggggacagcacacttgatggttgttgccgaagtattttctaacagaaactcttaggtggaatgtttctgaaggctttaaaaaaaatacaataaagtaaaaaccgcagttggaactctttcctctccccagccccccttaccttcactcccatactggacaagacattttggacatgagttcaagggggcaggttaattcctggcattgccagttttcttcattcagaatctgtttgttgatcaagtgactgtccccgtaaaaagtagaagataagtttgttaaagtattttttataaacagcttaatataaaacattatagatttagtgtttggcttttttccttataagtttataagtttgatttcagatgttggaaatgtgtgctttatagtgtttactaaagtgacaagaaaatataccatttgacacactatagattccaaacataacgttgcaccaaatagaaatgtatattttattatgcaatgccttagtcataaactgggctcaaacaattctcagcctaaaacactgttgtcttttaaaatgcttccaacccaaaggcctttcatctcaatatctgtcaaacttgaataatgtcttctctttaatattcacataaggcagcctattaactgtgtcttagcaatgttgtatatagttcttttaatattcataaggtatatttttgaattttggtatttgttgagattgcatagaagaatagtaggaaatccaatgaaatggctgtttccaccaagaattcttagcactggtgtaaatatcatggtgcctactcgaaagaaatgtagatgctatgcattttgaaaataatctgcatcagttagaactgcagaagtttttttaatgccactttaacactaatgcactgacagattctaaatattttgtgagaagaaatgttaaaaatttttagcttgacaggtttctagagttgttttcttcctcccccccccccccgcaccattggttgtgtatcactttcactttacacttgcatgttctacttgtcagggctggaactattgtatagaagataatatgattgtgacttctagttcttttctagaggatgctgctagaaaatggttttgctttgtattttatagcttgttacccttaggtaggtaacatcttacattctgttttcttccagtctttgcagtattcactagaggttccctttgcatgttgcactctgttctcatttggagattgaactctgaattaacacagtattcattcatctgtgttattttgtaaaaataactgtagcttatattctttatttgtgcataccaatgtgaaaatccactcttttattatgttgagattatcttctgatcaggaagtttgagtgctatgcaaataacatagtagtaatttctctttgcatgccatgtgtaatatacctagccaaaaccagatgcggtgactttctttttttgtaaagcaaattacttaagaaaatacaattcacttgaatttgacaaactgaaacagatgggttttctgggttctctgataacctatgggaatgtttggatgccagttgggctagtgaatcgccactgtactgtaataatggttatttacctctgtgctgttttaattacctaacgtctgtgtaactgctgatttgagtagtgattagcatttagataatgtaacaggattttagagagcactttgaaagataacattttattatgatggtgctaggtaaaaaattgtaaagactgggatggttgtgtggaaaacttttcttgagagaacctattgaaaggaatttgttgtcaccttcttaactagaatagttgttgaaggtaccgcttaagccatttttttcttaacatcggtggctcagttaaggaatgagaagatagagggtcctccactttcagctcatgcttttttatgtaggactagcttacctgattttaatgaaaatcacattttgatacaaacaccagatttgaaagttcaatgtgtttgatctcaggagtccaaaataagttgttgcttctagtgtcctgcattttattgactggggtttgatctcagcttctgaaaatgtttaaaaattggaaggaaatactactcatatcttcattgtcactttgtcttacctcaattgagtaacagaatatagctcctgaaggaaacactgatttgctttctgtttcccatatctcacctctaggatatgatggaagaagtgcttgaaagagaattttagcagatggtacttttctcagtgacctctggaataaaagaactgacttttgatagttttaaaattaatctttgcatgaaggttggtttcgctttttttcctttaagtttgtttttaaatgtattagtccaggggattttgccttatgctgaggtcaaactaaggataagcaagcttttgtccttcattttaactgttatgtcatactgttatgttgacatatttctttataagagaatagaggcaaaagtatagaactgaggatcatttgtatttttgagttggaaattatgaaacttcaccatattatgatcatacatattttgaagaacagactgaccaaagctcacctgttttttgtgttaggtgctttggctgaacttgattccagcccccttttccctttggtgttgtgtatgtctcttcatttcctctcaaatcttcaactcttgccccatgtctccttggcagcaggatgctggcatctgtgtagtcctcatactgtttactgataacccacaaattcattttcatggcagacctaagctcagaccctgccttgtcctggcaagcataggttttcccagaccacaatgctgatatatcttatttaatgcagactgtattcttgcagcgtgttgtttcctttgtgactcaaggttgaattaaaatgcctgtgaactgcaaacttgcttatgattgacttggtgcaataaagttcctttctaaccatttctggtttagaaaacattcagccatcctagaaactagcaatatttatttttgcctctttcgttttaccttcatttttagatgaggtaaatgttttgtcttttacttaagggtactaagcaaggtccactctagtgtagctgaagagaatgcatatttggctacactatttctgtttactgtattttgcttcctactttatgtctaaatgctattgtttgtttaaaatcctaataatgtctcatttccaatatgttattttcagataactaaggttttgctactaatgtcagccatttactctcccactaattgggattattttttaaaagaggtctttctccccgaaatacaagttttagaaaatcttagaagaggggtgggtgcatgtcttaatgctgggaagcggcaactttggggttgaacttacttgaatggattaaaaattgcattgtgttacagagctagaaaattttatgtatgaaaaacgataatagccttacactgagtacaaataatactttaagagcatgtgaagatgtgatcatttgtgatgttacttgtaaaaaaaagtatatatacatatcttttgaagtgttaaaaggaaactagtactttatattctttatcatatcactttttgtaagtgttgaatatattcctgtttatttttctatgttctgttttgtagccttaagaagtgtttcaaacatatctgaatgtataaaataagagtaaatgccctacatggtgtgatgctgcattatatataaaactgtgtgcatatattaaattttgtctcttgat

SEQ ID NO: 278336 - DNA, 864 bp, Artificial Sequence
  derived and/or modified sequence
ttacactaagaactctttgttacatcaggtattgcactctcagtctcgccatgttgaagtcagaatggcctgtattcactatcttcgagagaacagagagaaatttgaagcgtttatagaaggatcatttgaagaatatttaaagcgtttggaaaatccacaggaatgggtaggacaagtggaaataagtgccctttctcttatgtacaggaaagattttataatttatcgggaaccaaatgtttctccttcacaagtaacagaaaataattttcctgaaaaggtgttactgtgtttttcaaatggaaatcattatgatattgtgtatcccataaagtataaagaaagctctgctatgtgtcagtctctcctttatgaattgctgtatgagaaggtatttaaaactgatgttagtaaaattgtgatggaactagacacgttggaagtagctgatgaagataacagtgaaatatcagattcagaggatgacagttgcaagtaagaatgaaatcctaaaatacctttcttagtgccatacaaggaaagttaagtaaatgtctttacatttcagtaaatgtctttctataacatatattgaggtattaatggtattcataaaatacagcagtctgctgaagtttctttatccctgtcactaattttacctaatttctattatgggactgtttgttttgaaagttggtgtttttggttgatgagaatttacgtctgcaatctagatgcatatttgtagaataaatttggtcctacctatatgtgtgtgtattgtaaaattttaaagttaacttgtcaattgttcacatacccagtaatgaaataaaatggccgtttggatttccttca

SEQ ID NO: 278337 - DNA, 3345 bp, Artificial Sequence
  derived and/or modified sequence
atggaagctgccgtcggggttcccgatgggggagatcagggaggggcagggccacgggaggatgccactcctatggacgcctacttaaggaaactggggctttatcggaaactcgtcgccaaagatggcagttgcctgtttagggccgtggccgaacaggtcctgcattcacagagcagacacgtcgaagtgcgcatggcctgcatacattacttgcgggaaaatcgggagaagtttgaagcatttatcgaaggaagttttgaggagtatttaaaacggttagagaacccccaggagtgggtaggtcaagtggagatcagcgctttgtcgctgatgtatcgcaaagactttattatatatagagaaccgaacgtttcaccatctcaggtaacagagaacaatttccccgagaaggtcttgctctgtttcagcaatggtaatcactatgatatcgtgtaccctatcaagtacaaggagtcctctgccatgtgccaatctttgctgtacgaactgctgtacgaaaaagtgttcaaaaccgacgtctccaaaatcgtcatggagttagacactctcgaggtggcagacgaggataattccgagatttcagactctgaggacgactcctgtaaatctaagaccgctgctgctgccgcagatgtaaatggcttcaaacctcttagtgggaacgaacagcttaagaacaatggcaattccaccagtctcccccttagcaggaaagtgctgaaatcgctgaacccggcagtctaccggaatgtggagtatgagatctggctgaagagcaagcaggcccagcagaagagagattattcaatcgccgcaggactgcagtacgaggttggagataaatgtcaagtgcgcttggaccacaatgggaagttcctgaacgctgatgtacaggggatccattccgagaacggacctgtcctggtagaagagctgggcaaaaagcatacctctaagaatcttaaggcaccgcctcctgaatcgtggaataccgtatccggaaagaaaatgaaaaagccaagcacctccggccagaacttccacagtgacgtggactaccgtggtccaaagaacccctcaaaaccaatcaaggccccttcagcactgccaccaaggctccaacatccaagcggggtcaggcagcacgccttttcatcccacagcagtggcagtcagtcccagaaattcagctcggagcacaaaaacctgagcagaacccccagccagattatccgcaagcctgaccgggagcgggttgaggactttgatcatacctcccgagagtctaattatttcggtctgagcccggaagaaagacgcgagaaacaggcaattgaggaatcgagattattatacgaaatccaaaatcgcgatgagcaggcatttcctgccctgagtagtagcagcgtgaatcagagcgcttcccagtccagcaacccttgcgtgcaacgaaaatcatcccacgttggggaccgcaagggctctagaaggcgcatggataccgaagaacggaaggacaaagactctatccacggacattcgcagctggataaacgacccgagccttctaccctcgaaaatataaccgacgacaagtatgcaacagtttccagtcctagcaagtccaaaaaattagagtgcccaagccctgcagagcaaaagcctgctgaacacgtgtctcttagtaatccggctcctctactggttagcccggaggtccacctcacccctgcagtccccagcctccccgctaccgtgcccgcatggccaagcgagcccaccacatttggccctaccggagtgcccgctcccatccccgtgctctccgtgacccagacacttaccaccggccctgactctgcggtgtcgcaagcgcacctgacaccgtcaccggtgccagtgagcatccaagcagtaaaccaacccttaatgcctctcccccagaccctgtcattataccaggaccccctgtaccctggattcccctgtaacgagaagggtgaccgcgctattgtcccaccttatagcttatgccagactggagaggatctcccgaaagataaaaacatcctgcgctttttctttaatctgggagttaaggcctattcttgccccatgtgggcccctcatagttacctgtatcccttgcaccaagcatatttggccgcttgccgtatgtacccaaaggtccccgtaccagtgtatccccataacccatggtttcaggaagcccctgcagcccagaatgagtcagactgcacttgtacggacgctcacttccctatgcagactgaagcctcagtaaatggacaaatgccacagcctgagatcggaccaccgactttctcctctccactggtgatccctccatctcaagtgtctgagtcccacggtcaactcagctatcaggctgatctagagtccgaaacgcctggtcagctactgcatgccgactatgaagaatcactgtcaggaaaaaatatgttcccacagccatctttcgggccaaacccattcttgggcccagtccccatcgctcctccatttttccctcacgtgtggtatggctacccgtttcagggattcatcgagaaccccgttatgcgccaaaatattgtgttgccgtctgacgagaagggggagttagacctgagcctggagaatttggacctttccaaggattgcggatcagtgagtactgttgatgagtttcccgaggcacgcggagaacacgtgcactctctgcctgaagcttccgtatccagtaagccggacgaaggtaggaccgaacaatcaagccaaactcgcaaggcagataccgctctcgcgtcaatccctcctgtagcggaaggcaaggctcacccacctacgcagatcttgaaccgcgaacgcgagactgtacccgtggagctggaacccaaaagaacgatccaatctctcaaggagaagacggaaaaagtaaaggatccgaagaccgcagcagacgtcgtgtcgcctggggctaatagtgtcgattctcgggtccagaggccaaaggaggaatcctcggaagatgaaaatgaagtctccaacatactgcggagcggcaggagcaagcagttctacaatcaaacctatggctctcgaaaatataaaagcgattgggggtactccggcagaggcggatatcaacacgtgaggtcggaggagtcttggaaagggcagccctctagaagcagagatgagggctatcagtaccacagaaatgtcaggggtcgtccatttcgcggagacagaaggcgttcggggatgggggacggtcaccgtggacaacacacctag

SEQ ID NO: 278338 - DNA, 3345 bp, Artificial Sequence
  derived and/or modified sequence
atggaggccgccgtgggcgtgcccgacggcggcgaccagggcggcgccggccccagagaggacgccacccccatggacgcctacctgagaaagctgggcctgtacagaaagctggtggccaaggacggcagctgcctgttcagagccgtggccgagcaggtgctgcacagccagagcagacacgtggaggtgagaatggcctgcatccactacctgagagagaacagagagaagttcgaggccttcatcgagggcagcttcgaggagtacctgaagagactggagaacccccaggagtgggtgggccaggtggagatcagcgccctgagcctgatgtacagaaaggacttcatcatctacagagagcccaacgtgagccccagccaggtgaccgagaacaacttccccgagaaggtgctgctgtgcttcagcaacggcaaccactacgacatcgtgtaccccatcaagtacaaggagagcagcgccatgtgccagagcctgctgtacgagctgctgtacgagaaggtgttcaagaccgacgtgagcaagatcgtgatggagctggacaccctggaggtggccgacgaggacaacagcgagatcagcgacagcgaggacgacagctgcaagagcaagaccgccgccgccgccgccgacgtgaacggcttcaagcccctgagcggcaacgagcagctgaagaacaacggcaacagcaccagcctgcccctgagcagaaaggtgctgaagagcctgaaccccgccgtgtacagaaacgtggagtacgagatctggctgaagagcaagcaggcccagcagaagagagactacagcatcgccgccggcctgcagtacgaggtgggcgacaagtgccaggtgagactggaccacaacggcaagttcctgaacgccgacgtgcagggcatccacagcgagaacggccccgtgctggtggaggagctgggcaagaagcacaccagcaagaacctgaaggcccccccccccgagagctggaacaccgtgagcggcaagaagatgaagaagcccagcaccagcggccagaacttccacagcgacgtggactacagaggccccaagaaccccagcaagcccatcaaggcccccagcgccctgccccccagactgcagcaccccagcggcgtgagacagcacgccttcagcagccacagcagcggcagccagagccagaagttcagcagcgagcacaagaacctgagcagaacccccagccagatcatcagaaagcccgacagagagagagtggaggacttcgaccacaccagcagagagagcaactacttcggcctgagccccgaggagagaagagagaagcaggccatcgaggagagcagactgctgtacgagatccagaacagagacgagcaggccttccccgccctgagcagcagcagcgtgaaccagagcgccagccagagcagcaacccctgcgtgcagagaaagagcagccacgtgggcgacagaaagggcagcagaagaagaatggacaccgaggagagaaaggacaaggacagcatccacggccacagccagctggacaagagacccgagcccagcaccctggagaacatcaccgacgacaagtacgccaccgtgagcagccccagcaagagcaagaagctggagtgccccagccccgccgagcagaagcccgccgagcacgtgagcctgagcaaccccgcccccctgctggtgagccccgaggtgcacctgacccccgccgtgcccagcctgcccgccaccgtgcccgcctggcccagcgagcccaccaccttcggccccaccggcgtgcccgcccccatccccgtgctgagcgtgacccagaccctgaccaccggccccgacagcgccgtgagccaggcccacctgacccccagccccgtgcccgtgagcatccaggccgtgaaccagcccctgatgcccctgccccagaccctgagcctgtaccaggaccccctgtaccccggcttcccctgcaacgagaagggcgacagagccatcgtgcccccctacagcctgtgccagaccggcgaggacctgcccaaggacaagaacatcctgagattcttcttcaacctgggcgtgaaggcctacagctgccccatgtgggccccccacagctacctgtaccccctgcaccaggcctacctggccgcctgcagaatgtaccccaaggtgcccgtgcccgtgtacccccacaacccctggttccaggaggcccccgccgcccagaacgagagcgactgcacctgcaccgacgcccacttccccatgcagaccgaggccagcgtgaacggccagatgccccagcccgagatcggcccccccaccttcagcagccccctggtgatcccccccagccaggtgagcgagagccacggccagctgagctaccaggccgacctggagagcgagacccccggccagctgctgcacgccgactacgaggagagcctgagcggcaagaacatgttcccccagcccagcttcggccccaaccccttcctgggccccgtgcccatcgccccccccttcttcccccacgtgtggtacggctaccccttccagggcttcatcgagaaccccgtgatgagacagaacatcgtgctgcccagcgacgagaagggcgagctggacctgagcctggagaacctggacctgagcaaggactgcggcagcgtgagcaccgtggacgagttccccgaggccagaggcgagcacgtgcacagcctgcccgaggccagcgtgagcagcaagcccgacgagggcagaaccgagcagagcagccagaccagaaaggccgacaccgccctggccagcatcccccccgtggccgagggcaaggcccacccccccacccagatcctgaacagagagagagagaccgtgcccgtggagctggagcccaagagaaccatccagagcctgaaggagaagaccgagaaggtgaaggaccccaagaccgccgccgacgtggtgagccccggcgccaacagcgtggacagcagagtgcagagacccaaggaggagagcagcgaggacgagaacgaggtgagcaacatcctgagaagcggcagaagcaagcagttctacaaccagacctacggcagcagaaagtacaagagcgactggggctacagcggcagaggcggctaccagcacgtgagaagcgaggagagctggaagggccagcccagcagaagcagagacgagggctaccagtaccacagaaacgtgagaggcagacccttcagaggcgacagaagaagaagcggcatgggcgacggccacagaggccagcacacctag

SEQ ID NO: 278339 - DNA, 3473 bp, Artificial Sequence
  derived and/or modified sequence
agcacttgaagttcaggcagcgagagttgacatggggccagggctgcgcccctggggcgggttgaagacagggtgagtctcttgatattcaggaaatcatcgcgcacccagtcaccagcgttcgggagcctgtcgcagcgggaccgacggaatccggagcaggcgacagggcgcagaagcgggatgtacttctgttggggcgccgactccagggagctgcagcgccggaggacggcgggcagccccggggctgagctactgcaggcggccagcggggagcgccactctctgctgctgctgaccaaccacagggtcctctcgtgcggagacaacagcaggggtcagctgggccgcaggggcgcgcagcgcggggagctgccagaaccaattcaggcattggaaaccctaattgttgatctcgtgagctgcgggaaggagcactccctggctgtgtgccacaaaggaagggtcttcgcatggggagctggttctgaagggcagctggggattggagaattcaaggaaataagtttcacacctaagaaaataatgactctgaatgatataaaaataatacaagtttcctgtggacactaccactccctggcattatcaaaagatagccaagtgttttcgtggggaaagaacagccatgggcagctgggcttggggaaggagttcccctcccaagccagcccgcagagggtgaggtccctggaggggatcccactggctcaggtggctgccggaggggctcacagctttgccctgtctctctgtgggacttcgtttggctggggaagtaacagtgccgggcagctggccctcagtgggcgtaatgtcccagtgcaaagcaacaagcctctctcagtcggtgcactgaagaatctaggtgtggtttatatcagctgtggtgatgcacacactgcggtgcttacccaggacgggaaagtgttcacatttggagacaatcgctctggacagctgggatacagccccactcctgagaagagaggtccacaacttgtggaaagaattgatggcctagtttcgcagatagattgtggaagacttcgtggatgttcaagtcaaacacatttttgctggaacatatgccaactttgtgacaactcatcagtgaaattagaatgatattttcatctcctgcttgtctgactgcaagttttttaaagaaaagaggaactggagaaacgacttccattgatgtggacttagaaatggcaagagataccttcaagaagttaacaaaaaaggaatggatttcttccatgataactacgtgtctcgaggatgatctgctcagagctcttccatgccattctccacaccaagaagctttatcagttttcctcctgctcccagaatgtcctgtgatgcatgattctaagaactggaagaacctggtggttccatttgcaaaggctgtgtgtgaaatgagtaaacaatctttgcaagtcctaataaacaaagctaactgtcgactaccagaaaatactttcaacataaatgaactctccaacttattaaacttttatatagatagaggaagacagctctttcgggataaccacctgatacctgcagaaacccccagtcctgttattttcagtgattttccatttatctttaattcgctatccaaaattaaattattgcaagctgattcacatataaagatgcagatgtcagaaaagaaagcatacatgcttatgcatgaaacaattctgcaaaaaaaggatgaatttcctccatcacccagatttatacttagagtcagacgaagtcgcctggttaaagatgctctgcgtcaattaagtcaagctgaagctactgacttctgcaaagtattagtggttgaatttattaatgaaatttgtcctgagtctggaggggttagttcagagttcttccactgtatgtttgaagagatgaccaagccagaatatggaatgttcatgtatcctgaaatgggttcctgcatgtggtttcctgccaagcctaaacctgagaagaaaagatatttcctctttggaatgctgtgtggactctccttattcaatttaaatgttgctaaccttcctttcccactggctctgtataaaaaacttctggaccaaaagccatcattggaagatttaaaagaactcagtcctcggttggggaagagtttgcaagaagttctagatgatgctgctgatgacattggagatgcgctctgcatacgcttttctatacactgggaccaaaatgatgttgacttaattccaaatgggatctccatacctgtggaccaaaccaacaagagagactatgtttctaagtatattgattacattttcaacgtctctgtaaaagcagtttatgaggaatttcagagaggattttatagagtctgtgagaaggagatacttagacatttctaccctgaagaactaatgacagcaatcattggaaatactgattatgactggaaacagtttgaacagaattcaaagtatgagcaaggataccaaaaatcacatcctactatacagttgttttggaaggctttccacaaactaaccttggatgaaaagaaaaaattcctctttttccttacaggacgtgataggctgcatgcaagaggcatacagaaaatggaaatagtatttcgctgtcctgaaactttcagtgaaagagatcacccaacatcaataacttgtcataatattctctccctccctaagtattctacaatggaaagaatggaggaagcacttcaagtagccatcaacaacaacagaggatttgtctcacccatgctcacacagtcataatcacctctgagagactcagggtgggctttctcacacttggatccttctgttcttccttacacctaaataatacaagagattaatgaatagtggttagaagtagttgagggagagattgggggaatggggagatgatgatgatggtcaaagggtgcaaaatctcacacaagactgaggcaggagaatagggtacagagatagggatctaaggatgacttggacacactccctggcactgaagagtctgaacactggcctgtgattggtccattccaggaccttcatttgcataaggtatcaaaccacatcagcctctgattggccatgggccagacctgcactctggccaatgattggttcattccaggacattcatttgcataaggagtcaaaccacaccagtcttggattggctgtgagccaattcacctcagtctctaattggctgtgagtcagtctttcatttacatagggtgtaaccatcaagaaacctctacagggtacttaagccccagaagattttgctaccagggctcttgagccacttgctctagcccactcccaccctgtggaatgtactttcacttttgctgcttcactgccttgtgctccaataaatccactccttcaccaccc

SEQ ID NO: 278340 - DNA, 3692 bp, Artificial Sequence
  derived and/or modified sequence
agcacttgaagttcaggcagcgagagttgacatggggccagggctgcgcccctggggcgggttgaagacagggtgagtctcttgatattcaggaaatcatcgcgcacccagtcaccagcgttcgggagcctgtcgcagcgggaccgacggaatccggagcaggcgacagggcgcagaagcgggatgtacttctgttggggcgccgactccagggagctgcagcgccggaggacggcgggcagccccggggctgagctactgcaggcggccagcggggagcgccactctctgctgctgctgaccaaccacagggtcctctcgtgcggagacaacagcaggggtcagctgggccgcaggggcgcgcagcgcggggagctgccagaaccaattcaggcattggaaaccctaattgttgatctcgtgagctgcgggaaggagcactccctggctgtgtgccacaaaggaagggtcttcgcatggggagctggttctgaagggcagctggggattggagaattcaaggaaataagtttcacacctaagaaaataatgactctgaatgatataaaaataatacaagtttcctgtggacactaccactccctggcattatcaaaagatagccaagtgttttcgtggggaaagaacagccatgggcagctgggcttggggaaggagttcccctcccaagccagcccgcagagggtgaggtccctggaggggatcccactggctcaggtggctgccggaggggctcacagctttgccctgtctctctgtgggacttcgtttggctggggaagtaacagtgccgggcagctggccctcagtgggcgtaatgtcccagtgcaaagcaacaagcctctctcagtcggtgcactgaagaatctaggtgtggtttatatcagctgtggtgatgcacacactgcggtgcttacccaggacgggaaagtgttcacatttggagacaatcgctctggacagctgggatacagccccactcctgagaagagaggtccacaacttgtggaaagaattgatggcctagtttcgcagatagattgtggaagttatcacaccctggcatatgtgcacaccactggtcaggtggtatcttttggtcatggaccaagtgacacaagcaagccaactcatccggaggccctgacagagaactttgacattagctgcctgatttctgctgaagacttcgtggatgttcaagtcaaacacatttttgctggaacatatgccaactttgtgacaactcatcagtgaaattagaatgatattttcatctcctgcttgtctgactgcaagttttttaaagaaaagaggaactggagaaacgacttccattgatgtggacttagaaatggcaagagataccttcaagaagttaacaaaaaaggaatggatttcttccatgataactacgtgtctcgaggatgatctgctcagagctcttccatgccattctccacaccaagaagctttatcagttttcctcctgctcccagaatgtcctgtgatgcatgattctaagaactggaagaacctggtggttccatttgcaaaggctgtgtgtgaaatgagtaaacaatctttgcaagtcctaataaacaaagctaactgtcgactaccagaaaatactttcaacataaatgaactctccaacttattaaacttttatatagatagaggaagacagctctttcgggataaccacctgatacctgcagaaacccccagtcctgttattttcagtgattttccatttatctttaattcgctatccaaaattaaattattgcaagctgattcacatataaagatgcaggctggagtacaatggtgcaatctcagctcaccacaacctctgcctcccgggttcaagcgattcttctgcctcagcctcccaaatgtcagaaaagaaagcatacatgcttatgcatgaaacaattctgcaaaaaaaggatgaatttcctccatcacccagatttatacttagagtcagacgaagtcgcctggttaaagatgctctgcgtcaattaagtcaagctgaagctactgacttctgcaaagtattagtggttgaatttattaatgaaatttgtcctgagtctggaggggttagttcagagttcttccactgtatgtttgaagagatgaccaagccagaatatggaatgttcatgtatcctgaaatgggttcctgcatgtggtttcctgccaagcctaaacctgagaagaaaagatatttcctctttggaatgctgtgtggactctccttattcaatttaaatgttgctaaccttcctttcccactggctctgtataaaaaacttctggaccaaaagccatcattggaagatttaaaagaactcagtcctcggttggggaagagtttgcaagaagttctagatgatgctgctgatgacattggagatgcgctctgcatacgcttttctatacactgggaccaaaatgatgttgacttaattccaaatgggatctccatacctgtggaccaaaccaacaagagagactatgtttctaagtatattgattacattttcaacgtctctgtaaaagcagtttatgaggaatttcagagaggattttatagagtctgtgagaaggagatacttagacatttctaccctgaagaactaatgacagcaatcattggaaatactgattatgactggaaacagtttgaacagaattcaaagtatgagcaaggataccaaaaatcacatcctactatacagttgttttggaaggctttccacaaactaaccttggatgaaaagaaaaaattcctctttttccttacaggacgtgataggctgcatgcaagaggcatacagaaaatggaaatagtatttcgctgtcctgaaactttcagtgaaagagatcacccaacatcaataacttgtcataatattctctccctccctaagtattctacaatggaaagaatggaggaagcacttcaagtagccatcaacaacaacagaggatttgtctcacccatgctcacacagtcataatcacctctgagagactcagggtgggctttctcacacttggatccttctgttcttccttacacctaaataatacaagagattaatgaatagtggttagaagtagttgagggagagattgggggaatggggagatgatgatgatggtcaaagggtgcaaaatctcacacaagactgaggcaggagaatagggtacagagatagggatctaaggatgacttggacacactccctggcactgaagagtctgaacactggcctgtgattggtccattccaggaccttcatttgcataaggtatcaaaccacatcagcctctgattggccatgggccagacctgcactctggccaatgattggttcattccaggacattcatttgcataaggagtcaaaccacaccagtcttggattggctgtgagccaattcacctcagtctctaattggctgtgagtcagtctttcatttacatagggtgtaaccatcaagaaacctctacagggtacttaagccccagaagattttgctaccagggctcttgagccacttgctctagcccactcccaccctgtggaatgtactttcacttttgctgcttcactgccttgtgctccaataaatccactccttcaccaccc

SEQ ID NO: 278341 - DNA, 960 bp, Artificial Sequence
  derived and/or modified sequence
atggagcttatggacgccaatttatgccaagtgattcagatggaactggaccatgagcgcatgtcctacctcctatatcaaatgttatgcggcatcaagcacctgcacagtgccggcatcatacaccgggacctgaagcccagcaacatcgtggtgaaaagcgattgtactctgaaaatcttggacttcgggctcgccagaaccgctggtacatctttcatgatgacgccttatgttgtcaccagatattacagggccccagaggtaatcctaggcatggggtacaaggaaaacgtggacatatggtcagtcgggtgcattatgggcgaaatggttagacataagatactgtttccaggaagggactacatagatcaatggaataaagtaatagagcagctcgggactccttgtccagagtttatgaaaaaactgcagcctactgtgcggaactacgtggaaaacaggccaaaatacgccggattgaccttccctaagctgttccccgactctcttttccctgcagattccgagcataataaactcaaggcttcacaggcacgggatctgttgagtaaaatgctggtcatcgacccagccaaaaggataagcgtggatgacgctctgcagcacccctatattaatgtctggtacgaccctgcagaagtggaagcccctccaccacaaatttacgacaaacagctggacgagcgggagcatactattgaggagtggaaggaattgatatataaggaggtgatgaactctgaggagaagacgaagaatggggtggtgaagggacagcctagccctagcggagctgcagtgaacagcagcgaaagcctcccacctagctctagcgtgaatgacatctcctctatgtccactgatcagaccctggcctcagatacagactcttctctggaggcctcagccgggccattgggatgctgcaggtag

SEQ ID NO: 278342 - DNA, 960 bp, Artificial Sequence
  derived and/or modified sequence
atggagctgatggatgccaacctgtgccaggtgatccagatggagctggaccacgagaggatgagctacctgctgtaccagatgctgtgtggcatcaagcacctgcacagcgctggcatcatccaccgggacctgaagcccagcaacatcgtggtgaagagtgactgcaccctgaagatcctggactttggcctggccaggacagctggcaccagcttcatgatgaccccctacgtggtgacccgctactaccgggcccctgaggtgatcctgggcatgggctacaaggaaaatgtggacatctggagcgtgggctgcatcatgggagagatggtgcgccacaagatcctcttccctggccgggactacatcgaccagtggaacaaggtgattgagcagctgggcaccccctgcccagagttcatgaagaagctgcagcccaccgtgaggaactacgtggagaaccggcccaagtatgccggcctgaccttccccaagctgttcccagacagcctcttccctgctgacagcgagcacaacaagctgaaggccagccaggcccgggacctgctgagcaagatgctggtgattgatcctgccaagaggatctctgtggatgatgccctgcagcacccctacatcaacgtgtggtatgaccctgctgaggtggaggcccccccaccccagatctatgacaagcagctggatgagcgggagcacaccatcgaggagtggaaggagctgatctacaaggaggtgatgaacagcgaggagaagaccaagaatggagtggtgaagggccagcccagccccagcggggctgctgtgaacagcagcgagagcctgccccccagcagctctgtgaatgacatcagctccatgagcacagaccagaccctggccagtgacacagacagcagcctggaggccagcgctggccccctgggctgctgcaggtag

SEQ ID NO: 278343 - DNA, 960 bp, Artificial Sequence
  derived and/or modified sequence
atggagctgatggacgccaacctgtgccaggtgatccagatggagctggatcatgaacgaatgtcctatctgctatatcagatgctgtgcggaataaaacacctgcactctgccggaatcatccaccgcgacctaaaaccatctaacatagtggtaaaatctgattgcaccctgaagattcttgattttgggctcgctcgcacggccggaacatcattcatgatgacaccctatgtggtgacccggtactaccgggcacccgaggtgattctgggaatggggtataaggaaaacgtcgatatatggagcgttggttgtatcatgggagagatggtgagacacaaaatactctttcccggcagagactatattgaccaatggaacaaggtgatcgagcaactaggaaccccgtgtcccgaattcatgaagaaactccaaccaaccgtcagaaattatgtggaaaatcgaccgaaatacgctggacttactttccccaaattattcccagattccctctttcctgccgatagcgaacacaataagcttaaggcatcgcaggcccgggatcttctttcaaaaatgctcgtcatcgatcccgccaagcggattagtgttgacgatgccctgcagcacccatacattaatgtttggtatgatccggcagaagtcgaggcacctcctcctcagatctacgataagcagttggatgagagggagcatacgattgaggagtggaaagaattgatatacaaggaggttatgaattcagaagagaagactaagaacggggtcgtgaagggccagccttcgccttccggcgctgctgtgaactccagtgagagcctgccccccagttcgagtgttaatgacatctcaagcatgtcgacagaccagaccctggccagcgacaccgattctagtctggaggccagcgccgggccccttgggtgttgcaggtag

SEQ ID NO: 278344 - DNA, 960 bp, Artificial Sequence
  derived and/or modified sequence
atggaactgatggacgcaaacctctgtcaggtcatccagatggagctagaccacgaaagaatgtcctacctactgtaccagatgctgtgcggaatcaagcacctgcactcggcaggtattatccatcgggacctgaagccctctaacatagtggtgaagtctgattgtaccctcaagatcttagattttggccttgccagaacagccggaacttccttcatgatgacgccctacgttgttaccagatactaccgggcacccgaagtcatcctggggatgggatataaagagaatgtggatatctggtccgtgggatgtattatgggcgagatggtgcgccacaaaatcctgtttccagggagggattacatcgaccagtggaataaggttatcgaacagctgggaacgccttgccccgagttcatgaagaaactgcagcccaccgtgcgtaattatgtggagaatagaccaaagtacgcgggtttaacattccctaaattattccccgactcacttttccctgcagattctgagcacaacaaattaaaagccagtcaggctcgagacttattgagcaagatgcttgtcatcgaccccgctaagcgtatttcagtggacgacgccctccagcacccatatataaatgtctggtatgatcccgctgaggtggaggctcctccaccccagatctatgacaagcagttggacgagcgcgaacacacaattgaagagtggaaggagctgatatacaaagaggtgatgaacagtgaggaaaaaactaagaacggtgtggtgaagggacaaccgtccccctccggagcagctgtgaattctagtgaaagcctacccccaagttcctcagtcaatgacatctcttccatgagcacagaccagactttagcaagcgataccgatagctcgttggaggccagtgccggaccgctgggatgctgcagatag

SEQ ID NO: 278345 - DNA, 960 bp, Artificial Sequence
  derived and/or modified sequence
atggagctgatggacgccaacctgtgccaggtgatccagatggagctggaccacgagagaatgagctacctgctgtaccagatgctgtgcggcatcaagcacctgcacagcgccggcatcatccacagagacctgaagcccagcaacatcgtggtgaagagcgactgcaccctgaagatcctggacttcggcctggccagaaccgccggcaccagcttcatgatgaccccctacgtggtgaccagatactacagagcccccgaggtgatcctgggcatgggctacaaggagaacgtggacatctggagcgtgggctgcatcatgggcgagatggtgagacacaagatcctgttccccggcagagactacatcgaccagtggaacaaggtgatcgagcagctgggcaccccctgccccgagttcatgaagaagctgcagcccaccgtgagaaactacgtggagaacagacccaagtacgccggcctgaccttccccaagctgttccccgacagcctgttccccgccgacagcgagcacaacaagctgaaggccagccaggccagagacctgctgagcaagatgctggtgatcgaccccgccaagagaatcagcgtggacgacgccctgcagcacccctacatcaacgtgtggtacgaccccgccgaggtggaggccccccccccccagatctacgacaagcagctggacgagagagagcacaccatcgaggagtggaaggagctgatctacaaggaggtgatgaacagcgaggagaagaccaagaacggcgtggtgaagggccagcccagccccagcggcgccgccgtgaacagcagcgagagcctgccccccagcagcagcgtgaacgacatcagcagcatgagcaccgaccagaccctggccagcgacaccgacagcagcctggaggccagcgccggccccctgggctgctgcagatag

SEQ ID NO: 278346 - DNA, 393 bp, Artificial Sequence
  derived and/or modified sequence
atgggcagactggacggcaaggtgatcatcctgaccgccgccgcccagggcatcggccaggccgccgccctggccttcgccagagagggcgccaaggtgatcgccaccgacatcaacgagagcaagctgcaggagctggagaagtaccccggcatccagaccagagtgctggacgtgaccaagaagaagcagatcgaccagttcgccaacgaggtggagagactggacgtgctgttcaacgtggccggcttcgtgcaccacggcaccgtgctggactgcgaggagaaggactgggacttcagcatgaacctgaacgtgagaagcatgtacctgatgatcaaggccttcctgcccaagatgctggcccagaagagcggcaacatcatcaactag

SEQ ID NO: 278347 - DNA, 351 bp, Artificial Sequence
  derived and/or modified sequence
atgggcagactggacggcaaggtgatcatcctgaccgccgccgcccagggcatcggccaggccgccgccctggccttcgccagagagggcgccaaggtgatcgccaccgacatcaacgagagcaagctgcaggagctggagaagtaccccggcatccagaccagagtgctggacgtgaccaagaagaagcagatcgaccagttcgccaacgaggtggagagactggacgtgctgttcaacgtggccggcttcgtgcaccacggcaccgtgctggactgcgaggagaaggactgggacttcagcatgaacctgaacgtgagaagcatgtacctgatgatcaaggccttctag

SEQ ID NO: 278348 - DNA, 393 bp, Artificial Sequence
  derived and/or modified sequence
atgggtcgcctggatggcaaagtcattattctgactgccgccgctcaaggaattgggcaggccgcagccctcgcttttgcaagagaaggcgcgaaggttatcgccacggacattaacgagtccaagcttcaggagctcgaaaagtatcctggcatacagacaagggtgctggatgttactaagaagaaacaaattgatcaattcgcaaacgaagttgagagattagacgtgttattcaatgtcgccggctttgtgcaccacggaaccgttctggattgcgaggagaaggattgggatttctccatgaatcttaacgtgaggagtatgtacctcatgatcaaagcatttctcccaaagatgctcgcacaaaaatccggcaatatcataaattag

SEQ ID NO: 278349 - DNA, 351 bp, Artificial Sequence
  derived and/or modified sequence
atggggcggttggacggtaaagtgataattctcactgccgcagctcaaggcattggacaggcagccgccctagcgtttgcacgcgagggtgctaaggtcatcgccactgacataaatgagtcaaagttacaggagctggagaaataccccggaatccagacccgcgtgctggacgtgacaaagaaaaagcaaatcgaccagttcgcaaacgaggtcgaaaggttggatgttctgtttaacgtggccgggttcgtgcaccacggaacagttctagattgcgaagagaaagattgggatttttccatgaacttgaatgtccgttccatgtacctgatgatcaaagccttttag

SEQ ID NO: 278350 - DNA, 393 bp, Artificial Sequence
  derived and/or modified sequence
atgggccgcctggatggcaaggtgatcatcctgacagctgctgcccagggcatcggccaggccgccgccctggcctttgcccgggagggcgccaaggtgattgccacagacatcaatgaaagcaagctgcaggagctggagaagtacccaggcatccagaccagggtgctggatgtgaccaagaagaagcagattgaccagtttgccaatgaggtggagcggctggatgtgctcttcaacgtggccggctttgtgcaccacggcaccgtgctggactgtgaggagaaggactgggacttctccatgaacctgaatgtgcgctccatgtacctgatgatcaaggccttcctgcccaagatgctggcccagaagagcggcaacatcatcaactag

SEQ ID NO: 278351 - DNA, 351 bp, Artificial Sequence
  derived and/or modified sequence
atgggccgcctggatggcaaggtgatcatcctgacagctgctgcccagggcatcggccaggccgccgccctggcctttgcccgggagggcgccaaggtgattgccacagacatcaatgaaagcaagctgcaggagctggagaagtacccaggcatccagaccagggtgctggatgtgaccaagaagaagcagattgaccagtttgccaatgaggtggagcggctggatgtgctcttcaacgtggccggctttgtgcaccacggcaccgtgctggactgtgaggagaaggactgggacttctccatgaacctgaatgtgcgctccatgtacctgatgatcaaggccttctag

SEQ ID NO: 278352 - DNA, 393 bp, Artificial Sequence
  derived and/or modified sequence
atgggccggctggacggcaaggtgatcatcctgaccgccgccgcccagggaattggccaagctgccgccctggcattcgcgcgggaaggcgccaaggtgattgccaccgacatcaatgagtccaagttgcaggagttggaaaaatatccaggtatacaaacaagagtgctggacgtgactaagaagaaacaaatcgaccaattcgctaatgaagttgaaaggcttgatgtgctgttcaacgtcgctgggtttgtacatcacgggaccgtactggactgcgaggagaaagactgggatttctccatgaacctgaacgtccgctcaatgtacttgatgatcaaggcatttttacctaagatgttggctcagaagtctggcaatattattaattag

SEQ ID NO: 278353 - DNA, 351 bp, Artificial Sequence
  derived and/or modified sequence
atgggccggctggacggcaaggtgatcatcctgaccgccgccgcccaggggattgggcaggcggcagctctcgcttttgcacgcgaaggtgcaaaagtaatcgccaccgatataaatgaatcaaagctgcaagaactcgagaagtaccccggtatccaaactagggtattggatgtcactaagaaaaagcagatcgatcagtttgcgaacgaggtggaacgcctggatgtcctctttaatgtggctggcttcgtccatcacggcacagtgctggactgtgaagagaaagactgggatttcagcatgaacctgaacgtgagatccatgtatctgatgattaaggcattctag

SEQ ID NO: 278354 - DNA, 393 bp, Artificial Sequence
  derived and/or modified sequence
atggggcgtctggatggaaaggtgattatactaactgctgccgcacagggaatcggtcaggctgctgcactggcatttgcaagagaaggggcaaaagttatcgctacagacatcaatgaaagcaaactacaagaactggagaagtatcctggcatccaaaccagggtgctcgacgtgactaaaaaaaaacaaattgaccagtttgctaatgaggtcgagcggctggacgtactgttcaatgtggcgggatttgttcaccacggcaccgtgctggattgcgaagagaaagattgggatttttcgatgaacctgaacgtgaggtctatgtatcttatgattaaagctttcctcccgaagatgttggcacagaaatccggaaatattattaattag

SEQ ID NO: 278355 - DNA, 351 bp, Artificial Sequence
  derived and/or modified sequence
atgggacggctagatggaaaggtgattatcctgactgcagcagcccaggggatcggtcaggcagctgcccttgcatttgcccgtgaaggcgctaaggtgatagctacagacattaacgagagcaagctgcaggagctggagaagtaccccggtatccagacccgggtgttagatgtgacgaaaaaaaaacaaattgaccagttcgcaaatgaagtggagcgcctggacgttctgtttaatgtggcaggattcgttcaccacgggaccgtgctggactgtgaggagaaggactgggatttttctatgaacttaaatgtgcgctccatgtatttgatgattaaggccttctag

SEQ ID NO: 278356 - DNA, 578 bp, Artificial Sequence
  derived and/or modified sequence
gttgctcaaaccgagttctggagaacgccatcagctcgctgcttaaactggaaacaaaagtctcaacttccaacctctttgcagctaggagtggccaagtagcatagatctggtgaatgaactgcaggtgggaatttctgagaaggtttccttcttaaatagaaagattaaaccacaggttccattatgggtcgacttgatgggaaagtcatcatcctgacggccgctgctcaggggattggccaagcagctgccttagcttttgcaagagaaggtgccaaagtcatagccacagacattaatgagtccaaacttcaggaactggaaaagtacccgggtattcaaactcgtgtccttgatgtcacaaagaagaaacaaattgatcagtttgccaatgaagttgagagacttgatgttctctttaatgttgctggttttgtccatcatggaactgtcctggattgtgaggagaaagactgggacttctcgatgaatctcaatgtgcgcagcatgtacctgatgatcaaggcattccttcctaaaatgcttgctcagaaatctggcaatattatcaacat

SEQ ID NO: 278357 - DNA, 616 bp, Artificial Sequence
  derived and/or modified sequence
aagcgcttgacttgcttccagacaaaggttgtctcaagtttgttgctcaaaccgagttctggagaacgccatcagctcgctgcttaaagggaaatgctgttgtgagagagaatgaggagagaactaggtaaggctgtgagagccatcagacctcgatgcaagtccacccgcgagggaggaaaagaaggaaaccaggttgagtggaagcatcccagacagctgtgcagtctaagagaacttcagcaagattaaaccacaggttccattatgggtcgacttgatgggaaagtcatcatcctgacggccgctgctcaggggattggccaagcagctgccttagcttttgcaagagaaggtgccaaagtcatagccacagacattaatgagtccaaacttcaggaactggaaaagtacccgggtattcaaactcgtgtccttgatgtcacaaagaagaaacaaattgatcagtttgccaatgaagttgagagacttgatgttctctttaatgttgctggttttgtccatcatggaactgtcctggattgtgaggagaaagactgggacttctcgatgaatctcaatgtgcgcagcatgtacctgatgatcaaggcattcc

SEQ ID NO: 278358 - protein, 297 aa, Artificial Sequence
  derived and/or modified sequence
MSSHAQPLKLISPCPYSLSSGVEDIVAIMIPEPKGKEIVSLLERNITVTMYITIGTRNLQKYVSRTSVVFVSISFIVLMIISLAWLVFYYIQRFRYANARDRNQRRLGDAAKKAISKLQIRTIKKGDKETESDFDNCAVCIEGYKPNDVVRILPCRHLFHKSCVDPWLLDHRTCPMCKMNILKALGIPPNADCMDDLPTDFEGSLGGPPTNQITGASDTTVNESSVTLDPAVRTVGALQVVQDTDPIPQEGDVIFTTNSEQEPAVSSDSDISLIMAMEVGLSDVELSTDQDCEEVKS

SEQ ID NO: 278359 - DNA, 480 bp, Artificial Sequence
  derived and/or modified sequence
atggagcaggactggcagcccggcgaggaggtgacccccggccccgaaccttgctccaaaggacaagcgccactctatccaattgtacacgttactgagctgaaacacaccgaccccaatttcccctctaattcaaacgctgtggggaccagctctggctggaaccgaatcggcaccggttgctcacatacgtgggactggagattctcttgtacccagcaggcactgttgccgttactcggagcctgggaatggtccattgataccgaagctgggggtggcaggcgagagcagtcacagaagccatgctccaacggtgggccagcagccgccggcgaagggagagtgttgcctagcccctgctttccatggtctacttgccaggcggcaattcacaaagtctgccggtggcaggggtgtacaaggcccgccctgttagcacctagtctcgccacccttaaagaacacagctatccatag

SEQ ID NO: 278360 - DNA, 777 bp, Artificial Sequence
  derived and/or modified sequence
atgagggaacgagcccctcccccaccaccccctagccaagagactcctgtttatagcatggacgacttccctcctccgcctcctcatacagtctgcgaagcacagttagacagtgaggacccagaaggcccccgtccatctttcaataagctctcgaaggtgactatcgcccgcgaacggcacatgccgggcgcggcgcatgtcgtgggaagtcagacactggctagcaggctgcagacatcaattaaaggtagcgaagctgaaagcaccccaccaagctttatgagtgtacacgcccagctggctgggtcgttgggtgggcagcccgcaccaattcaaacgcaatctctgtctcatgatcctgtcagcggcacccagggcctggaaaagaaggtcagccccgacccccagaaaagttctgaagacattcgcaccgaggcgttggcgaaagaaatcgttcaccaggacaaatctctcgccgacatcctcgatcccgatagccgcctcaaaacaactatggatctgatggaggggctgtttcctcgggacgtaaacctcctcaaagaaaactccgtaaaaaggaaggccatacaacgaaccgtgtcttcatcggggtgcgagggcaagcgtaatgaggataaggaggccgtatcaatgctcgtcaattgtccacaaatctcctttcctagactgggcccatggctatgccctcagaccagcagagtctccccttttctgctcggtgccgtcctttcagttgtcttttcacagcactag

SEQ ID NO: 278361 - DNA, 777 bp, Artificial Sequence
  derived and/or modified sequence
atgagggagcgggcccctcctcctcctccacccagccaggagacccctgtgtacagcatggatgacttccccccacctccaccccacacagtgtgtgaggcccagctggacagtgaagatcctgagggcccccggcccagcttcaacaagctgagcaaggtgaccatcgcccgggagcggcacatgcctggagctgcccacgtggtgggcagccagaccctggccagccggctgcagaccagcatcaagggcagcgaggccgagagcaccccacccagcttcatgtctgtgcacgcccagctggccggcagcctgggcggccagcctgcccccatccagacccagagcctgagccatgaccctgtgtctggcacccagggcctggagaagaaggtgtccccagacccccagaagagcagcgaggacatcagaacagaggccctggccaaggagatcgtgcaccaggacaagagcctggccgacatcctggaccctgacagccggctgaagaccaccatggacctgatggagggcctcttccccagagatgtgaacctgctgaaggaaaattctgtgaagaggaaggccatccagaggacagtgagcagcagcggctgtgagggcaagagaaatgaagacaaggaggccgtgtccatgctggtgaactgcccccagatctccttcccccggctgggcccctggctgtgcccccagaccagccgggtgagccccttcctgctgggcgctgtgctgtctgtggtgttcagccagcactag

SEQ ID NO: 278362 - DNA, 777 bp, Artificial Sequence
  derived and/or modified sequence
atgcgggagcgggccccccccccccccccccccagccaggagacccccgtatacagtatggatgattttccacctcctcctccgcatacagtgtgcgaggcacagctagattctgaggatccagaaggacctcgaccctcgtttaataagctctctaaggttaccatcgctagagaaaggcatatgccgggagccgcccacgtggttggaagccaaacactcgccagtcgtcttcagactagcatcaaaggctccgaagcggaaagcaccccccctagtttcatgtctgtgcacgcccaactggccgggtcattgggggggcaacctgcccctatccagacacaatcactgagtcacgaccccgtgtctggaacccagggcttggaaaagaaggtaagtcccgatcctcaaaaatcaagtgaagatattcgcaccgaagctctggcaaaggagatcgtacatcaggacaagtcacttgccgatatcctggatccagatagccggttgaaaactacaatggacctcatggagggcctgttcccccgcgacgtgaatctgcttaaagagaacagcgtgaaaaggaaggcaatccaacgcacagtgagctcttctggttgtgagggtaagcggaacgaggacaaagaggcagtgtccatgttagtgaactgccctcagatatccttccctaggctagggccttggctgtgcccccagacctcacgcgtctcacccttcttgctaggggcggttctatctgtagtgttctcacagcactag

SEQ ID NO: 278363 - DNA, 777 bp, Artificial Sequence
  derived and/or modified sequence
atgcgcgagagagctccccctccacctccacctagccaagaaacccctgtgtattcaatggatgatttcccacctcccccacctcacactgtttgcgaggctcagcttgactcagaagatccagaaggcccacggccatcattcaataagctgagcaaagtgactatagcaagagagcgccacatgccaggcgctgcccacgtggtggggagccaaacgctggctagccggctgcagacctctatcaaaggttcagaagcggaatccacaccaccatcatttatgagcgtgcatgcacagctcgcaggatcgttgggtggacagcctgcccctatacagactcagagcctgtcacacgaccctgtgtctgggacccagggactcgagaaaaaagtttcgccagacccccaaaagtcctccgaggatatacgaacagaggccctggctaaagaaattgtgcatcaggacaaatctcttgctgatatcctggatccagacagccgacttaagactacgatggacctgatggaagggctgttcccacgcgatgtgaatttgctcaaagaaaacagcgtgaagaggaaagcgatacagcgcaccgtttcatcctcaggctgcgagggcaaacgcaatgaggacaaagaggccgtgagcatgttggtaaattgtccgcagattagttttcctcggctcgggccatggctctgccctcagaccagcagggtgtcgccatttctcctgggtgctgtcctgtcagttgtcttttctcagcattag

SEQ ID NO: 278364 - DNA, 1862 bp, Artificial Sequence
  derived and/or modified sequence
accctcggcgcgccgcgcgggatcagcgtcctccagccgcgctgccccggcccaccgtgcagctgtagccgcggcgcggtggcgcggtggcgcagggcgctgctgggccgcccattgttgagcgcgttgggccccgccggcgatgccgcgcgccgcctcctcggagcggcggcgaagtttgaacttggcgtcggcctggagccccgagcagcccgggggcggcggccgcgaggcgagcggcgatgagatgtgtgcacagacccaggccatgcagatactggtgcctctaacttcgtcagcccttagaacatgacttgctgtccccagtggagaagaaaccagaagctacagccaagtatgtcccctccaaagtccatttctgttcagtgcctgaaaatgaggaggatgcctccctgaagagacatctcacacctccccaaggcaacagcccacattccaatgagagaaagagcacccccacctcctccaccgagtcaggaaaccccggtgtatagcatggatgacttccctccacctcctccccacactgtatgtgaggcgcagctggacagtgaggatcccgaggggccacgccccagcttcaacaaactttctaaagtgacaattgcaagggaaaggcacatgcctggtgcagcccatgtggtaggtagtcagacactggcttccagactccaaacttctatcaagggttcagaggctgagtccacaccaccctccttcatgagcgttcacgcccaacttgctgggtctcttggtgggcagccagcacccatccagactcaaagcctcagccatgatccagtcagtggaactcagggtttagaaaagaaagtcagtcctgatcctcagaagagttcagaagacatcagaacagaggctttggccaaggaaattgtccaccaagacaaatctctagcagacattttggatccagactccaggctgaagacaacaatggacctgatggaaggtttgtttccccgagatgtgaacttgctgaaggaaaacagtgtaaagaggaaggccatacagagaactgtcagctcttcaggatgtgaaggcaagaggaatgaagacaaggaagcagtgagcatgttggttaactgccctcagatttcattcccaaggctggggccctggctctgcccccaaacctcacgagtgagcccattcctgctgggggctgtactttcagtggtattttcccaacattaacctctccactttaacctcttctaaaatacccaaccaaaagatcactgtttctctcaacactatttaatctgaaaaatgtttcagtacaaaccactgtttgaactatctgggttattggtgtttgttcctgatgaaaggaaaaaaattctctccaggaggaagcctttttccttcttgcccttcctgattgatcttctgagagctcgaatgctgctggacacgtacccctttctattattactttgtagtagaaagaaagttaatgaaactgagaactgattggagggtgtttgatcatttagtttttaacaggctgaggcaacatggatcagtgtgtgtccccctcaggaatgtatccacagtggccttccttgctggtgggcagtgtatcctgatggcagggtacaagtaccattaatgaagggtctgcaacataaagccttaaaaagacacacactaagaaaactgtaaaaccttgaacattgttatttatattttttaaaatggaaaagatcactatgtttgttgtgctaaccacttatttgattctgttttgtggtggacatagatgattacgtttgagctttgtattttgtgaaaaccttaatgaaatgaattccaaagat

SEQ ID NO: 278365 - DNA, 777 bp, Artificial Sequence
  derived and/or modified sequence
atgagagagagagccccccccccccccccccccagccaggagacccccgtgtacagcatggacgacttcccccccccccccccccacaccgtgtgcgaggcccagctggacagcgaggaccccgagggccccagacccagcttcaacaagctgagcaaggtgaccatcgccagagagagacacatgcccggcgccgcccacgtggtgggcagccagaccctggccagcagactgcagaccagcatcaagggcagcgaggccgagagcaccccccccagcttcatgagcgtgcacgcccagctggccggcagcctgggcggccagcccgcccccatccagacccagagcctgagccacgaccccgtgagcggcacccagggcctggagaagaaggtgagccccgacccccagaagagcagcgaggacatcagaaccgaggccctggccaaggagatcgtgcaccaggacaagagcctggccgacatcctggaccccgacagcagactgaagaccaccatggacctgatggagggcctgttccccagagacgtgaacctgctgaaggagaacagcgtgaagagaaaggccatccagagaaccgtgagcagcagcggctgcgagggcaagagaaacgaggacaaggaggccgtgagcatgctggtgaactgcccccagatcagcttccccagactgggcccctggctgtgcccccagaccagcagagtgagccccttcctgctgggcgccgtgctgagcgtggtgttcagccagcactag

SEQ ID NO: 278366 - protein, 2485 aa, Artificial Sequence
  derived and/or modified sequence
MHVSLAEALEVRGGPLQEEEIWAVLNQSAESLQELFRKVSLADPAALGFIISPWSLLLLPSGSVSFTDENISNQDLRAFTAPEVLQNQSLTSLSDVEKIHIYSLGMTLYWGADYEVPQSQPIKLGDHLNSILLGMCEDVIYARVSVRTVLDACSAHIRNSNCAPSFSYVKHLVKLVLGNLSGTDQLSCNSEQKPDRSQAIRDRLRGKGLPTGRSSTSDVLDIQKPPLSHQTFLNKGLSKSMGFLSIKDTQDENYFKDILSDNSGREDSENTFSPYQFKTSGPEKKPIPGIDVLSKKKIWASSMDLLCTADRDFSSGETATYRRCHPEAVTVRTSTTPRKKEARYSDGSIALDIFGPQKMDPIYHTRELPTSSAISSALDRIRERQKKLQVLREAMNVEEPVRRYKTYHGDVFSTSSESPSIISSESDFRQVRRSEASKRFESSSGLPGVDETLSQGQSQRPSRQYETPFEGNLINQEIMLKRQEEELMQLQAKMALRQSRLSLYPGDTIKASMLDITRDPLREIALETAMTQRKLRNFFGPEFVKMTIEPFISLDLPRSILTKKGKNEDNRRKVNIMLLNGQRLELTCDTKTICKDVFDMVVAHIGLVEHHLFALATLKDNEYFFVDPDLKLTKVAPEGWKEEPKKKTKATVNFTLFFRIKFFMDDVSLIQHTLTCHQYYLQLRKDILEERMHCDDETSLLLASLALQAEYGDYQPEVHGVSYFRMEHYLPARVMEKLDLSYIKEELPKLHNTYVGASEKETELEFLKVCQRLTEYGVHFHRVHPEKKSQTGILLGVCSKGVLVFEVHNGVRTLVLRFPWRETKKISFSKKKITLQNTSDGIKHGFQTDNSKICQYLLHLCSYQHKFQLQMRARQSNQDAQDIERASFRSLNLQAESVRGFNMGRAISTGSLASSTLNKLAVRPLSVQAEILKRLSCSELSLYQPLQNSSKEKNDKASWEEKPREMSKSYHDLSQASLYPHRKNVIVNMEPPPQTVAELVGKPSHQMSRSDAESLAGVTKLNNSKSVASLNRSPERRKHESDSSSIEDPGQAYVLGMTMHSSGNSSSQVPLKENDVLHKRWSIVSSPEREITLVNLKKDAKYGLGFQIIGGEKMGRLDLGIFISSVAPGGPADLDGCLKPGDRLISVNSVSLEGVSHHAAIEILQNAPEDVTLVISQPKEKISKVPSTPVHLTNEMKNYMKKSSYMQDSAIDSSSKDHHWSRGTLRHISENSFGPSGGLREGSLSSQDSRTESASLSQSQVNGFFASHLGDQTWQESQHGSPSPSVISKATEKETFTDSNQSKTKKPGISDVTDYSDRGDSDMDEATYSSSQDHQTPKQESSSSVNTSNKMNFKTFSSSPPKPGDIFEVELAKNDNSLGISVTGGVNTSVRHGGIYVKAVIPQGAAESDGRIHKGDRVLAVNGVSLEGATHKQAVETLRNTGQVVHLLLEKGQSPTSKEHVPVTPQCTLSDQNAQGQGPEKVKKTTQVKDYSFVTEENTFEVKLFKNSSGLGFSFSREDNLIPEQINASIVRVKKLFPGQPAAESGKIDVGDVILKVNGASLKGLSQQEVISALRGTAPEVFLLLCRPPPGVLPEIDTALLTPLQSPAQVLPNSSKDSSQPSCVEQSTSSDENEMSDKSKKQCKSPSRRDSYSDSSGSGEDDLVTAPANISNSTWSSALHQTLSNMVSQAQSHHEAPKSQEDTICTMFYYPQKIPNKPEFEDSNPSPLPPDMAPGQSYQPQSESASSSSMDKYHIHHISEPTRQENWTPLKNDLENHLEDFELEVELLITLIKSEKGSLGFTVTKGNQRIGCYVHDVIQDPAKSDGRLKPGDRLIKVNDTDVTNMTHTDAVNLLRAASKTVRLVIGRVLELPRIPMLPHLLPDITLTCNKEELGFSLCGGHDSLYQVVYISDINPRSVAAIEGNLQLLDVIHYVNGVSTQGMTLEEVNRALDMSLPSLVLKATRNDLPVVPSSKRSAVSAPKSTKGNGSYSVGSCSQPALTPNDSFSTVAGEEINEISYPKGKCSTYQIKGSPNLTLPKESYIQEDDIYDDSQEAEVIQSLLDVVDEEAQNLLNENNAAGYSCGPGTLKMNGKLSEERTEDTDCDGSPLPEYFTEATKMNGCEEYCEEKVKSESLIQKPQEKKTDDDEITWGNDELPIERTNHEDSDKDHSFLTNDELAVLPVVKVLPSGKYTGANLKSVIRVLRGLLDQGIPSKELENLQELKPLDQCLIGQTKENRRKNRYKNILPYDATRVPLGDEGGYINASFIKIPVGKEEFVYIACQGPLPTTVGDFWQMIWEQKSTVIAMMTQEVEGEKIKCQRYWPNILGKTTMVSNRLRLALVRMQQLKGFVVRAMTLEDIQTREVRHISHLNFTAWPDHDTPSQPDDLLTFISYMRHIHRSGPIITHCSAGIGRSGTLICIDVVLGLISQDLDFDISDLVRCMRLQRHGMVQTEDQYIFCYQVILYVLTRLQAEEEQKQQPQLLK

SEQ ID NO: 278367 - DNA, 7458 bp, Artificial Sequence
  derived and/or modified sequence
atgcacgtgagcctggcagaagcactcgaggtcaggggcggaccacttcaggaggaagaaatatgggccgtgcttaatcagagcgccgagagcctgcaggagctgtttcggaaggtaagcctggcagacccagcagccttggggttcattattagcccctggtctctgcttctacttcctagcggatctgtgtcctttactgacgagaatatttctaatcaagacctccgggccttcactgcgcccgaagtccttcaaaaccaatctctcaccagcctgtccgatgtggagaagattcacatctattctctgggaatgaccctttactggggcgccgactacgaggtccctcagagtcagccaatcaagctcggggatcacctgaatagcatactcctcggcatgtgcgaggacgtaatctacgctagagtctcagtccggaccgtgctggatgcctgtagtgcacatatccgaaattccaactgcgccccctcttttagttatgtgaaacatctggttaagttggttctgggcaacttatccggaacagaccagttgtcttgtaattcagagcaaaagccagaccggtctcaggctatccgtgacagattgagaggaaagggcttgccaaccggtcgatctagcacttctgatgtcctggacatccagaagccccctctctcacatcagacctttctgaataagggtctttcaaagagcatggggtttctctctataaaagatacacaggatgagaactattttaaagatattttatcagacaattcaggacgcgaagatagcgagaatactttttctccataccagtttaagacatcagggcccgagaagaaacccatcccgggcatagatgtcctatctaaaaagaagatctgggcatcttccatggatctgctctgtactgccgatcgggacttcagctctggcgaaactgccacttatagacgctgccaccctgaagctgtgacggtaaggacaagcacaactcccaggaagaaggaggcccgttattccgacggatccatcgctctcgatatatttggcccacagaagatggacccgatttaccacacccgcgagctacccacatcctccgccatatcttccgccctcgatcgcattcgggaaagacaaaaaaaattgcaggtactgcgggaagcaatgaacgtggaagagcccgtacgcaggtacaaaacttaccatggagacgtgtttagcacatcttctgaatccccttccataatttcaagcgagagtgactttcggcaggtgaggagaagcgaggcgtcaaagcgcttcgagtcttcttctgggctaccaggagtggatgagaccctctcacagggccaaagtcaacgaccctctcggcaatatgagacgccattcgaggggaacttgattaaccaggaaattatgcttaaacggcaggaggaagaacttatgcagctgcaggccaagatggccctacgacagagccgcttgtcattgtaccctggggacacaatcaaagctagcatgctggacatcactagagaccctttgagggaaattgctttggagaccgccatgacacagcgaaaattaagaaacttcttcggcccagaatttgttaagatgaccattgagcctttcatttccctggatcttcctagatccatcttgaccaaaaagggaaaaaatgaggacaaccgccggaaggtaaacatcatgttgttgaacgggcagcgcttggagttaacttgtgacaccaagacaatctgtaaggacgtctttgatatggtggtggctcatattggactggtggaacaccatctgtttgccctggctaccctaaaggataacgaatacttcttcgttgaccccgatctaaaactgaccaaagtggcccctgaaggctggaaggaggagcctaaaaaaaagaccaaggccactgtaaacttcactctgttttttcgaattaagttcttcatggatgacgtgagcctcatccagcacacgcttacctgccatcagtactacctgcagctgagaaaggacatccttgaggagcgcatgcattgcgacgacgagaccagtctgctgctagcctcactggccttacaggcggagtacggggactatcagcccgaagtccacggagtgagttacttcagaatggagcactacctccctgcgagagtgatggagaagctggacctaagctacatcaaggaggagctgccaaagttgcacaacacttacgtgggcgcctcagaaaaggagacagaactagagtttctgaaagtatgtcaacggctcacggagtacggcgtacacttccatcgcgttcaccctgaaaagaaatcccagaccggcatattgctcggggtgtgctccaaaggcgtgttagtttttgaagtgcataatggggttcgcactctggtactgagattcccatggcgcgaaaccaagaaaatcagcttcagcaagaagaaaatcacattacagaatacttctgatggaatcaagcacggatttcagactgataactcaaaaatttgccaatatctgctgcatctttgctcttaccagcataagtttcagctgcagatgcgggcccgacagtccaatcaggatgctcaggacatcgagcgggccagcttcaggtccctcaacctgcaggccgagtcagtccgcgggttcaacatgggccgcgctatcagcacaggtagtcttgcaagctccaccctgaacaagctggcagtgcgcccactctctgtgcaagcagaaatcctgaaaaggttgtcttgcagtgaactgagtttatatcaaccactgcaaaattcaagcaaagagaaaaatgataaagctagctgggaggagaaacctcgcgaaatgagtaaatcttatcacgacctatcgcaggcttctctgtatccccatcggaagaatgttatcgttaacatggagccacctccacaaactgttgccgaacttgttggcaagccaagccaccaaatgtccagaagcgacgccgagtccctcgctggcgttacgaaattgaataatagcaagagcgtcgccagtctcaatcgaagtcctgaacggaggaagcacgagtccgacagtagctcaattgaggacccaggacaggcctacgtgctcggaatgacgatgcactcttccggcaacagctcttcccaagtacctctaaaggagaatgatgtgctgcacaagcgatggtccatcgtatctagtccggagagagagatcacattagttaacctcaaaaaggatgctaagtatggccttggctttcaaatcattggcggtgaaaaaatggggagactggatctaggtatcttcatcagctccgtagcgccgggagggccagccgacttggacgggtgcttgaaaccaggcgataggctgatatctgtgaattcagtctctctggaaggggtgagccaccatgcagccattgagattctccagaatgcacctgaggacgtgactctcgttatcagtcagcccaaggaaaaaatatcaaaggtgcctagcactccagtccacctcactaacgaaatgaagaactacatgaagaagagcagttatatgcaggactcagctatagactcatcttctaaagaccatcactggagtcgggggactctgagacacatatccgagaactccttcggcccctcggggggactcagagagggcagcctatcgagtcaagacagtcgcaccgaaagcgccagtctttcccaaagtcaagtgaacgggttctttgctagtcacctgggagatcagacctggcaggagtcccagcacggctcccctagtccatccgttatctccaaagcaaccgagaaagagacatttactgatagcaatcaaagcaagaccaagaagcccgggatctccgatgttaccgattacagcgatcggggcgactctgacatggatgaagcaacctacagctccagtcaggatcaccagacaccaaaacaggagtcttcatcttctgtgaacacctctaataaaatgaatttcaagacctttagcagcagtcctccaaagcctggagacatcttcgaagtggagcttgcaaagaacgacaattcgctgggcatctccgtgacaggcggagtcaacacgagcgtgcgccacggtgggatctacgtgaaggccgtgatcccacagggcgcggcagagagcgacggccgaatccacaaaggggacagagttttagctgtgaacggcgtgagtctggaaggtgcaactcacaaacaagcagttgaaactcttaggaatacgggtcaggtcgttcatctcttgctggagaaggggcagtcccccacgtccaaagagcacgtgcctgtcacacctcagtgtaccctctctgaccaaaatgctcaagggcaggggccggagaaagtaaagaagacgacccaggtgaaagactattcattcgtgaccgaggagaacaccttcgaagtgaagctctttaagaactcatccggtctgggtttcagcttcagtcgagaggataatctgatccctgaacaaattaacgctagcatcgtgcgcgtcaagaaactattcccaggtcagcctgccgccgaatcgggaaagatcgacgttggtgacgttatcctgaaagtaaatggtgcatccctgaagggactctcccagcaggaagtcatctctgcgctgaggggaaccgccccggaggtgtttctgttgctctgccgcccgcctcctggcgttctgcccgaaatcgacaccgctctcctgaccccactacagagtcctgcccaagtgctgcctaactccagtaaagacagcagccagccatcatgcgtagagcagagtacgagttctgacgagaatgaaatgagcgacaaatcaaaaaagcagtgcaaatctccatccagaagagatagctacagtgatagctccggctccggggaggacgatcttgtgacagctccagcgaatatctcaaatagtacttggtcatccgcactacaccagactttatcaaacatggtgtcacaggcccagtcccatcatgaggcaccaaagagtcaggaggacacgatttgcactatgttctactatcctcagaagatccctaacaagccagagttcgaagattccaacccctccccactgccaccggatatggcgcccggccaatcttaccaacctcaatccgagagtgctagtagtagctctatggacaagtaccacattcatcatatttccgagccaacgcgtcaggaaaattggaccccactgaaaaatgatctggagaatcacttagaagatttcgagcttgaagtagaattactgataacactgatcaagagtgaaaaaggaagcctaggcttcacggtgactaagggaaaccagagaataggatgctatgtacacgacgttatccaggacccagctaagagcgacggtagattgaagccaggtgatcgtctgattaaggtgaatgacacggatgtaaccaatatgacccatactgacgccgttaatctgctgcgagctgctagcaaaacagtgaggttggtgatcggtagggttctggagttgcctcgcattcctatgctgccacacctgttaccagacattactctgacatgtaataaggaggagctcgggttctccctgtgcggcggccacgatagcctgtaccaagttgtgtacatctcggatattaatccccggtccgtcgcagccatcgagggtaacctacaattgctggacgttatccattacgtcaatggggtgtcaacccaaggaatgaccctggaagaggtgaaccgagctctggacatgtctctgcccagcctggtcttgaaggcgactcgcaacgatttacctgtggttcccagctcgaaacgaagcgctgtgagcgccccaaagagcacgaagggtaacggctcttactctgtggggtcctgctcccaacccgccttgacacctaacgattccttttctacagtagcaggcgaagagattaacgaaatttcgtaccccaaagggaaatgctcaacataccagatcaaggggtccccaaatttgacattgcccaaagagagctatatccaggaagatgatatctatgacgatagccaggaggccgaggtgattcagtcactattagacgtcgtggacgaggaggcccagaacctcttaaacgagaataacgctgctggctacagctgcggaccaggaaccctgaaaatgaatgggaaactgtctgaggagcggacagaggataccgactgtgacggatctcctctccccgagtacttcaccgaggccaccaagatgaacggctgcgaggagtattgcgaagagaaggtgaagtctgaatccctgatccagaagccacaagaaaaaaagacagacgacgacgagattacctggggcaacgatgagttgccaattgagcgaacaaatcacgaggattcggacaaggatcattcatttttgactaatgatgaattggcagttctgcccgttgtgaaggtgcttcccagcggcaagtacacaggtgctaacctaaagagcgtgatcagagtgcttagaggactactggaccaaggcatccccagcaaagaactcgagaatctacaggagctgaaaccccttgatcagtgcctaatcgggcagaccaaagaaaatcgcaggaaaaaccgatataagaatattctgccttacgacgcaacaagggtacccctcggcgacgaagggggctatatcaacgcaagctttatcaagatcccagtgggaaaagaagagtttgtatatatcgcctgtcaaggcccgttacccaccacagtgggcgacttttggcagatgatttgggagcagaagagtaccgtgattgcaatgatgacgcaggaggtggagggggaaaagattaagtgccagagatactggccaaacatcctgggaaagaccacaatggttagtaacagattgagattggccttagttaggatgcaacagctgaaggggtttgtcgtacgtgcaatgacgctagaggacatccaaacaagagaggtgcgccatatatctcatctgaactttactgcatggccagatcatgatacccccagccagccagacgaccttttaacgtttatctcttatatgcgtcatattcacaggagcgggcctattattacccattgttcggcgggcatcggacggtccggcacactgatttgtatcgatgtagttctcggactgattagccaggacctcgatttcgacatcagcgacctggtcagatgcatgcggctccagcggcacggcatggtccagacagaggatcagtatatcttttgctatcaggtgattctatacgtcctaacccggcttcaagccgaagaggagcagaagcaacagccacagctgcttaaatag

SEQ ID NO: 278368 - DNA, 7458 bp, Artificial Sequence
  derived and/or modified sequence
atgcacgtgtccctggccgaggccctggaggtgcggggcggccccctgcaggaggaggagatctgggccgtgctgaaccagagcgctgagagcctgcaggagctgttcaggaaggtgtccctggccgaccctgctgccctgggcttcatcatcagcccctggagcctgctgctgctgcccagcggctctgtgtccttcacagatgagaacatcagcaaccaggacctgcgggccttcaccgcccctgaggtgctgcagaaccagagcctgaccagcctgagtgatgtggagaagatccacatctacagcctgggcatgaccctgtactggggcgctgactatgaggtgccccagagccagcccatcaagctgggggaccacctgaacagcatcctgctgggcatgtgtgaagatgtgatctatgcccgggtgtctgtgaggacagtgctggatgcctgcagcgcccacatccggaacagcaactgtgcccccagcttctcctatgtgaagcacctggtgaagctggtgctgggcaacctgtctggaacagaccagctgagctgcaacagcgagcagaagccagacaggagccaggccatccgggaccggctgcggggcaagggcctgcccaccggccgcagcagcaccagtgatgtgctggacatccagaagccacccctgagccaccagaccttcctgaacaagggcctgagcaagtccatgggcttcctgagcatcaaggacacccaggatgagaactacttcaaggacatcctgagtgacaacagcggccgggaggacagcgagaacaccttcagcccctaccagttcaagaccagcggccctgagaagaagcccatccctggcattgatgtgctgagcaagaagaagatctgggccagctccatggacctgctgtgcacagctgaccgggacttcagcagtggagaaacagccacctaccgccgctgccaccctgaggccgtgacagtgaggaccagcaccacccccaggaagaaggaggcccgctacagtgatggcagcatcgccctggacatcttcggcccccagaagatggaccccatctaccacacccgggagctgcccaccagcagcgccatcagcagcgccctggaccgcatccgggagcggcagaagaagctgcaggtgctgcgggaggccatgaatgtggaggagcctgtgcggcgctacaagacctaccatggagatgtgttcagcaccagcagcgagagccccagcatcatcagcagcgagagtgacttccggcaggtgcggcgctctgaggccagcaagagatttgagagcagcagcggcctgcccggggtggatgagaccctgagccagggccagagccagaggcccagccggcagtatgagaccccatttgagggcaacctgatcaaccaggagatcatgctgaagaggcaggaggaggagctgatgcagctgcaggccaagatggccctgcggcagagccggctgagcctgtacccaggggacaccatcaaggcctccatgctggacatcacccgggaccccctgcgggagatcgccctggagacagccatgacccagaggaagctgaggaacttctttggacctgagtttgtgaagatgaccatcgagcccttcatcagcctggacctgcccaggagcatcctgaccaagaagggcaagaatgaagacaacagaaggaaggtgaacatcatgctgctgaatggccagaggctggagctgacctgtgacaccaagaccatctgcaaggatgtgtttgacatggtggtggcccacatcggcctggtggagcaccacctgtttgccctggccaccctgaaggacaatgagtacttctttgtggaccctgacctgaagctgaccaaggtggcccctgagggctggaaggaggagcccaagaagaagaccaaggccaccgtgaacttcaccctcttcttccgcatcaagttcttcatggatgatgtgtccctcatccagcacaccctgacctgccaccagtactacctgcagctgaggaaggacatcctggaggagaggatgcactgtgatgatgagaccagcctgctgctggccagcctggccctgcaggccgagtatggagactaccagcctgaggtgcatggagtgtcctacttcaggatggagcactacctgcctgcccgggtgatggagaagctggacctgagctacatcaaggaggagctgcccaagctgcacaacacctacgtgggcgccagcgagaaggagacagagctggagttcctgaaggtgtgccagaggctgacagaatatggagtgcacttccaccgggtgcaccctgagaagaagagccagacaggcatcctgctgggcgtgtgcagcaagggcgtgctggtgtttgaggtgcacaatggagtgaggaccctggtgctgcgcttcccctggagggagaccaagaagatctccttcagcaagaagaagatcaccctgcagaacaccagtgatggcatcaagcacggcttccagacagacaacagcaagatctgccagtacctgctgcacctgtgcagctaccagcacaagttccagctgcagatgagggcccggcagagcaaccaggatgcccaggacatcgagcgggccagcttccgcagcctgaacctgcaggccgagagcgtgcggggcttcaacatgggccgggccatcagcacaggcagcctggccagcagcaccctgaacaagctggccgtgcggcccctgtctgtgcaggccgagatcctgaagaggctgagctgcagcgagctgagcctgtaccagcccctgcagaacagcagcaaggagaagaatgacaaggcctcctgggaggagaagccccgggagatgagcaagagctaccatgacctgagccaggccagcctgtacccccacaggaagaatgtcatcgtgaacatggagcccccaccccagacagtggccgagctggtgggcaagcccagccaccagatgagcagaagtgatgctgagagcctggccggcgtgaccaagctgaacaacagcaagtctgtggccagcctgaacagaagccctgagaggaggaagcatgaaagtgacagcagcagcattgaagatcctggccaggcctacgtgctgggcatgaccatgcacagcagcggcaacagcagcagccaggtgcccctgaaggaaaatgatgtgctgcacaagcgctggagcatcgtgagcagccctgagcgggagatcaccctggtgaacctgaagaaggatgccaagtatggcctgggcttccagatcattggaggagagaagatgggccgcctggacctgggcatcttcatcagctctgtggcccctgggggccctgctgacctggatggctgcctgaagccaggggacaggctcatctctgtgaacagcgtgtccctggagggcgtgagccaccacgccgccatcgagatcctgcagaatgccccagaagatgtgaccctggtgatcagccagcccaaggagaagatcagcaaggtgcccagcacccctgtgcacctgaccaatgagatgaagaactacatgaagaagagcagctacatgcaggacagcgccatcgacagcagcagcaaggaccaccactggagccggggcaccctgcggcacatcagcgagaacagctttggccccagcggcggcctgcgggagggcagcctgagcagccaggacagcaggacagaaagtgccagcctgagccagagccaggtgaatggcttctttgccagccacctgggggaccagacctggcaggagagccagcacggcagccccagccccagcgtcatcagcaaggccacagagaaggagaccttcacagacagcaaccagagcaagaccaagaagccaggcatcagtgatgtgacagactacagcgacagaggagacagcgacatggatgaggccacctacagcagcagccaggaccaccagacccccaagcaggagagcagcagctctgtgaacaccagcaacaagatgaacttcaagaccttcagcagcagcccccccaagccaggggacatctttgaggtggagctggccaagaatgacaacagcctgggcatctctgtgactggaggagtgaacacctctgtgcgccacggcggcatctacgtgaaggctgtgatcccccagggcgctgctgagagtgatggccgcatccacaagggggacagagtgctggccgtgaatggagtgtccctggagggcgccacccacaagcaggccgtggagaccctgaggaacacaggccaggtggtgcacctgctgctggagaagggccagagccccaccagcaaggagcacgtgcctgtgaccccccagtgcaccctgagtgaccagaatgcccagggccagggccctgagaaggtgaagaagaccacccaggtgaaggactacagctttgtgacagaggagaacacctttgaggtgaagctgttcaagaacagcagcggcctgggcttctccttcagccgggaggacaacctgatccctgagcagatcaatgccagcatcgtgcgggtgaagaagctgtttcctggccagcctgctgctgagagcggcaagattgatgtgggagatgtgatcctgaaggtgaatggagccagcctgaagggcctgagccagcaggaggtgatcagcgccctgcggggcacagcccctgaggtgttcctgctgctgtgccggcccccacctggggtgctgcctgagattgacacagccctgctgacccccctgcagagccctgcccaggtgctgcccaacagcagcaaggacagcagccagcccagctgtgtggagcagagcaccagcagtgatgaaaatgagatgtctgacaagagcaagaagcagtgcaagagccccagccggcgggacagctacagcgacagcagcggcagcggggaggatgacctggtgacagccccagccaacatcagcaacagcacctggagcagcgccctgcaccagaccctgagcaacatggtgtcccaggcccagagccaccacgaggcccccaagagccaggaggacaccatctgcaccatgttctactacccccagaagatccccaacaagccagagtttgaggacagcaaccccagccccctgcccccagacatggcccctggccagagctaccagccccagagcgagagcgccagcagcagctccatggacaagtaccacatccaccacatcagcgagcccacccggcaggagaactggacccccctgaagaatgacctggagaaccacctggaggactttgagctggaggtggagctgctgatcaccctcatcaagtctgagaagggcagcctgggcttcaccgtgaccaagggcaaccagagaattggctgctacgtgcatgatgtgatccaggaccctgccaagagtgatggccgcctgaagccaggggacaggctcatcaaggtgaatgacacagatgtgaccaacatgacccacacagatgctgtgaacctgctgcgggccgccagcaagacagtgcggctggtgattggccgggtgctggagctgccccgcatccccatgctgccccacctgctgcctgacatcaccctgacctgcaacaaggaggagctgggcttcagcctgtgtggcggccatgacagcctgtaccaggtggtgtacatcagtgacatcaaccccaggtctgtggccgccatcgagggcaacctgcagctgctggatgtgatccactacgtgaatggagtgtccacccagggcatgaccctggaggaggtgaacagagccctggacatgagcctgcccagcctggtgctgaaggccaccagaaatgacctgcctgtggtgcccagcagcaagaggtctgctgtgtctgcccccaagagcaccaagggaaatggcagctacagcgtgggcagctgcagccagcctgccctgaccccaaatgacagcttcagcacagtggccggggaggagatcaatgagatctcctaccccaagggcaagtgcagcacctaccagatcaagggcagccccaacctgaccctgcccaaggagagctacatccaggaggatgacatctatgatgacagccaggaggccgaggtgatccagagcctgctggatgtggtggatgaggaggcccagaacctgctgaatgaaaataatgctgctggctacagctgtggccctggcaccctgaagatgaatggcaagctgtctgaggagaggacagaggacacagactgtgatggcagccccctgcctgagtacttcacagaggccaccaagatgaatggctgtgaggagtactgtgaggagaaggtgaagtctgagagcctcatccagaagccccaggagaagaagacagatgatgatgagatcacctggggcaatgatgagctgcccatcgagaggaccaaccacgaggacagcgacaaggaccacagcttcctgaccaatgatgagctggccgtgctgcctgtggtgaaggtgctgcccagcggcaagtacacaggagccaacctgaagagcgtcatccgggtgctgcggggcctgctggaccagggcatccccagcaaggagctggagaacctgcaggagctgaagcccctggaccagtgcctgattggccagaccaaggagaacagaaggaagaaccgctacaagaacatcctgccctatgatgccaccagggtgcccctgggagatgagggcggctacatcaatgccagcttcatcaagatccctgtgggcaaggaggagtttgtgtacatcgcctgccagggccccctgcccaccaccgtgggggacttctggcagatgatctgggagcagaagagcacagtgattgccatgatgacccaggaggtggagggggagaagatcaagtgccagcgctactggcccaacatcctgggcaagaccaccatggtgagcaaccggctgcggctggccctggtgaggatgcagcagctgaagggctttgtggtgcgggccatgaccctggaggacatccagacccgggaggtgcgccacatcagccacctgaacttcaccgcctggccagaccatgacacccccagccagccagatgacctgctgaccttcatctcctacatgaggcacatccacaggagcggccccatcatcacccactgcagcgctggcatcggccgcagcggcaccctcatctgcattgatgtggtgctgggcctcatcagccaggacctggactttgacatcagtgacctggtgcgctgcatgaggctgcagagacatggcatggtgcagacagaggaccagtacatcttctgctaccaggtgatcctgtatgtgctgacccggctgcaggccgaggaggagcagaagcagcagccccagctgctgaagtag

SEQ ID NO: 278369 - DNA, 7458 bp, Artificial Sequence
  derived and/or modified sequence
atgcacgtgagcctggccgaggccctggaggtgcggggcggccccttgcaggaggaggaaatttgggctgttctcaatcaatccgccgagtccctgcaggagctgtttcgtaaggtgtctctggcagatccggcggccctggggttcatcatcagcccatggagcttactgcttctgccttccggcagtgtgtcttttacagatgaaaatatcagtaatcaagacttgcgcgcctttaccgcccctgaggtcttacagaatcagagtttaacctctctaagcgacgtggagaaaatacatatctacagtctggggatgacactgtactggggagccgactacgaagttcctcaatcccagcctataaagcttggcgaccacctgaattccatcctgctgggtatgtgcgaggacgtgatatatgcccgggtctccgtgcggaccgtgctagatgcctgctcggcccatatcagaaactccaactgtgcacccagtttctcctacgtaaaacacctggtgaagctggtgctaggaaatctaagcggaactgatcagctctcctgtaacagcgagcagaagcctgaccgctcgcaagccattcgtgatcggttgcggggcaaaggtctaccgacgggaaggtcaagtacaagcgatgtgttggacatccagaaaccacctcttagtcaccaaactttcttgaataagggactctcaaagagcatgggcttcctttccatcaaggacacccaggacgaaaactatttcaaggacatcctgagcgataactccgggagagaagattccgaaaataccttctctccttaccagttcaaaacatcaggccctgagaaaaaacccatcccaggtattgacgttctttccaaaaaaaagatttgggcgtccagcatggatctcctgtgcacagcagatcgtgacttctcaagtggggaaacagctacataccgtcggtgccatcctgaggccgtgactgtccggacttccactacccccagaaaaaaagaggctcgctattccgacgggagcatcgcattagacatcttcggaccacagaagatggaccctatttatcacaccagggaattgcctacaagcagcgctatcagtagtgcgcttgacaggattcgggagcgacagaaaaagctgcaagtcttacgcgaagccatgaacgtcgaagagccggtcagaaggtataagacttaccacggggacgtgttttccacaagttccgaatctccctccatcatctccagtgagagtgacttcagacaggttcgacgcagcgaggcttctaagcggtttgagtcgtcttcgggcttgcctggcgtggacgagacccttagtcagggccagtcgcagagaccgagccggcagtacgaaacgccatttgagggcaatctgataaaccaggagatcatgcttaaaaggcaggaggaggaactcatgcagctgcaagctaagatggcactcagacaatcccggctgtccctatacccaggagacactatcaaagcaagtatgcttgatattactcgcgaccctctccgcgaaatcgcgttggaaactgcaatgacccagcgaaaattgagaaactttttcggtcctgagttcgtcaaaatgactatagaaccatttatttcactcgatctgcctaggtctattctgacaaagaagggaaagaacgaggataacagacgcaaggtgaatattatgctgctgaatggccagcgcttggagttgacttgcgataccaaaactatctgtaaggacgtgtttgatatggtggtggctcatattggcttggtagagcaccacctgtttgcactcgccacattgaaagataatgaatatttttttgtagacccagatttgaaactcacgaaggtagccccagaaggttggaaggaagagccgaagaaaaagaccaaagccacagtcaacttcacactgttctttcgaatcaaattctttatggatgacgtgagcctcatccagcataccttgacttgtcaccagtattacttacaactgagaaaagatattcttgaggaaagaatgcactgcgatgatgaaacaagtttgctgcttgcctctttggccctccaggccgagtacggagattaccagccagaagtgcatggggtcagctattttcggatggagcattacctcccagctagagtcatggagaagctcgacctcagctatatcaaggaagagctgccaaagctgcacaacacttatgtgggcgcatccgaaaaggaaactgaactggagttcctgaaagtttgtcagagactcaccgaatacggggtacatttccacagggtgcatcccgaaaagaagtcccagacgggcatcctgctgggcgtctgctcaaaaggggtgttagtttttgaagtccacaacggcgttcgaactctagtgctaaggtttccatggcgagagacaaaaaagatctcatttagtaagaaaaaaatcacgttgcagaacacatctgatggcatcaagcacggattccagacagataatagcaaaatctgccagtatctgctgcacctctgctcttaccaacacaaatttcagctgcagatgcgggcacggcaaagcaaccaggatgcccaggatatagagagggcctcgtttcgatctttaaatctccaggctgagtctgtgagaggattcaatatgggccgtgcgattagcaccggatctctcgctagcagtaccttgaacaaattggccgtgcgacccttgtccgtgcaggccgaaatcctgaaacgattatcatgctccgaactctccctttaccaacccctgcagaattcttctaaagaaaaaaacgataaggccagttgggaagagaagccccgggagatgtcaaagtcttaccacgacttgagccaggcttcgctgtatccccacaggaagaatgtgatcgtcaatatggaaccgcccccacagacagtcgctgaactggtgggaaaacctagccaccagatgagtagaagcgacgcggaatccttagccggagtgacaaagctgaataatagtaaatctgttgcctctctcaacagaagccctgagaggcgaaagcacgagagtgatagctcgtctatagaagaccccgggcaagcctacgtactcggcatgacaatgcactcctctggcaactccagctcgcaggtgcccttgaaagaaaatgacgtgttgcacaaacggtggtcaattgtgtcttcaccggagcgggagattactcttgtcaaccttaagaaagatgccaagtatgggcttggatttcaaattatcggcggcgagaaaatggggcggctagacttgggcatctttatctctagcgtggcccccggaggtcccgcggatctagatgggtgcctcaagcctggcgaccggctgatttctgtaaactctgtctcccttgaaggcgtgtcccatcacgcggccatcgaaatcctgcagaatgcccccgaggacgtaacactggtgattagccagcctaaggaaaaaatttcaaaggtgccttccacacctgtgcatctaaccaatgagatgaagaattacatgaaaaagagcagctatatgcaggactccgccatcgattcctcttcaaaggaccaccactggtcacgcgggactctccggcacatttcagagaactcttttggacctagcgggggactgagagaggggtcgctctcctcacaggactctcgtacagagagtgcaagtctcagtcaaagccaggtcaacggctttttcgcaagtcatctgggagaccagacatggcaggagtctcaacacggaagtccaagcccttcagtcatttctaaggcgacagaaaaggagacatttactgactccaaccagtccaagactaagaagccggggatttcggacgttactgattacagtgaccggggcgactctgatatggacgaggcaacctattcaagttcccaggaccatcagacgcctaagcaggagtccagttccagcgtgaatacctctaataaaatgaattttaaaacattcagctcttcacccccgaagccgggagacatttttgaggttgagctcgctaagaacgacaactccttaggtattagcgtgacaggcggagttaacacaagcgttagacacggcggcatttatgtcaaagccgtgattccacagggggcagcggaatcagacggaaggatccacaagggtgacagggtgctggcggtcaatggcgtatcacttgaaggggccactcacaaacaggcagtcgaaacactgaggaataccggccaggtggtgcacttattattggaaaaagggcagtcgccaaccagcaaagagcacgtgccggtcacgccacaatgcacactgtccgaccagaatgcgcagggacaaggtcccgagaaggtcaagaagacaacacaggtgaaggactattccttcgttactgaagagaacacgtttgaggtgaaactgttcaaaaattccagcggactgggtttctctttttcacgcgaagacaaccttatccctgagcagatcaacgcttctattgtgagggtcaaaaagcttttcccaggccagcctgccgccgagtctggcaaaattgatgttggagacgtgattctgaaggtgaatggtgcctcattgaagggtctgtcccaacaggaggttatctctgcactccggggtactgcccctgaggtgttcctgctgctttgcaggccacctcccggcgtcctcccagaaatagacactgctctactgactccactgcagtctcctgcccaggtcctgcctaactctagcaaggatagctcacagccttcctgtgttgagcagagtacctccagcgatgagaacgaaatgagtgacaagtccaagaaacaatgcaaatctccctctagaagggattcctacagtgacagctccggtagcggcgaagatgatctggtgactgccccggcgaacatctccaatagtacctggtcctccgcactccaccagactctgtctaatatggtcagccaggcccagtctcaccacgaagcacccaaatcacaggaggacactatttgcaccatgttttactacccccagaaaatccctaacaagcccgagtttgaggattccaacccatcccccttgccccccgatatggcgcccggacagagctaccagccacagagcgagtcggcaagcagctctagtatggacaagtatcacattcatcatattagcgagcctacacgccaagaaaactggaccccattgaagaacgatctggagaatcatctggaggacttcgagctcgaagtggaattgctgatcaccctgatcaaatctgaaaaaggatccctgggctttactgtgacgaaaggcaaccagcgcatcggctgctatgtgcacgatgtaatacaggatccagccaagtctgacggccggctaaaacctggcgataggctcatcaaggtcaatgataccgatgtcacaaatatgacgcacaccgacgcagtaaacctcctgcgtgcggcatccaaaactgtcagactggtgattgggcgagtacttgagctcccgaggatccccatgcttccccatctcttaccagacataacgcttacttgcaacaaggaggaactcggattcagcctgtgcggaggccacgatagcctttaccaagtggtctatatctccgacattaacccacgatccgtggcagctatcgaaggcaatttgcagctgctggatgtgatccattacgtaaatggagtaagcacccaagggatgacactggaggaggtaaatagagcattagatatgtctctccccagccttgtccttaaagctacccgcaacgaccttccggtggtccctagttctaagcggtccgctgtgagtgcccctaagagcacaaagggcaacgggagttactccgttggtagctgcagccagcctgctttgacacctaacgattcgttctccactgttgccggtgaagagataaatgaaatcagttatcctaaaggcaagtgcagcacctaccaaatcaagggctcaccaaacctgactctgcccaaggaatcttatattcaggaggacgatatctatgacgactcccaagaggccgaagtcatacaaagcctactcgacgttgttgatgaggaggcccaaaatctgctcaatgaaaataatgcagccggttatagttgcggcccagggactttgaagatgaatgggaagctttctgaagaaaggactgaagatacagactgcgatggctctcctcttcccgagtactttaccgaggctaccaagatgaatggctgcgaagagtactgtgaggagaaggtcaagtctgaaagtctgattcagaagccccaggaaaagaaaacggacgatgacgagattacatgggggaatgacgagctgccaatcgagcggaccaatcacgaggatagtgataaagaccacagctttctgacaaacgatgaactggcagtgctccccgtggttaaggtccttcctagtgggaagtatactggagcaaatttgaagtccgtaatccgggtccttagggggctgctagatcagggtataccctcaaaagaactggaaaacttacaagaactaaagcccctagaccagtgtctcattggtcagacaaaggagaatagacggaagaacagatataaaaatatcttgccctacgatgcaacccgcgttcctctaggagatgagggcggctatatcaatgcgagcttcattaaaattcctgtgggaaaggaggagtttgtgtacatcgcatgtcagggtccgctccccacaaccgtgggggacttttggcagatgatttgggagcagaagtctacggtgatcgctatgatgacgcaagaggtggagggggaaaagatcaagtgtcagcgctactggcccaacatacttggaaaaacaacaatggtgtccaataggctgagactggccctggtgcgaatgcagcagctgaagggctttgtcgtccgcgccatgactctggaagatattcagacgcgggaggtccgacacatctcacacctcaactttaccgcttggcccgatcatgacacccccagtcagccagatgatctgttgactttcatttcttatatgagacatatccatcggtccggacctattatcacccattgctccgctggaatcggccgttctggaactttaatctgtatagacgtggttctcggcctgatcagtcaggacctcgactttgatatctccgacctggttagatgcatgcggcttcagcgccacgggatggttcagaccgaggaccagtacatattctgctatcaggtcatattgtacgtgctcactcgccttcaagcagaggaagagcagaaacagcagccccagctgctgaaatag

SEQ ID NO: 278370 - DNA, 7457 bp, Artificial Sequence
  derived and/or modified sequence
atgcacgtctccttggcagaggccctggaagtaaggggtggcccactccaggaggaggaaatctgggccgtgctgaaccagagcgctgaaagcctccaggaactctttagaaaagtgtccctcgctgacccagcggctcttggatttatcatctcgccttggtcgttgttactgctgccaagtggatcagtgtcttttaccgatgagaatattagtaaccaggacttgcgggcattcacagcaccggaggtgctgcagaaccagtcactgacttcactctccgatgtggagaaaatccatatttacagcctcggcatgacgctctactggggagctgattatgaggtgccgcaaagccagccaataaagttgggtgatcacctgaattccatcctgctcgggatgtgtgaagatgtgatctatgctcgggtctcagtgcgaactgtactggacgcttgcagcgcgcacattaggaattctaattgtgcgccaagcttttcttatgtgaagcacctcgtgaagttggttctgggtaacctgtctggaacggaccaactctcttgtaacagtgagcaaaagccagaccgttcacaagccataagggatcgtctcaggggtaaagggctcccaacagggaggagctcaacgtccgacgtgctggacattcagaagcctccactctcgcaccaaaccttcctaaacaagggtttatccaagagcatgggcttccttagcattaaagacacacaagacgagaattattttaaggatattctgtctgacaattcaggccgagaggactcagagaatacattttctccttaccagtttaagaccagtggacctgagaaaaagcccatcccaggcatagatgtactttctaagaagaagatatgggcctcctccatggatctcctgtgtactgcggatagagacttttcttccggggaaaccgctacatacagaagatgccaccccgaggctgtaaccgtgcgaacttctaccaccccaaggaaaaaggaggcccgttactccgacggcagcattgccctggatattttcgggccacaaaaaatggatcctatctaccacaccagggaactgcctaccagtagcgccatctcttcagccttggatcggatcagagaaaggcagaaaaaactccaggtgctcagggaggctatgaacgtggaagagcctgttcgccgttataaaacgtatcacggagacgtattttcaacgagctccgaatctccatccattatatcatccgaatctgatttcagacaggtgagacgatccgaagcgtccaaaagattcgagtcctcatccggccttcccggagttgatgaaacgctttcccagggccagtcacagaggcccagccgacagtacgagaccccctttgaaggcaatctgattaaccaggagatcatgctcaagagacaggaggaagagcttatgcagttgcaggccaagatggcgctgaggcagtctaggctgtcactttatcccggagacactattaaggcatctatgctcgatattacccgggatccactgagagagattgccttggagacggccatgacacagcgaaagctgcgtaactttttcggaccagagtttgtaaagatgaccatcgaaccgtttatttccctggacctgccacgatcaatcctgacaaagaaaggcaaaaatgaagacaaccggaggaaggtcaatataatgctgctgaatggtcagaggctggagctcacgtgtgatacaaagaccatttgcaaggatgttttcgacatggtggtggcgcatataggcctggtggagcaccatctcttcgctctggctaccctcaaggataacgaatatttcttcgttgacccggatttaaagctcacgaaagtggcccctgaggggtggaaggaagaacccaaaaaaaagacgaaagccaccgtgaactttacccttttttttcgtatcaagttcttcatggacgatgtgagtttgatccagcacaccctgacgtgccatcagtattacctacaactgagaaaggacattctcgaagagagaatgcactgcgacgatgagacttctctactcctggcaagtcttgccctccaggcggaatacggcgactaccagccagaggtccatggagtatcttacttccggatggaacactacctgccagccagggttatggaaaaattggacctctcttacatcaaggaagagctacccaagctgcacaacacatacgtgggagccagtgagaaggagacagaactggagttcctgaaagtgtgccaacgactgaccgagtacggcgtccactttcaccgcgtccaccctgagaagaaatctcaaactgggatcttactgggcgtgtgctccaaaggagtgcttgtgttcgaagtgcacaacggcgtccgcactctggtgcttaggtttccatggagagaaaccaagaaaatctccttttccaagaagaaaattaccctgcagaatacctcagacgggatcaaacatgggtttcagacagataactctaagatttgccagtacctcttgcatctctgctcgtatcagcacaaattccaactgcagatgcgggctcggcagtcaaaccaggatgcacaggatattgagcgggctagcttccgaagcctcaacctacaggccgagagtgtccgcggttttaatatggggcgtgctataagcacagggtcccttgcctcctcaaccctaaataaactggcggtgcgcccactctccgtgcaggctgagatactgaaaaggctcagttgtagcgaactttctctgtaccaacccctgcagaactcctccaaagagaagaacgacaaagcaagttgggaggagaagcccagagaaatgtcaaagagctaccacgacctgagtcaggcgtctctttatcctcacagaaagaacgtgatcgtcaatatggagcctcctccacagacagtggcagagcttgttggcaagcctagccaccagatgtctcgttccgatgcggagtctctggccggtgtgacaaaactcaacaactcaaagtcagttgcttcacttaatcggtccccagagcgcaggaaacatgaatccgactcatcatcaatagaagaccccggacaagcttacgtgcttgggatgaccatgcattctagcggcaacagctcctcccaagtgccactcaaggagaacgacgtgcttcacaagcgttggtcaattgtcagttcaccggaacgagagattaccttggtgaatctgaaaaaagatgcgaagtatgggctaggctttcagatcattggcggagagaaaatgggaagacttgatctaggaatctttatttcaagtgtggcccctggtggacccgcagatctcgacggatgcctaaagccaggtgatcgacttatttcagtcaatagtgtgagtctggagggcgtgagtcaccatgccgcaatcgagatcctccagaatgcaccagaagacgtgactctggtcatatcccagcctaaagagaagatcagcaaagtcccctctaccccggttcacctaaccaatgaaatgaagaactacatgaagaagtcatcttacatgcaagactcagccatcgatagctctagcaaggaccaccactggtccaggggtacactgcggcacattagcgagaatagcttcgggccaagcggtggccttagggagggctccttgtcatctcaggacagccgaacagagtcagcctctctatcgcagtcacaggtcaatgggttttttgcctctcacttgggcgatcaaacttggcaggagtcccagcatggatcacccagcccatccgtcatttcaaaagccaccgagaaggaaaccttcactgattctaatcagagtaagactaagaaacctggtatcagtgatgtgaccgattattcggatagaggcgatagtgatatggacgaggccacatatagctccagccaggatcatcagacacctaaacaagagtcatcctcttccgtcaacacctcgaataaaatgaatttcaaaacgttttcctcatctcctcccaaaccaggcgacattttcgaggtggagctcgctaagaacgataatagcctcggcattagcgtaacaggtggggtgaacactagcgtacgtcatggcggaatatatgtcaaggcggttattccccagggagctgccgaaagcgacggacggatacacaagggagatcgggtcctcgctgtgaatggcgttagtctggagggggcaacacataaacaggctgtcgagacactgcgtaatactgggcaggttgtacacctcctgctcgagaaaggccaatcgccaaccagcaaagaacacgtaccagtgacacctcagtgtaccctctcagaccagaatgcccaggggcaggggccagagaaggtgaagaaaaccactcaagtgaaggattactcatttgtgaccgaggagaataccttcgaagtaaagctttttaagaattcctctggcttaggcttttcattcagccgtgaggataatctgattcccgaacagattaacgcctcaatagtgagagtgaagaaactcttccctggtcagccagccgcagagtccggaaagattgacgtgggtgatgtgatcctaaaagtgaatggggcatcgctgaagggactgagccagcaggaagtgatttcagccctccggggaactgccccagaggttttcttactgctgtgcaggccacctcccggtgtgctccccgaaatagacactgccctgctcaccccgctgcagtcccccgcacaggtactacccaactcgtccaaggactcctcccagccaagctgcgttgagcagtccacaagctcagatgagaatgaaatgagcgataagtccaagaaacagtgcaaaagcccgagccgacgggattcttactcagatagctccggcagtggggaggacgatctcgtgacagccccagccaatatatcaaattctacctggtcttccgctctgcatcaaacattatctaacatggtctcgcaggcacagtcccaccacgaagcacccaaaagtcaggaggacactatatgtactatgttttactacccccagaagattcctaacaagcccgaattcgaggactcaaatccttctccactccctcccgatatggcacctggacagagctatcagccacaatccgaatccgctagtagctctagcatggacaaataccatattcatcacatctccgaaccaacacgacaggagaactggacaccactgaagaacgatttggagaatcatcttgaagatttcgagctggaagtggagctgctgattactctgatcaagtctgagaaggggagcctcggcttcaccgtaactaagggaaatcagcgaattgggtgttacgtccatgacgtcatccaggatccggctaaatcagatggaaggctcaagcccggtgatcgccttattaaggttaatgacactgacgtcactaacatgacccatacggacgcagtgaacttgcttcgagcggcttctaagacagtacggcttgtcatcggtcgcgttttggagctgccgaggatccctatgttgcctcatttgctccccgatattacgctgacgtgcaacaaggaggagctggggttctctctctgtggtgggcatgacagtctgtaccaagtggtgtatatttctgatatcaacccaaggtcggtcgccgcaatcgaggggaatctccagctgctcgatgttatccattacgtgaacggagtgtctacacagggcatgacgctcgaagaggtgaatagagccctcgacatgtcattgccctccctggtcctcaaagcaacacggaacgaccttcctgtggtgccatcctcgaaaaggtcagccgtcagcgccccaaaaagtacaaaaggcaatggttcctatagcgttggatcgtgcagccagccagctttaacacctaacgactccttttcaactgttgccggtgaagagataaatgaaatctcataccctaaaggtaaatgctctacataccagatcaaaggctcccctaacctgaccctcccgaaagagtcttacattcaggaagacgatatttacgatgattcccaggaagccgaggtcatccagagtctactggatgttgtggacgaagaggcacagaacttgctaaacgaaaacaatgcagcaggttatagctgtggtcccggaacccttaagatgaatggcaagctgagtgaggaaaggacagaggacactgactgcgacggatcaccactgccagagtatttcacagaggcgacaaagatgaacgggtgtgaagagtactgtgaagagaaggtcaagtccgagagtcttatccaaaaaccccaggaaaaaaagacagatgatgacgagataacatggggcaatgacgaactacctattgagaggaccaaccatgaagattccgataaggaccacagcttcctgacaaacgacgaactagcagtgctgcccgtggtgaaggtactgccgagtggtaaatacacaggagcaaatttgaaaagtgtgatacgagtcctgagggggctattggaccagggcatccccagcaaagaactggagaacctgcaggaactcaaaccgctggaccaatgccttattggccaaactaaggaaaataggaggaaaaaccgctacaaaaacatcctgccatacgacgcaacaagggtgcctcttggtgacgaagggggatatattaatgcttctttcataaagataccagttggaaaggaggaattcgtttacatagcgtgtcaagggccattgccaacaacagttggtgatttctggcagatgatatgggagcagaaatccactgttatcgccatgatgactcaggaagttgaaggagagaagatcaaatgccaacgatattggcccaatatactcggtaaaactactatggtaagcaatcgcctgcgcctggcactagtgagaatgcagcagctgaagggatttgttgtgcgagccatgaccctggaggatatacagaccagggaagtccggcacatttcacatctgaattttacggcttggccggaccatgacacacctagccaacccgatgacctgctcactttcatttcatatatgcgacacatccacagatcaggcccaattataacacactgttctgctggaattggcagaagtggcacactgatttgtatcgacgtggtcctcggtctgatttcacaggacctggacttcgatatcagtgatctggtacgctgcatgaggttacaaaggcatgggatggtgcagacagaggaccagtatatcttctgttatcaggttatactgtatgtacttaccaggctgcaagccgaagaggagcaaaaacagcagccccagcttctgaagta

SEQ ID NO: 278371 - DNA, 8119 bp, Artificial Sequence
  derived and/or modified sequence
cgtccctgcagccctcgcccggcgctccagtagcaggacccggtctcgggaccagccggtaatatgcacgtgtcactagctgaggccctggaggttcggggtggaccacttcaggaggaagaaatatgggctgtattaaatcaaagtgctgaaagtctccaagaattattcagaaaagtaagcctagctgatcctgctgcccttggcttcatcatttctccatggtctctgctgttgctgccatctggtagtgtgtcatttacagatgaaaatatttccaatcaggatcttcgagcattcactgcaccagaggttcttcaaaatcagtcactaacttctctctcagatgttgaaaagatccacatttattctcttggaatgacactgtattggggggctgattatgaagtgcctcagagccaacctattaagcttggagatcatctcaacagcatactgcttggaatgtgtgaggatgttatttacgctcgagtttctgttcggactgtgctggatgcttgcagtgcccacattaggaatagcaattgtgcaccctcattttcctacgtgaaacacttggtaaaactggttctgggaaatctttctgggacagatcagctttcctgtaacagtgaacaaaagcctgatcgaagccaggctattcgagatcgattgcgaggaaaaggattaccaacaggaagaagctctacttctgatgtactagacatacaaaagcctccactctctcatcagacctttcttaacaaagggcttagtaaatctatgggatttctgtccatcaaagatacacaagatgagaattatttcaaggacattttatcagataattctggacgtgaagattctgaaaatacattctccccttaccagttcaaaactagtggcccagaaaaaaaacccatccctggcattgatgtgctttctaagaagaagatctgggcttcatccatggacttgctttgtacagctgacagagacttctcttcaggagagactgccacatatcgtcgttgtcaccctgaggcagtaacagtgcggacttcaactactcctagaaaaaaggaggcaagatactcagatggaagtatagccttggatatctttggccctcagaaaatggatccaatatatcacactcgagaattgcccacctcctcagcaatatcaagtgctttggaccgaatccgagagagacaaaagaaacttcaggttctgagggaagccatgaatgtagaagaaccagttcgaagatacaaaacttatcatggtgatgtctttagtacctccagtgaaagtccatctattatttcctctgaatcagatttcagacaagtgagaagaagtgaagcctcaaagaggtttgaatccagcagtggtctcccaggggtagatgaaaccttaagtcaaggccagtcacagagaccgagcagacaatatgaaacaccctttgaaggcaacttaattaatcaagagatcatgctaaaacggcaagaggaagaactgatgcagctacaagccaaaatggcccttagacagtctcggttgagcctatatccaggagacacaatcaaagcgtccatgcttgacatcaccagggatccgttaagagaaattgccctagaaacagccatgactcaaagaaaactgaggaatttctttggccctgagtttgtgaaaatgacaattgaaccatttatatctttggatttgccacggtctattcttactaagaaagggaagaatgaggataaccgaaggaaagtaaacataatgcttctgaacgggcaaagactggaactgacctgtgataccaaaactatatgtaaagatgtgtttgatatggttgtggcacatattggcttagtagagcatcatttgtttgctttagctaccctcaaagataatgaatatttctttgttgatcctgacttaaaattaaccaaagtggccccagagggatggaaagaagaaccaaagaaaaagaccaaagccactgttaattttactttgtttttcagaattaaattttttatggatgatgttagtctaatacaacatactctgacgtgtcatcagtattaccttcagcttcgaaaagatattttggaggaaaggatgcactgtgatgatgagacttccttattgctggcatccttggctctccaggctgagtatggagattatcaaccagaggttcatggtgtgtcttactttagaatggagcactatttgcccgccagagtgatggagaaacttgatttatcctatatcaaagaagagttacccaaattgcataatacctatgtgggagcttctgaaaaagagacagagttagaatttttaaaggtctgccaaagactgacagaatatggagttcattttcaccgagtgcaccctgagaagaagtcacaaacaggaatattgcttggagtctgttctaaaggtgtccttgtgtttgaagttcacaatggagtgcgcacattggtccttcgctttccatggagggaaaccaagaaaatatctttttctaaaaagaaaatcacattgcaaaatacatcagatggaataaaacatggcttccagacagacaacagtaagatatgccagtacctgctgcacctctgctcttaccagcataagttccagctacagatgagagcaagacagagcaaccaagatgcccaagatattgagagagcttcgtttaggagcctgaatctccaagcagagtctgttagaggatttaatatgggacgagcaatcagcactggcagtctggccagcagcaccctcaacaaacttgctgttcgacctttatcagttcaagctgagattctgaagaggctatcctgctcagagctgtcgctttaccagccattgcaaaacagttcaaaagagaagaatgacaaagcttcatgggaggaaaagcctagagagatgagtaaatcataccatgatctcagtcaggcctctctctatccacatcggaaaaatgtcattgttaacatggaacccccaccacaaaccgttgcagagttggtgggaaaaccttctcaccagatgtcaagatctgatgcagaatctttggcaggagtgacaaaacttaataattcaaagtctgttgcgagtttaaatagaagtcctgaaaggaggaaacatgaatcagactcctcatccattgaagaccctgggcaagcatatgttctaggaatgactatgcatagttctggaaactcttcatcccaagtacccttaaaagaaaatgatgtgctacacaaaagatggagcatagtatcttcaccagaaagggagatcaccttagtgaacctgaaaaaagatgcaaagtatggcttgggatttcaaattattggtggggagaagatgggaagactggacctaggcatatttatcagttcagttgcccctggaggaccagctgacttggatggatgcttgaagccaggagaccgtttgatatctgtgaatagtgtgagtctggagggagtcagccaccatgctgcaattgaaattttgcaaaatgcacctgaagatgtgacacttgttatctctcagccaaaagaaaagatatccaaagtgccttctactcctgtgcatctcaccaatgagatgaaaaactacatgaagaaatcttcctacatgcaagacagtgctatagattcttcttccaaggatcaccactggtcacgtggtaccctgaggcacatctcggagaactcctttgggccatctgggggcctgcgggaaggaagcctgagttctcaagattccaggactgagagtgccagcttgtctcaaagccaggtcaatggtttctttgccagccatttaggtgaccaaacctggcaggaatcacagcatggcagcccttccccatctgtaatatccaaagccaccgagaaagagactttcactgatagtaaccaaagcaaaactaaaaagccaggcatttctgatgtaactgattactcagaccgtggagattcagacatggatgaagccacttactccagcagtcaggatcatcaaacaccaaaacaggaatcttcctcttcagtgaatacatccaacaagatgaattttaaaactttttcttcatcacctcctaagcctggagatatctttgaggttgaactggctaaaaatgataacagcttggggataagtgtcacgggaggtgtgaatacgagtgtcagacatggtggcatttatgtgaaagctgttattccccagggagcagcagagtctgatggtagaattcacaaaggtgatcgcgtcctagctgtcaatggagttagtctagaaggagccacccataagcaagctgtggaaacactgagaaatacaggacaggtggttcatctgttattagaaaagggacaatctccaacatctaaagaacatgtcccggtaaccccacagtgtaccctttcagatcagaatgcccaaggtcaaggcccagaaaaagtgaagaaaacaactcaggtcaaagactacagctttgtcactgaagaaaatacatttgaggtaaaattatttaaaaatagctcaggtctaggattcagtttttctcgagaagataatcttataccggagcaaattaatgccagcatagtaagggttaaaaagctctttcctggacagccagcagcagaaagtggaaaaattgatgtaggagatgttatcttgaaagtgaatggagcctctttgaaaggactatctcagcaggaagtcatatctgctctcaggggaactgctccagaagtattcttgcttctctgcagacctccacctggtgtgctaccggaaattgatactgcgcttttgaccccacttcagtctccagcacaagtacttccaaacagcagtaaagactcttctcagccatcatgtgtggagcaaagcaccagctcagatgaaaatgaaatgtcagacaaaagcaaaaaacagtgcaagtccccatccagaagagacagttacagtgacagcagtgggagtggagaagatgacttagtgacagctccagcaaacatatcaaattcgacctggagttcagctttgcatcagactctaagcaacatggtatcacaggcacagagtcatcatgaagcacccaagagtcaagaagataccatttgtaccatgttttactatcctcagaaaattcccaataaaccagagtttgaggacagtaatccttcccctctaccaccggatatggctcctgggcagagttatcaaccccaatcagaatctgcttcctctagttcgatggataagtatcatatacatcacatttctgaaccaactagacaagaaaactggacacctttgaaaaatgacttggaaaatcaccttgaagactttgaactggaagtagaactcctcattaccctaattaaatcagaaaaaggaagcctgggttttacagtaaccaaaggcaatcagagaattggttgttatgttcatgatgtcatacaggatccagccaaaagtgatggaaggctaaaacctggggaccggctcataaaggttaatgatacagatgttactaatatgactcatacagatgcagttaatctgctccgggctgcatccaaaacagtcagattagttattggacgagttctagaattacccagaataccaatgttgcctcatttgctaccggacataacactaacgtgcaacaaagaggagttgggtttttccttatgtggaggtcatgacagcctttatcaagtggtatatattagtgatattaatccaaggtccgtcgcagccattgagggtaatctccagctattagatgtcatccattatgtgaacggagtcagcacacaaggaatgaccttggaggaagttaacagagcattagacatgtcacttccttcattggtattgaaagcaacaagaaatgatcttccagtggtccccagctcaaagaggtctgctgtttcagctccaaagtcaaccaaaggcaatggttcctacagtgtggggtcttgcagccagcctgccctcactcctaatgattcattctccacggttgctggggaagaaataaatgaaatatcgtaccccaaaggaaaatgttctacttatcagataaagggatcaccaaacttgactctgcccaaagaatcttatatacaagaagatgacatttatgatgattcccaagaagctgaagttatccagtctctgctggatgttgtggatgaggaagcccagaatcttttaaacgaaaataatgcagcaggatactcctgtggtccaggtacattaaagatgaatgggaagttatcagaagagagaacagaagatacagactgcgatggttcacctttacctgagtattttactgaggccaccaaaatgaatggctgtgaagaatattgtgaagaaaaagtaaaaagtgaaagcttaattcagaagccacaagaaaagaagactgatgatgatgaaataacatggggaaatgatgagttgccaatagagagaacaaaccatgaagattctgataaagatcattcctttctgacaaacgatgagctcgctgtactccctgtcgtcaaagtgcttccctctggtaaatacacgggtgccaacttaaaatcagtcattcgagtcctgcggggtttgctagatcaaggaattccttctaaggagctggagaatcttcaagaattaaaacctttggatcagtgtctaattgggcaaactaaggaaaacagaaggaagaacagatataaaaatatacttccctatgatgctacaagagtgcctcttggagatgaaggtggctatatcaatgccagcttcattaagataccagttgggaaagaagagttcgtttacattgcctgccaaggaccactgcctacaactgttggagacttctggcagatgatttgggagcaaaaatccacagtgatagccatgatgactcaagaagtagaaggagaaaaaatcaaatgccagcgctattggcccaacatcctaggcaaaacaacaatggtcagcaacagacttcgactggctcttgtgagaatgcagcagctgaagggctttgtggtgagggcaatgacccttgaagatattcagaccagagaggtgcgccatatttctcatctgaatttcactgcctggccagaccatgatacaccttctcaaccagatgatctgcttacttttatctcctacatgagacacatccacagatcaggcccaatcattacgcactgcagtgctggcattggacgttcagggaccctgatttgcatagatgtggttctgggattaatcagtcaggatcttgattttgacatctctgatttggtgcgctgcatgagactacaaagacacggaatggttcagacagaggatcaatatattttctgctatcaagtcatcctttatgtcctgacacgtcttcaagcagaagaagagcaaaaacagcagcctcagcttctgaagtgacatgaaaagagcctctggatgcatttccatttctctccttaacctccagcagactcctgctctctatccaaaataaagatcacagagcagcaagttcatacaacatgcatgttctcctctatcttagaggggtattcttcttgaaaataaaaaatattgaaatgctgtatttttacagctactttaacctatgataattatttacaaaattttaacactaaccaaacaatgcagatcttagggatgattaaaggcagcatttgatgatagcagacattgttacaaggacatggtgagtctatttttaatgcaccaatcttgtttatagcaaaaatgttttccaatattttaataaagtagttattttataggggatacttgaaaccagtatttaagctttaaatgacagtaatattggcatagaaaaaagtagcaaatgtttactgtatcaatttctaatgtttactatatagaatttcctgtaatatatttatatactttttcatgaaaatggagttatcagttatctgtttgttactgcatcatctgtttgtaatcattatctcactttgtaaataaaaacacaccttaaaacatg

SEQ ID NO: 278372 - DNA, 7458 bp, Artificial Sequence
  derived and/or modified sequence
atgcacgtgagcctggccgaggccctggaggtgagaggcggccccctgcaggaggaggagatctgggccgtgctgaaccagagcgccgagagcctgcaggagctgttcagaaaggtgagcctggccgaccccgccgccctgggcttcatcatcagcccctggagcctgctgctgctgcccagcggcagcgtgagcttcaccgacgagaacatcagcaaccaggacctgagagccttcaccgcccccgaggtgctgcagaaccagagcctgaccagcctgagcgacgtggagaagatccacatctacagcctgggcatgaccctgtactggggcgccgactacgaggtgccccagagccagcccatcaagctgggcgaccacctgaacagcatcctgctgggcatgtgcgaggacgtgatctacgccagagtgagcgtgagaaccgtgctggacgcctgcagcgcccacatcagaaacagcaactgcgcccccagcttcagctacgtgaagcacctggtgaagctggtgctgggcaacctgagcggcaccgaccagctgagctgcaacagcgagcagaagcccgacagaagccaggccatcagagacagactgagaggcaagggcctgcccaccggcagaagcagcaccagcgacgtgctggacatccagaagccccccctgagccaccagaccttcctgaacaagggcctgagcaagagcatgggcttcctgagcatcaaggacacccaggacgagaactacttcaaggacatcctgagcgacaacagcggcagagaggacagcgagaacaccttcagcccctaccagttcaagaccagcggccccgagaagaagcccatccccggcatcgacgtgctgagcaagaagaagatctgggccagcagcatggacctgctgtgcaccgccgacagagacttcagcagcggcgagaccgccacctacagaagatgccaccccgaggccgtgaccgtgagaaccagcaccacccccagaaagaaggaggccagatacagcgacggcagcatcgccctggacatcttcggcccccagaagatggaccccatctaccacaccagagagctgcccaccagcagcgccatcagcagcgccctggacagaatcagagagagacagaagaagctgcaggtgctgagagaggccatgaacgtggaggagcccgtgagaagatacaagacctaccacggcgacgtgttcagcaccagcagcgagagccccagcatcatcagcagcgagagcgacttcagacaggtgagaagaagcgaggccagcaagagattcgagagcagcagcggcctgcccggcgtggacgagaccctgagccagggccagagccagagacccagcagacagtacgagacccccttcgagggcaacctgatcaaccaggagatcatgctgaagagacaggaggaggagctgatgcagctgcaggccaagatggccctgagacagagcagactgagcctgtaccccggcgacaccatcaaggccagcatgctggacatcaccagagaccccctgagagagatcgccctggagaccgccatgacccagagaaagctgagaaacttcttcggccccgagttcgtgaagatgaccatcgagcccttcatcagcctggacctgcccagaagcatcctgaccaagaagggcaagaacgaggacaacagaagaaaggtgaacatcatgctgctgaacggccagagactggagctgacctgcgacaccaagaccatctgcaaggacgtgttcgacatggtggtggcccacatcggcctggtggagcaccacctgttcgccctggccaccctgaaggacaacgagtacttcttcgtggaccccgacctgaagctgaccaaggtggcccccgagggctggaaggaggagcccaagaagaagaccaaggccaccgtgaacttcaccctgttcttcagaatcaagttcttcatggacgacgtgagcctgatccagcacaccctgacctgccaccagtactacctgcagctgagaaaggacatcctggaggagagaatgcactgcgacgacgagaccagcctgctgctggccagcctggccctgcaggccgagtacggcgactaccagcccgaggtgcacggcgtgagctacttcagaatggagcactacctgcccgccagagtgatggagaagctggacctgagctacatcaaggaggagctgcccaagctgcacaacacctacgtgggcgccagcgagaaggagaccgagctggagttcctgaaggtgtgccagagactgaccgagtacggcgtgcacttccacagagtgcaccccgagaagaagagccagaccggcatcctgctgggcgtgtgcagcaagggcgtgctggtgttcgaggtgcacaacggcgtgagaaccctggtgctgagattcccctggagagagaccaagaagatcagcttcagcaagaagaagatcaccctgcagaacaccagcgacggcatcaagcacggcttccagaccgacaacagcaagatctgccagtacctgctgcacctgtgcagctaccagcacaagttccagctgcagatgagagccagacagagcaaccaggacgcccaggacatcgagagagccagcttcagaagcctgaacctgcaggccgagagcgtgagaggcttcaacatgggcagagccatcagcaccggcagcctggccagcagcaccctgaacaagctggccgtgagacccctgagcgtgcaggccgagatcctgaagagactgagctgcagcgagctgagcctgtaccagcccctgcagaacagcagcaaggagaagaacgacaaggccagctgggaggagaagcccagagagatgagcaagagctaccacgacctgagccaggccagcctgtacccccacagaaagaacgtgatcgtgaacatggagccccccccccagaccgtggccgagctggtgggcaagcccagccaccagatgagcagaagcgacgccgagagcctggccggcgtgaccaagctgaacaacagcaagagcgtggccagcctgaacagaagccccgagagaagaaagcacgagagcgacagcagcagcatcgaggaccccggccaggcctacgtgctgggcatgaccatgcacagcagcggcaacagcagcagccaggtgcccctgaaggagaacgacgtgctgcacaagagatggagcatcgtgagcagccccgagagagagatcaccctggtgaacctgaagaaggacgccaagtacggcctgggcttccagatcatcggcggcgagaagatgggcagactggacctgggcatcttcatcagcagcgtggcccccggcggccccgccgacctggacggctgcctgaagcccggcgacagactgatcagcgtgaacagcgtgagcctggagggcgtgagccaccacgccgccatcgagatcctgcagaacgcccccgaggacgtgaccctggtgatcagccagcccaaggagaagatcagcaaggtgcccagcacccccgtgcacctgaccaacgagatgaagaactacatgaagaagagcagctacatgcaggacagcgccatcgacagcagcagcaaggaccaccactggagcagaggcaccctgagacacatcagcgagaacagcttcggccccagcggcggcctgagagagggcagcctgagcagccaggacagcagaaccgagagcgccagcctgagccagagccaggtgaacggcttcttcgccagccacctgggcgaccagacctggcaggagagccagcacggcagccccagccccagcgtgatcagcaaggccaccgagaaggagaccttcaccgacagcaaccagagcaagaccaagaagcccggcatcagcgacgtgaccgactacagcgacagaggcgacagcgacatggacgaggccacctacagcagcagccaggaccaccagacccccaagcaggagagcagcagcagcgtgaacaccagcaacaagatgaacttcaagaccttcagcagcagcccccccaagcccggcgacatcttcgaggtggagctggccaagaacgacaacagcctgggcatcagcgtgaccggcggcgtgaacaccagcgtgagacacggcggcatctacgtgaaggccgtgatcccccagggcgccgccgagagcgacggcagaatccacaagggcgacagagtgctggccgtgaacggcgtgagcctggagggcgccacccacaagcaggccgtggagaccctgagaaacaccggccaggtggtgcacctgctgctggagaagggccagagccccaccagcaaggagcacgtgcccgtgaccccccagtgcaccctgagcgaccagaacgcccagggccagggccccgagaaggtgaagaagaccacccaggtgaaggactacagcttcgtgaccgaggagaacaccttcgaggtgaagctgttcaagaacagcagcggcctgggcttcagcttcagcagagaggacaacctgatccccgagcagatcaacgccagcatcgtgagagtgaagaagctgttccccggccagcccgccgccgagagcggcaagatcgacgtgggcgacgtgatcctgaaggtgaacggcgccagcctgaagggcctgagccagcaggaggtgatcagcgccctgagaggcaccgcccccgaggtgttcctgctgctgtgcagacccccccccggcgtgctgcccgagatcgacaccgccctgctgacccccctgcagagccccgcccaggtgctgcccaacagcagcaaggacagcagccagcccagctgcgtggagcagagcaccagcagcgacgagaacgagatgagcgacaagagcaagaagcagtgcaagagccccagcagaagagacagctacagcgacagcagcggcagcggcgaggacgacctggtgaccgcccccgccaacatcagcaacagcacctggagcagcgccctgcaccagaccctgagcaacatggtgagccaggcccagagccaccacgaggcccccaagagccaggaggacaccatctgcaccatgttctactacccccagaagatccccaacaagcccgagttcgaggacagcaaccccagccccctgccccccgacatggcccccggccagagctaccagccccagagcgagagcgccagcagcagcagcatggacaagtaccacatccaccacatcagcgagcccaccagacaggagaactggacccccctgaagaacgacctggagaaccacctggaggacttcgagctggaggtggagctgctgatcaccctgatcaagagcgagaagggcagcctgggcttcaccgtgaccaagggcaaccagagaatcggctgctacgtgcacgacgtgatccaggaccccgccaagagcgacggcagactgaagcccggcgacagactgatcaaggtgaacgacaccgacgtgaccaacatgacccacaccgacgccgtgaacctgctgagagccgccagcaagaccgtgagactggtgatcggcagagtgctggagctgcccagaatccccatgctgccccacctgctgcccgacatcaccctgacctgcaacaaggaggagctgggcttcagcctgtgcggcggccacgacagcctgtaccaggtggtgtacatcagcgacatcaaccccagaagcgtggccgccatcgagggcaacctgcagctgctggacgtgatccactacgtgaacggcgtgagcacccagggcatgaccctggaggaggtgaacagagccctggacatgagcctgcccagcctggtgctgaaggccaccagaaacgacctgcccgtggtgcccagcagcaagagaagcgccgtgagcgcccccaagagcaccaagggcaacggcagctacagcgtgggcagctgcagccagcccgccctgacccccaacgacagcttcagcaccgtggccggcgaggagatcaacgagatcagctaccccaagggcaagtgcagcacctaccagatcaagggcagccccaacctgaccctgcccaaggagagctacatccaggaggacgacatctacgacgacagccaggaggccgaggtgatccagagcctgctggacgtggtggacgaggaggcccagaacctgctgaacgagaacaacgccgccggctacagctgcggccccggcaccctgaagatgaacggcaagctgagcgaggagagaaccgaggacaccgactgcgacggcagccccctgcccgagtacttcaccgaggccaccaagatgaacggctgcgaggagtactgcgaggagaaggtgaagagcgagagcctgatccagaagccccaggagaagaagaccgacgacgacgagatcacctggggcaacgacgagctgcccatcgagagaaccaaccacgaggacagcgacaaggaccacagcttcctgaccaacgacgagctggccgtgctgcccgtggtgaaggtgctgcccagcggcaagtacaccggcgccaacctgaagagcgtgatcagagtgctgagaggcctgctggaccagggcatccccagcaaggagctggagaacctgcaggagctgaagcccctggaccagtgcctgatcggccagaccaaggagaacagaagaaagaacagatacaagaacatcctgccctacgacgccaccagagtgcccctgggcgacgagggcggctacatcaacgccagcttcatcaagatccccgtgggcaaggaggagttcgtgtacatcgcctgccagggccccctgcccaccaccgtgggcgacttctggcagatgatctgggagcagaagagcaccgtgatcgccatgatgacccaggaggtggagggcgagaagatcaagtgccagagatactggcccaacatcctgggcaagaccaccatggtgagcaacagactgagactggccctggtgagaatgcagcagctgaagggcttcgtggtgagagccatgaccctggaggacatccagaccagagaggtgagacacatcagccacctgaacttcaccgcctggcccgaccacgacacccccagccagcccgacgacctgctgaccttcatcagctacatgagacacatccacagaagcggccccatcatcacccactgcagcgccggcatcggcagaagcggcaccctgatctgcatcgacgtggtgctgggcctgatcagccaggacctggacttcgacatcagcgacctggtgagatgcatgagactgcagagacacggcatggtgcagaccgaggaccagtacatcttctgctaccaggtgatcctgtacgtgctgaccagactgcaggccgaggaggagcagaagcagcagccccagctgctgaagtag

SEQ ID NO: 278373 - protein, 596 aa, Artificial Sequence
  derived and/or modified sequence
MAPRGCAGHPPPPSPQACVCPGKMLAMGALAGFWILCLLTYGYLSWGQALEEEEEGALLAQAGEKLEPSTTSTSQPHLIFILADDQGFRDVGYHGSEIKTPTLDKLAAEGVKLENYYVQPICTPSRSQFITGKYQIHTGLQHSIIRPTQPNCLPLDNATLPQKLKEVGYSTHMVGKWHLGFYRKECMPTRRGFDTFFGSLLGSGDYYTHYKCDSPGMCGYDLYENDNAAWDYDNGIYSTQMYTQRVQQILASHNPTKPIFLYIAYQAVHSPLQAPGRYFEHYRSIININRRRYAAMLSCLDEAINNVTLALKTYGFYNNSIIIYSSDNGGQPTAGGSNWPLRGSKGTYWEGGIRAVGFVHSPLLKNKGTVCKELVHITDWYPTLISLAEGQIDEDIQLDGYDIWETISEGLRSPRVDILHNIDPIYTKAKNGSWAAGYGIWNTAIQSAIRVQHWKLLTGNPGYSDWVPPQSFSNLGPNRWHNERITLSTGKSVWLFNITADPYERVDLSNRYPGIVKKLLRRLSQFNKTAVPVRYPPKDPRSNPRLNGGVWGPWYKEETKKKKPSKNQAEKKQKKSKKKKKKQQKAVSGKPANLAR

SEQ ID NO: 278374 - DNA, 1791 bp, Artificial Sequence
  derived and/or modified sequence
atggccccaaggggatgtgccggccaccccccgcctccctcgcctcaagcttgtgtttgccctggcaaaatgctcgccatgggcgccctggcagggttctggattttatgtctgcttacttatggctatctgtcgtggggtcaggccctagaagaagaagaagagggggccctgttggcccaggcaggcgagaagcttgagccctccactacatcaactagccaaccccacctgattttcattctcgctgatgaccaaggcttccgtgatgtgggctaccacgggagtgagatcaagacgccaacccttgacaagctagctgcggagggggtgaagctggaaaactactacgtgcagccgatatgcacccctagccgctcccaattcatcacgggaaagtatcagatacacacaggccttcaacacagtatcatacgtcccactcagcctaactgtctacccctggacaatgcaaccttaccccagaagctgaaggaggttggttattccacccacatggtgggtaaatggcatctgggattctaccggaaggagtgtatgcccactcgacgcggctttgatactttttttggctctctgttggggagtggtgattactatactcactataaatgtgattcccctggaatgtgcgggtatgatctctacgaaaatgataacgcagcatgggactacgataatggtatttactcgactcagatgtatactcagagggtgcagcagatcctcgcctcccacaatccaaccaaacccatattcctctacattgcatatcaggctgtgcatagtcccctgcaagctccgggtaggtatttcgaacactatcgtagcatcataaatatcaacagacgaagatacgcggcaatgctttcctgcttagacgaagcaatcaacaatgtgaccctcgcactcaagacatatggcttttacaataattctattattatctactcttccgacaacggcggacaacctaccgccgggggctcaaattggccgctgagaggctccaaaggcacttattgggaaggaggcatccgggccgtcggcttcgttcattcaccactgctgaaaaacaaaggcaccgtttgtaaagaactcgtccatattacagactggtacccaacactgataagtctcgcagaggggcagatagacgaagacatccaactggatgggtacgatatctgggagacgatcagtgagggtctacgctccccaagagttgacatcctgcataatatcgaccctatctacaccaaagccaagaatggctcctgggcggcgggctacggcatatggaatactgccatccaatctgccatcagagtgcaacattggaagctcctcaccgggaatcctgggtatagtgactgggtgccaccccagtctttttctaacttagggccaaacagatggcataacgaaagaataactctctcaactgggaagtcagtttggctgttcaatatcactgcggatccatacgaacgcgtagacctctcaaatagataccctggcattgtgaagaagctcctgaggagactgagtcagttcaacaaaactgccgttcctgtgcgctaccctccaaaggaccccagatccaaccctcggctgaacggaggagtatggggcccttggtacaaggaagaaactaaaaagaagaagccgtctaaaaaccaggcggaaaagaagcagaagaagagtaaaaagaaaaaaaaaaagcagcagaaagctgtctccggtaagccagccaatctggcccgctag

SEQ ID NO: 278375 - DNA, 1791 bp, Artificial Sequence
  derived and/or modified sequence
atggccccccggggctgtgccggccaccccccaccacccagcccccaggcctgtgtgtgccctgggaagatgctggccatgggcgccctggccggcttctggatcctgtgcctgctgacctacggctacctgtcctggggccaggccctggaggaggaggaggagggcgccctgctggcccaggccggggagaagctggagcccagcaccaccagcaccagccagccccacctgatcttcatcctggctgatgaccagggcttcagagatgtgggctaccacggcagcgagatcaagacccccaccctggacaagctggccgctgagggcgtgaagctggagaactactacgtgcagcccatctgcacccccagccgcagccagttcatcaccgggaagtaccagatccacacaggcctgcagcacagcatcatccggcccacccagcccaactgcctgcccctggacaatgccaccctgccccagaagctgaaggaggtgggctacagcacccacatggtgggcaagtggcacctgggcttctacagaaaagaatgcatgcccacccggcggggctttgacaccttcttcggcagcctgctgggcagcggggactactacacccactacaagtgtgacagccctggcatgtgtggctatgacctgtatgaaaatgacaatgctgcctgggactatgacaatggcatctacagcacccagatgtacacccagagggtgcagcagatcctggccagccacaaccccaccaagcccatcttcctgtacatcgcctaccaggccgtgcacagccccctgcaggcccctggccgctactttgagcactaccgcagcatcatcaacatcaacagaagaagatatgctgccatgctgagctgcctggatgaggccatcaacaacgtgaccctggccctgaagacctacggcttctacaacaacagcatcatcatctacagcagtgacaatggaggccagcccacagctgggggcagcaactggcccctgcggggcagcaagggcacctactgggagggcggcatccgggctgtgggctttgtgcacagccccctgctgaagaacaagggcaccgtgtgcaaggagctggtgcacatcacagactggtaccccaccctcatcagcctggccgagggccagattgatgaggacatccagctggatggctatgacatctgggagaccatcagcgagggcctgcggagcccccgggtggacatcctgcacaacatcgaccccatctacaccaaggccaagaatggctcctgggccgccggctacggcatctggaacacagccatccagagcgccatccgggtgcagcactggaagctgctgaccggcaaccctggctacagcgactgggtgcccccccagagcttcagcaacctgggccccaaccgctggcacaatgaaagaatcaccctgagcacaggcaagtctgtgtggctgttcaacatcacagctgacccctatgagcgggtggacctgagcaaccgctacccaggcatcgtgaagaagctgctgcggcggctgagccagttcaacaagacagctgtgcctgtgcgctacccacccaaggaccccaggagcaacccccggctgaatggaggagtgtggggcccctggtacaaggaggagaccaagaagaagaagcccagcaagaaccaggccgagaagaagcagaagaagagcaagaagaagaagaagaagcagcagaaggctgtgtctgggaagccagccaacctggccaggtag

SEQ ID NO: 278376 - DNA, 1791 bp, Artificial Sequence
  derived and/or modified sequence
atggccccccggggctgcgccggccacccccccccccccagcccccaggcttgtgtgtgccctggcaaaatgcttgccatgggcgctctcgccggtttctggatcctctgcctactgacgtacggctatttatcatggggtcaagctttggaggaggaagaggaaggggctctactggcccaggccggggagaagttggaacctagcactaccagtacttcgcaacctcatctgatctttatactggccgacgaccagggtttccgagacgtgggatatcacggctccgagataaagaccccaaccttggacaagctcgcagcagaaggtgtaaagctcgagaattactatgtccaacctatttgtaccccttcccgcagtcaatttataacgggaaagtaccagattcacactggtctgcaacactccattataagacccacacagcccaattgtctaccactcgacaatgccacgctgcctcagaaactgaaagaggtgggatactcaacccatatggtagggaaatggcatctgggattctacaggaaagagtgcatgcctacgagacgcggattcgataccttttttggatccctcctcgggagcggggactattacacacactataaatgtgattcccccggaatgtgtgggtacgatttatatgagaatgataacgcagcgtgggactacgataacggaatctactctactcaaatgtatacacagcgggtgcaacaaatcttggcctcacacaaccccaccaagccaatctttctgtacatcgcttaccaggcagtgcactcaccactgcaagcacctggacgatattttgaacactaccgcagcataataaacatcaacagacggagatacgctgccatgttgagctgtctggatgaagctattaacaacgtgaccctagccttgaagacgtatggcttctataacaattcaatcattatctattcatcagacaatggtgggcagcccaccgccggcggcagtaactggcccctgcgggggagtaaaggcacttattgggaaggcgggattagagccgtggggttcgtgcattctcccctactgaagaacaaagggacggtctgcaaggagcttgtacacatcacagactggtaccctacccttatctcgctggcagagggccagattgacgaagacatacagctggatggatatgatatctgggagactatttctgagggcctgaggagccccagggtagatatcctgcacaatatagatcccatttacacaaaagcaaagaatgggtcttgggctgccgggtacgggatctggaacaccgctatccagtctgctataagagtgcaacattggaagctgctaaccggaaatcccggttatagtgattgggtcccgccacaatcttttagcaacctcggaccaaatcggtggcacaacgagagaataactttgtctaccggcaagtcagtgtggctgtttaacataaccgccgatccttacgaaagggttgatctaagtaatcgttaccccggcatagtcaagaagctgctgagaagactgtctcagttcaacaagacagcagttccggtgagatatccccccaaggacccccgatcaaaccctcgtctcaacggcggcgtttggggcccctggtacaaagaagaaacaaaaaagaagaagccatctaagaatcaagcagaaaaaaagcaaaagaaatccaagaagaagaaaaaaaagcagcagaaggccgtgtctggtaagcccgccaacttagcccggtag

SEQ ID NO: 278377 - DNA, 1791 bp, Artificial Sequence
  derived and/or modified sequence
atggcgcctagggggtgtgccggtcatccccctccccctagcccccaggcatgtgtttgcccgggtaagatgctggctatgggtgccttagcaggattttggatcctttgcttattgacttacgggtacctgagctgggggcaggcattagaggaggaggaagagggagcacttctggctcaggccggagaaaaactggagccaagcaccacgtccacctctcaacctcacctgatatttattttagcggatgaccaaggatttcgcgatgttggctaccatggaagcgaaattaagactccaacactggataagttggcagctgagggagtgaaactcgaaaactattacgtgcagccaatttgcacgccatctaggtcgcagtttattacgggtaagtatcagattcatactggtctgcagcactcgataatcagacctacccagcccaattgtcttcctctagacaacgccactttgccccagaagctcaaggaggtagggtactccacacatatggtgggcaagtggcatctcgggttctatcggaaggagtgtatgcctacccggaggggtttcgatactttctttggatccctgctgggctctggggattattacacccactataagtgcgatagcccaggcatgtgtggatacgacctgtatgagaatgataatgccgcttgggattacgacaacggcatctactccacgcagatgtatactcagagagtgcagcagatcctggccagtcataacccaacgaagccaattttcttgtacatcgcctaccaagccgtccatagccctctccaagccccaggccgttatttcgaacattaccgtagtatcattaacatcaaccgacggaggtatgcagcaatgctctcttgtttggatgaggccattaacaacgttaccctggcattgaagacctatggattttacaataactctattataatctactcttcagataacggcggacagccaacagccggtggtagcaactggcctctcaggggtagtaaaggaacttattgggaaggtgggattcgggctgttggttttgttcatagccccctcctaaaaaataaaggtaccgtgtgcaaagagcttgtccacattacagactggtaccctactctgatttctttagcagagggtcagattgacgaggacatccaactggatggttacgatatctgggaaactattagtgaaggcctcaggagcccacgcgtagatattctgcataatatcgaccctatttatactaaggcgaaaaatggctcttgggccgctggctatggtatctggaatacggccatccagtcggctattagggtgcagcattggaaattactcacagggaatcccggatactccgattgggttccaccacagagtttctctaacctcggccctaatcgatggcacaatgagagaattacactttccaccggtaagtccgtctggctgttcaacatcaccgctgacccttacgagcgggtagatctgtctaacagatatccaggcattgtaaagaaactactgagaaggctctcccagttcaataagacagcggtgccagttcgctatccgccaaaagaccctcgttcaaaccctagattaaatgggggtgtgtgggggccttggtataaggaggaaaccaaaaaaaagaagcccagtaagaatcaggcagaaaaaaaacaaaagaagagcaagaaaaagaagaaaaagcaacagaaggccgtgtcaggtaagcccgcaaacctcgccagatag

SEQ ID NO: 278378 - DNA, 2114 bp, Artificial Sequence
  derived and/or modified sequence
acttctggaagattaaagttgtcggacatggtgacagctgagaggagaggaggatttcttgccaggtggagagtcttcaccgtctgttgggtgcatgtgtgcgcccgcagcggcgcggggcgcgtggttctccgcgtggagtctcacctgggacctgagtgaatggctcccaggggctgtgcggggcatccgcctccgccttctccacaggcctgtgtctgtcctggaaagatgctagcaatgggggcgctggcaggattctggatcctctgcctcctcacttatggttacctgtcctggggccaggccttagaagaggaggaagaaggggccttactagctcaagctggagagaaactagagcccagcacaacttccacctcccagccccatctcattttcatcctagcggatgatcagggatttagagatgtgggttaccacggatctgagattaaaacacctactcttgacaagctcgctgccgaaggagttaaactggagaactactatgtccagcctatttgcacaccatccaggagtcagtttattactggaaagtatcagatacacaccggacttcaacattctatcataagacctacccaacccaactgtttacctctggacaatgccaccctacctcagaaactgaaggaggttggatattcaacgcatatggtcggaaaatggcacttgggtttttacagaaaagaatgcatgcccaccagaagaggatttgataccttttttggttcccttttgggaagtggggattactatacacactacaaatgtgacagtcctgggatgtgtggctatgacttgtatgaaaacgacaatgctgcctgggactatgacaatggcatatactccacacagatgtacactcagagagtacagcaaatcttagcttcccataaccccacaaagcctatatttttatatattgcctatcaagctgttcattcaccactgcaagctcctggcaggtatttcgaacactaccgatccattatcaacataaacaggaggagatatgctgccatgctttcctgcttagatgaagcaatcaacaacgtgacattggctctaaagacttatggtttctataacaacagcattatcatttactcttcagataatggtggccagcctacggcaggagggagtaactggcctctcagaggtagcaaaggaacatattgggaaggagggatccgggctgtaggctttgtgcatagcccacttctgaaaaacaagggaacagtgtgtaaggaacttgtgcacatcactgactggtaccccactctcatttcactggctgaaggacagattgatgaggacattcaactagatggctatgatatctgggagaccataagtgagggtcttcgctcaccccgagtagatattttgcataacattgaccccatatacaccaaggcaaaaaatggctcctgggcagcaggctatgggatctggaacactgcaatccagtcagccatcagagtgcagcactggaaattgcttacaggaaatcctggctacagcgactgggtcccccctcagtctttcagcaacctgggaccgaaccggtggcacaatgaacggatcaccttgtcaactggcaaaagtgtatggcttttcaacatcacagccgacccatatgagagggtggacctatctaacaggtatccaggaatcgtgaagaagctcctacggaggctctcacagttcaacaaaactgcagtgccggtcaggtatccccccaaagaccccagaagtaaccctaggctcaatggaggggtctggggaccatggtataaagaggaaaccaagaaaaagaagccaagcaaaaatcaggctgagaaaaagcaaaagaaaagcaaaaaaaagaagaagaaacagcagaaagcagtctcaggtaaaccagcaaatttggctcgataatatcgctggcctaagcgtcaggcttgttttcatgctgtgccactccagagacttctgccacctggccgccacactgaaaactgtcctgctcagtgccaaggtgctactcttgcaagccacacttagagagagtggagatgtttatttctcttgctccttta

SEQ ID NO: 278379 - DNA, 1791 bp, Artificial Sequence
  derived and/or modified sequence
atggcccccagaggctgcgccggccacccccccccccccagcccccaggcctgcgtgtgccccggcaagatgctggccatgggcgccctggccggcttctggatcctgtgcctgctgacctacggctacctgagctggggccaggccctggaggaggaggaggagggcgccctgctggcccaggccggcgagaagctggagcccagcaccaccagcaccagccagccccacctgatcttcatcctggccgacgaccagggcttcagagacgtgggctaccacggcagcgagatcaagacccccaccctggacaagctggccgccgagggcgtgaagctggagaactactacgtgcagcccatctgcacccccagcagaagccagttcatcaccggcaagtaccagatccacaccggcctgcagcacagcatcatcagacccacccagcccaactgcctgcccctggacaacgccaccctgccccagaagctgaaggaggtgggctacagcacccacatggtgggcaagtggcacctgggcttctacagaaaggagtgcatgcccaccagaagaggcttcgacaccttcttcggcagcctgctgggcagcggcgactactacacccactacaagtgcgacagccccggcatgtgcggctacgacctgtacgagaacgacaacgccgcctgggactacgacaacggcatctacagcacccagatgtacacccagagagtgcagcagatcctggccagccacaaccccaccaagcccatcttcctgtacatcgcctaccaggccgtgcacagccccctgcaggcccccggcagatacttcgagcactacagaagcatcatcaacatcaacagaagaagatacgccgccatgctgagctgcctggacgaggccatcaacaacgtgaccctggccctgaagacctacggcttctacaacaacagcatcatcatctacagcagcgacaacggcggccagcccaccgccggcggcagcaactggcccctgagaggcagcaagggcacctactgggagggcggcatcagagccgtgggcttcgtgcacagccccctgctgaagaacaagggcaccgtgtgcaaggagctggtgcacatcaccgactggtaccccaccctgatcagcctggccgagggccagatcgacgaggacatccagctggacggctacgacatctgggagaccatcagcgagggcctgagaagccccagagtggacatcctgcacaacatcgaccccatctacaccaaggccaagaacggcagctgggccgccggctacggcatctggaacaccgccatccagagcgccatcagagtgcagcactggaagctgctgaccggcaaccccggctacagcgactgggtgcccccccagagcttcagcaacctgggccccaacagatggcacaacgagagaatcaccctgagcaccggcaagagcgtgtggctgttcaacatcaccgccgacccctacgagagagtggacctgagcaacagataccccggcatcgtgaagaagctgctgagaagactgagccagttcaacaagaccgccgtgcccgtgagatacccccccaaggaccccagaagcaaccccagactgaacggcggcgtgtggggcccctggtacaaggaggagaccaagaagaagaagcccagcaagaaccaggccgagaagaagcagaagaagagcaagaagaagaagaagaagcagcagaaggccgtgagcggcaagcccgccaacctggccagatag

SEQ ID NO: 278380 - protein, 384 aa, Artificial Sequence
  derived and/or modified sequence
MQAFSEEERKQWLEALGGKEALSHSFNTAIIPRPEGNAQLDKMGFTIIRKCISAVETRGINDQGLYRVVGVSSKVQRLLSMLMDVKTCNEVDLENSADWEVKTITSALKQYLRSLPEPLMTYELHGDFIVPAKSGSPESRVNAIHFLVHKLPEKNKEMLDILVKHLTNVSNHSKQNLMTVANLGVVFGPTLMRPQEETVAALMDLKFQNIVVEILIENHEKIFRTPPDTTFPEPTCLSASPPNAPPRQSKRQGQRTKRPVAVYNLCLELEDGDNPYPSKEDTPTSSLDSLSSPSPVTTAVPGPPGPDKNHLLADGGSFGDWASTIIRSRKARAVYPCEAEHSSELSFEIGAIFEDVQTSREPGWLEGTLNGKRGLIPQNYVKLL

SEQ ID NO: 278381 - DNA, 1155 bp, Artificial Sequence
  derived and/or modified sequence
atgcaggctttctctgaagaagaacgtaagcagtggctggaggcactgggcggaaaggaggctctctcccactcattcaatacagccatcatcccaagacccgaaggaaacgcacagctggacaagatgggattcactattatcaggaagtgcatctccgctgtcgaaactcgcgggataaatgaccaaggtctctaccgcgtggtgggagtgagttcgaaagtccagcgattgctgagcatgctaatggatgtcaagacatgtaacgaggtggacctcgagaactccgccgattgggaagtcaagacaattactagcgctctcaaacagtacttgaggagtttgcccgagcctctcatgacctacgagttacatggcgatttcatcgtgccggctaaaagcggtagtccggagagtagggtcaacgcaatacactttctggttcataaactccctgaaaaaaataaagagatgttggatattctggtgaaacatttgaccaacgtgtccaaccattccaaacaaaacctaatgacagtggcaaatcttggcgttgtattcgggcctacgctcatgaggccacaggaggaaactgttgctgctttaatggatctgaagtttcagaacatcgtggttgagatcctgattgagaatcatgagaagatctttcgcacccctcccgatactacgttcccagaacctacttgtctcagcgcatcacccccaaatgccccgccccgacagtccaagcgccagggacagcggacaaagagaccagtggctgtctacaatctctgtctggaactcgaggatggagacaacccatatccctctaaggaagacactcccacttcgtcattggattcactgagctctccgagccctgtgacaaccgccgtgccagggcctcccggaccagacaagaaccatcttctggccgatgggggttctttcggtgattgggcttcaaccatcattagaagtcggaaggctcgcgctgtctacccttgcgaagcagaacactcatcagaactgagcttcgagatcggagcaatcttcgaggacgtacaaacatctcgcgagcccggatggctcgaaggaacccttaatggcaagaggggactgatcccccaaaactacgtgaagttgctatag

SEQ ID NO: 278382 - DNA, 1155 bp, Artificial Sequence
  derived and/or modified sequence
atgcaggccttcagcgaggaggagaggaagcagtggctggaggccctgggcggcaaggaggccctgagccacagcttcaacacagccatcatccccaggcctgagggcaatgcccagctggacaagatgggcttcaccatcatcaggaagtgcatctctgctgtggagacccggggcatcaatgaccagggcctgtacagagtggtgggcgtgagcagcaaggtgcagaggctgctgtccatgctgatggatgtgaagacctgcaatgaggtggacctggagaacagcgctgactgggaggtgaagaccatcaccagcgccctgaagcagtacctgcggagcctgcctgagcccctgatgacctatgagctgcatggagacttcatcgtgcctgccaagagcggcagccctgagagccgggtgaatgccatccacttcctggtgcacaagctgcctgagaagaacaaggagatgctggacatcctggtgaagcacctgaccaacgtgagcaaccacagcaagcagaacctgatgacagtggccaacctgggcgtggtgtttggccccaccctgatgaggccccaggaggagaccgtggccgccctgatggacctgaagttccagaacatcgtggtggagatcctgattgaaaatcatgagaagatcttccgcaccccaccagacaccaccttccctgagcccacctgcctgagcgccagccccccaaatgccccaccccggcagagcaagaggcagggccagaggaccaagaggcctgtggccgtgtacaacctgtgcctggagctggaggatggagacaacccctaccccagcaaggaggacacccccaccagcagcctggacagcctgagcagccccagccctgtgaccacagctgtgcccggccccccaggccctgacaagaaccacctgctggctgatggcggcagctttggagactgggccagcaccatcatccgcagcaggaaggcccgggctgtgtacccctgtgaggccgagcacagcagcgagctgagctttgaaattggagccatctttgaagatgtgcagaccagccgggagcccggctggctggagggcaccctgaatggcaagaggggcctcatcccccagaactacgtgaagctgctgtag

SEQ ID NO: 278383 - DNA, 1155 bp, Artificial Sequence
  derived and/or modified sequence
atgcaggccttcagcgaggaggagcggaagcagtggctggaggccctgggaggcaaggaagcactatctcattcttttaacaccgccattataccccgaccagaggggaacgcccagttggacaagatgggtttcaccattataagaaagtgtatttccgccgtcgagaccagaggaattaacgaccaggggctctatcgggtggtcggtgtgagttccaaggtgcagaggctattgtccatgctgatggatgtcaaaacttgcaacgaagtcgacttggaaaactctgctgactgggaggtgaaaaccatcacatcagccctcaagcagtacctgagaagcctgcccgagcccctgatgacatacgagttgcacggcgactttatcgtgccagctaagtcaggtagcccagaaagtcgcgtcaatgcaatccacttcttggtccataagttgcctgaaaagaataaggaaatgctagacatactcgtgaagcacttgacgaatgtgagcaatcacagtaagcagaacctgatgactgtcgccaacctgggggtggtgttcggtcctaccctgatgcggcctcaggaagagacggtggctgctctgatggatctgaagttccagaacattgtggtggagatcttgattgagaaccacgagaaaatatttcgtactccccctgacaccacatttcctgagccaacttgcctgtcagctagcccacccaacgcacctcccaggcagagcaagcgccagggccagagaacgaagcgcccggttgcggtctataatctctgccttgaactggaggatggggacaacccttatccttcaaaagaggataccccaacgtcatcgctcgattcccttagcagcccaagcccagtgaccactgcagtccctggcccacccggccccgacaagaatcacctgctagccgacggggggagtttcggcgattgggcctcaactattataagaagcagaaaagcacgtgcggtctacccctgtgaagccgagcattcctccgaactgtcatttgaaatcggggcgatctttgaagatgtacagacgagtcgagagcctgggtggcttgaaggtacactgaacggtaagagagggctcattcctcagaactatgtaaagctgctgtag

SEQ ID NO: 278384 - DNA, 1155 bp, Artificial Sequence
  derived and/or modified sequence
atgcaggccttctcagaagaggagagaaaacagtggctagaggctctgggaggaaaagaagccctgagtcactcttttaatactgccatcatccccagacctgaggggaacgcccagctggacaaaatgggtttcacaattattcgtaaatgtatcagcgccgttgagacgaggggtattaacgatcaggggttgtatcgggtggtcggggtgagctcaaaagtgcaacgcctgctgagtatgctgatggatgtgaaaacatgtaacgaggttgacctggagaactcagcggattgggaagtcaagaccataacttctgcactgaagcagtacctccggtccctgcctgagcctctcatgacatatgaattgcatggggactttattgtcccagctaagagcggttcgccagagagccgcgtgaatgcaatacatttcctggtgcacaaactcccagagaagaacaaagagatgcttgatattctggtaaagcacctgacgaatgtttcgaaccattcaaagcagaatctgatgacggtggccaatttaggggttgtgtttggccctactttgatgagaccacaggaagagaccgtggccgcacttatggaccttaaattccagaatattgtcgtcgagatcctcattgagaatcacgagaagattttccgcactccacctgatacgacattccccgaacccacatgcttatccgcctccccacccaacgcgccacctagacaatctaaacgtcaggggcagcgcactaaacgccctgtggctgtgtacaacctttgccttgaactggaagacggtgataacccatacccaagtaaagaagacaccccaacatcatcccttgactccctctcctcaccttctcctgtcacaacagccgtgcccggaccccctggacctgataaaaaccacctgctcgctgacggcggatctttcggcgattgggcctccactataattcgatcaaggaaggcgcgagccgtgtacccatgtgaagctgaacactccagcgagttgagctttgaaattggagccatcttcgaggatgtccagacttcaagggagcctggctggttggaggggaccctgaacgggaagcgtggtttgatacctcaaaactacgtcaaactgctgtag

SEQ ID NO: 278385 - DNA, 1934 bp, Artificial Sequence
  derived and/or modified sequence
atgtaccaagaggcatactgactccattgacagaaggttttgttttgacatagaagctgctgatcggcctggcgtttccttgaccatgcaggcattttccgaagaggaaaggaagcagtggttggaagctctgggtggaaaggaagctctgtcccatagttttaatacagccatcatcccaagaccagaaggaaatgcacagttggataagatggggttcacaattatcagaaaatgcatcagtgccgttgaaacacgaggtataaatgaccaaggattgtacagagttgtgggggtgagttcaaaggtccagagacttctgagtatgttgatggatgtaaaaacatgcaatgaggtggacctggagaattctgcagattgggaagtgaagacaataacaagtgccttgaaacagtatttgaggagtcttccagagcctctcatgacctatgagttacatggagatttcattgttccagccaaaagcggcagcccagaatctcgtgttaatgcgatccatttcttggtacacaaactgccagagaagaataaagagatgttggatattttggtgaaacacttaacaaatgtttcaaatcactccaagcagaacctgatgactgtggcaaacttaggagtggtgtttggaccaactctgatgaggccacaggaagaaactgtcgctgccctcatggacttgaagtttcagaatattgttgtggaaatcttaattgaaaaccatgaaaagatttttcggacgccgcccgatactacattccctgagcccacctgcctgtcagcatcacccccaaatgcgccaccaaggcagtcgaagagacaaggccagagaaccaagaggcccgtggccgtctacaatctttgtctggagctggaagatggtgacaatccttacccttccaaggaggacacccctaccagcagtctggactcactttcctccccgtctcccgtgactacagctgtccctgggcctcctggaccagacaaaaaccaccttctggcagatggagggagctttggagactgggcatccactatcatccgcagtcggaaggctcgagccgtgtatccgtgtgaagcagaacacagctcggaattatcttttgaaataggagcaatttttgaggatgtacaaacctccagggaacctggctggctagaagggactctgaacggcaagagggggctgattccacagaactacgtcaagctgctgtagctcctggcctcagagcccctgctgaccctggcacccagggacctgcctgggggcagagagctgtcttcctcctccgaggctctgggctgcacccacaggtacctccacacttgggagttaccatcatcacagtcagccctgggggtggggggtggtgggcagggatgggacgcaccacacagaactgtgattgtggatcaggaggggaatgtcaggattcgcaaaatggacttttcatttgtcaagtattgggacttgtgatttttaattatccagcatatagaatgagagggagggcagccttctgccacctgtgtcgcctccactggcagtcacgccaccagagccaccctggctccctctcctccctgagcacctgctgctgcgattttaaagggaactgtactactcgcagtgataggtttgcagagtgtgtgcttggctgtggcagcctagcttggagaagctgctgttggtgcaagggagatggtctcaagtcagagggaagcagagacgcgcgtctcaagcctgcccttcctagacggccacctgcaggaccccacactcactgcactggcagcgtgcactggcgtatttgtaacaggcttctcggtgctcctcacccgtgtgctgttttccaaacaccacctttttgcctcaaggtctctgtaaatgaaataaactgtaatttact

SEQ ID NO: 278386 - DNA, 1155 bp, Artificial Sequence
  derived and/or modified sequence
atgcaggccttcagcgaggaggagagaaagcagtggctggaggccctgggcggcaaggaggccctgagccacagcttcaacaccgccatcatccccagacccgagggcaacgcccagctggacaagatgggcttcaccatcatcagaaagtgcatcagcgccgtggagaccagaggcatcaacgaccagggcctgtacagagtggtgggcgtgagcagcaaggtgcagagactgctgagcatgctgatggacgtgaagacctgcaacgaggtggacctggagaacagcgccgactgggaggtgaagaccatcaccagcgccctgaagcagtacctgagaagcctgcccgagcccctgatgacctacgagctgcacggcgacttcatcgtgcccgccaagagcggcagccccgagagcagagtgaacgccatccacttcctggtgcacaagctgcccgagaagaacaaggagatgctggacatcctggtgaagcacctgaccaacgtgagcaaccacagcaagcagaacctgatgaccgtggccaacctgggcgtggtgttcggccccaccctgatgagaccccaggaggagaccgtggccgccctgatggacctgaagttccagaacatcgtggtggagatcctgatcgagaaccacgagaagatcttcagaaccccccccgacaccaccttccccgagcccacctgcctgagcgccagcccccccaacgccccccccagacagagcaagagacagggccagagaaccaagagacccgtggccgtgtacaacctgtgcctggagctggaggacggcgacaacccctaccccagcaaggaggacacccccaccagcagcctggacagcctgagcagccccagccccgtgaccaccgccgtgcccggcccccccggccccgacaagaaccacctgctggccgacggcggcagcttcggcgactgggccagcaccatcatcagaagcagaaaggccagagccgtgtacccctgcgaggccgagcacagcagcgagctgagcttcgagatcggcgccatcttcgaggacgtgcagaccagcagagagcccggctggctggagggcaccctgaacggcaagagaggcctgatcccccagaactacgtgaagctgctgtag

SEQ ID NO: 278387 - protein, 865 aa, Artificial Sequence
  derived and/or modified sequence
MPAVSLPPKENALFKRILRCYEHKQYRNGLKFCKQILSNPKFAEHGETLAMKGLTLNCLGKKEEAYELVRRGLRNDLKSHVCWHVYGLLQRSDKKYDEAIKCYRNALKWDKDNLQILRDLSLLQIQMRDLEGYRETRYQLLQLRPAQRASWIGYAIAYHLLEDYEMAAKILEEFRKTQQTSPDKVDYEYSELLLYQNQVLREAGLYREALEHLCTYEKQICDKLAVEETKGELLLQLCRLEDAADVYRGLQERNPENWAYYKGLEKALKPANMLERLKIYEEAWTKYPRGLVPRRLPLNFLSGEKFKECLDKFLRMNFSKGCPPVFNTLRSLYKDKEKVAIIEELVVGYETSLKSCRLFNPNDDGKEEPPTTLLWVQYYLAQHYDKIGQPSIALEYINTAIESTPTLIELFLVKAKIYKHAGNIKEAARWMDEAQALDTADRFINSKCAKYMLKANLIKEAEEMCSKFTREGTSAVENLNEMQCMWFQTECAQAYKAMNKFGEALKKCHEIERHFIEITDDQFDFHTYCMRKITLRSYVDLLKLEDVLRQHPFYFKAARIAIEIYLKLHDNPLTDENKEHEADTANMSDKELKKLRNKQRRAQKKAQIEEEKKNAEKEKQQRNQKKKKDDDDEEIGGPKEELIPEKLAKVETPLEEAIKFLTPLKNLVKNKIETHLFAFEIYFRKEKFLLMLQSVKRAFAIDSSHPWLHECMIRLFNTVCESKDLSDTVRTVLKQEMNRLFGATNPKNFNETFLKRNSDSLPHRLSAAKMVYYLDPSSQKRAIELATTLDESLTNRNLQTCMEVLEALYDGSLGDCKEAAEIYRANCHKLFPYALAFMPPGYEEDMKITVNGDSSAEAEELANEI

SEQ ID NO: 278388 - DNA, 2598 bp, Artificial Sequence
  derived and/or modified sequence
atgcccgccgtgagcctgccccccaaggagaacgccctgttcaagagaatcctgagatgctacgagcacaagcagtacagaaacggcctgaagttctgcaagcagatcctgagcaaccccaagttcgccgagcacggcgagaccctggccatgaagggcctgaccctgaactgcctgggcaagaaggaggaggcctacgagctggtgagaagaggcctgagaaacgacctgaagagccacgtgtgctggcacgtgtacggcctgctgcagagaagcgacaagaagtacgacgaggccatcaagtgctacagaaacgccctgaagtgggacaaggacaacctgcagatcctgagagacctgagcctgctgcagatccagatgagagacctggagggctacagagagaccagataccagctgctgcagctgagacccgcccagagagccagctggatcggctacgccatcgcctaccacctgctggaggactacgagatggccgccaagatcctggaggagttcagaaagacccagcagaccagccccgacaaggtggactacgagtacagcgagctgctgctgtaccagaaccaggtgctgagagaggccggcctgtacagagaggccctggagcacctgtgcacctacgagaagcagatctgcgacaagctggccgtggaggagaccaagggcgagctgctgctgcagctgtgcagactggaggacgccgccgacgtgtacagaggcctgcaggagagaaaccccgagaactgggcctactacaagggcctggagaaggccctgaagcccgccaacatgctggagagactgaagatctacgaggaggcctggaccaagtaccccagaggcctggtgcccagaagactgcccctgaacttcctgagcggcgagaagttcaaggagtgcctggacaagttcctgagaatgaacttcagcaagggctgcccccccgtgttcaacaccctgagaagcctgtacaaggacaaggagaaggtggccatcatcgaggagctggtggtgggctacgagaccagcctgaagagctgcagactgttcaaccccaacgacgacggcaaggaggagccccccaccaccctgctgtgggtgcagtactacctggcccagcactacgacaagatcggccagcccagcatcgccctggagtacatcaacaccgccatcgagagcacccccaccctgatcgagctgttcctggtgaaggccaagatctacaagcacgccggcaacatcaaggaggccgccagatggatggacgaggcccaggccctggacaccgccgacagattcatcaacagcaagtgcgccaagtacatgctgaaggccaacctgatcaaggaggccgaggagatgtgcagcaagttcaccagagagggcaccagcgccgtggagaacctgaacgagatgcagtgcatgtggttccagaccgagtgcgcccaggcctacaaggccatgaacaagttcggcgaggccctgaagaagtgccacgagatcgagagacacttcatcgagatcaccgacgaccagttcgacttccacacctactgcatgagaaagatcaccctgagaagctacgtggacctgctgaagctggaggacgtgctgagacagcaccccttctacttcaaggccgccagaatcgccatcgagatctacctgaagctgcacgacaaccccctgaccgacgagaacaaggagcacgaggccgacaccgccaacatgagcgacaaggagctgaagaagctgagaaacaagcagagaagagcccagaagaaggcccagatcgaggaggagaagaagaacgccgagaaggagaagcagcagagaaaccagaagaagaagaaggacgacgacgacgaggagatcggcggccccaaggaggagctgatccccgagaagctggccaaggtggagacccccctggaggaggccatcaagttcctgacccccctgaagaacctggtgaagaacaagatcgagacccacctgttcgccttcgagatctacttcagaaaggagaagttcctgctgatgctgcagagcgtgaagagagccttcgccatcgacagcagccacccctggctgcacgagtgcatgatcagactgttcaacaccgtgtgcgagagcaaggacctgagcgacaccgtgagaaccgtgctgaagcaggagatgaacagactgttcggcgccaccaaccccaagaacttcaacgagaccttcctgaagagaaacagcgacagcctgccccacagactgagcgccgccaagatggtgtactacctggaccccagcagccagaagagagccatcgagctggccaccaccctggacgagagcctgaccaacagaaacctgcagacctgcatggaggtgctggaggccctgtacgacggcagcctgggcgactgcaaggaggccgccgagatctacagagccaactgccacaagctgttcccctacgccctggccttcatgccccccggctacgaggaggacatgaagatcaccgtgaacggcgacagcagcgccgaggccgaggagctggccaacgagatctag

SEQ ID NO: 278389 - DNA, 2598 bp, Artificial Sequence
  derived and/or modified sequence
atgccagctgtatctctcccacctaaagagaatgccctatttaagcgcatcctgcgctgttatgagcataagcaatatagaaatggtctgaaattttgcaagcaaatactttctaatcctaaattcgctgagcacggggagacattagctatgaaaggattgacactgaattgcctggggaagaaagaagaagcttatgaactcgtacgcagaggattgagaaatgatctcaaatcccatgtgtgttggcatgtctacggactcttacaaaggtctgacaagaagtacgatgaagctatcaaatgctataggaacgccctgaagtgggacaaggacaacctccagattctccgtgatctgtcactgttacagattcaaatgagggatcttgagggttatagggagacccgctaccaactcctacagctaaggcctgcacagcgggccagctggataggctatgctatcgcctatcacctactggaggattatgagatggccgccaagatcctggaggagttccgcaagactcagcagacttcacccgacaaagtcgattatgagtatagcgagctgctgctgtatcagaatcaggtgctcagggaggcagggctctacagggaagcccttgaacacttgtgtacttacgaaaagcagatatgcgacaagcttgctgtagaagagacaaagggagagctcctgttgcaactatgtcgccttgaggacgcagccgatgtgtatcgaggattgcaggagagaaaccctgaaaattgggcatactacaagggcctggaaaaagctttgaaacccgccaatatgctagagcggttgaagatatatgaggaggcctggactaagtatcccaggggtctggttcctcgccggctgcctctaaatttcctgtccggcgaaaaatttaaggaatgtttagataaatttttacggatgaatttcagcaaaggttgtccaccggtgttcaatactctgaggtcactgtacaaggataaggagaaagtagccatcattgaggagctggtggtcggttacgagacttccctgaaaagctgtagactctttaacccaaacgatgacggaaaggaggaacctcctactacactgctctgggtgcagtattatttagcacagcattacgacaagatagggcagccttccatagcgcttgaatacatcaacacagccatcgagagcacccctaccctgatcgagcttttccttgtgaaagccaaaatctataagcacgccggcaatataaaggaggcagcgaggtggatggatgaggcgcaggccttggatactgcggatcgctttattaatagcaaatgcgccaaatacatgctgaaggctaacttgattaaggaggccgaggagatgtgcagtaagtttacacgggaaggcacatcagctgtggagaacctaaatgaaatgcagtgcatgtggtttcagaccgagtgtgcccaggcttataaggctatgaacaaattcggcgaagcccttaaaaagtgccacgagatcgagagacacttcattgagataaccgatgatcagttcgatttccatacctattgtatgaggaagataaccctgcgcagttatgtggatttgctgaagctcgaggatgtgcttcgacagcatcctttctactttaaagcagcccgcatcgccattgaaatttatctcaaattgcatgacaacccgctcaccgacgagaataaggagcatgaagccgatactgctaatatgagcgataaagaattgaagaaactgagaaataagcaaagacgcgcccagaaaaaagcacagatcgaggaagagaaaaaaaatgctgaaaaggagaagcagcagaggaatcaaaaaaaaaagaaggacgatgacgatgaggagattggggggccgaaggaagaacttattcctgaaaagttggccaaggtcgagactccgctggaggaagcaataaagttcctcacccctctgaaaaaccttgtgaaaaataagattgagacccacctgtttgcattcgagatttacttccggaaggagaaattcctccttatgctgcagtcagtcaagagggcattcgcaatcgacagttcccatccttggttgcacgagtgcatgattcgccttttcaataccgtgtgcgaatctaaggacctgagcgatacagtgaggacagtcttgaagcaggagatgaaccggctctttggggcaacaaaccctaagaacttcaatgaaaccttcttgaaaagaaattcagactcacttcctcacaggttatccgctgcaaaaatggtgtactacctcgacccctccagtcagaagagagcgatagagctcgctacgactctagacgaaagcctcactaatcgcaatctccaaacttgtatggaagtactggaggctctttatgatggaagcttgggagactgtaaagaagcggccgaaatttaccgagctaattgccacaagttgtttccttatgcccttgccttcatgccacccggttacgaagaggatatgaaaattactgtgaatggcgactcctccgcagaggctgaggagcttgcaaatgagatatag

SEQ ID NO: 278390 - DNA, 2598 bp, Artificial Sequence
  derived and/or modified sequence
atgcctgctgtgtccctgccccccaaggaaaatgccctcttcaagaggatcctgcgctgctatgagcacaagcagtacagaaatggcctgaagttctgcaagcagatcctgagcaaccccaagtttgctgagcacggggagaccctggccatgaagggcctgaccctgaactgcctgggcaagaaggaggaggcctatgagctggtgcggcggggcctgagaaatgacctgaagagccacgtgtgctggcacgtgtatggcctgctgcagaggagtgacaagaagtatgatgaggccatcaagtgctacagaaatgccctgaagtgggacaaggacaacctgcagatcctgcgggacctgagcctgctgcagatccagatgagggacctggagggctaccgggagacccgctaccagctgctgcagctgcggcctgcccagagggcctcctggattggctacgccatcgcctaccacctgctggaggactatgagatggccgccaagatcctggaggagttcaggaagacccagcagaccagcccagacaaggtggactatgagtacagcgagctgctgctgtaccagaaccaggtgctgcgggaggccggcctgtaccgggaggccctggagcacctgtgcacctatgagaagcagatctgtgacaagctggccgtggaggagaccaagggggagctgctgctgcagctgtgccgcctggaggatgctgctgatgtgtaccggggcctgcaggagagaaatcctgagaactgggcctactacaagggcctggagaaggccctgaagccagccaacatgctggagcggctgaagatctatgaggaggcctggaccaagtacccccggggcctggtgccccggcggctgcccctgaacttcctgagcggggagaagttcaaggagtgcctggacaagttcctgaggatgaacttcagcaagggctgcccccctgtgttcaacaccctgcggagcctgtacaaggacaaggagaaggtggccatcatcgaggagctggtggtgggctatgagaccagcctgaagagctgccgcctcttcaaccccaatgatgatggcaaggaggagccccccaccaccctgctgtgggtgcagtactacctggcccagcactatgacaagattggccagcccagcatcgccctggagtacatcaacacagccatcgagagcacccccaccctcatcgagctgttcctggtgaaggccaagatctacaagcatgctggcaacatcaaggaggccgcccgctggatggatgaggcccaggccctggacacagctgaccgcttcatcaacagcaaatgtgccaagtacatgctgaaggccaacctgatcaaggaggccgaggagatgtgcagcaagttcacccgggagggcaccagcgctgtggagaacctgaatgagatgcagtgcatgtggttccagacagaatgtgcccaggcctacaaggccatgaacaagtttggagaggccctgaagaagtgccatgaaattgagcggcacttcatcgagatcacagatgaccagtttgacttccacacctactgcatgaggaagatcaccctgcggagctatgtggacctgctgaagctggaggatgtgctgcggcagcaccccttctacttcaaggccgcccgcatcgccatcgagatctacctgaagctgcatgacaaccccctgacagatgagaacaaggagcacgaggccgacacagccaacatgtctgacaaggagctgaagaagctgaggaacaagcagaggcgggcccagaagaaggcccagatcgaggaggagaagaagaatgctgagaaggagaagcagcagaggaaccagaagaagaagaaggatgatgatgatgaggagattggaggccccaaggaggagctgatccctgagaagctggccaaggtggagacccccctggaggaggccatcaagttcctgacccccctgaagaacctggtgaagaacaagattgagacccacctgtttgcctttgagatctacttcaggaaggagaagttcctgctgatgctgcagagcgtgaagagggcctttgccatcgacagcagccacccctggctgcacgagtgcatgatccgcctcttcaacacagtgtgtgagagcaaggacctgagtgacacagtgaggacagtgctgaagcaggagatgaaccggctgtttggagccaccaaccccaagaacttcaatgagaccttcctgaagaggaacagcgacagcctgccccaccggctgtctgctgccaagatggtgtactacctggaccccagcagccagaagagggccatcgagctggccaccaccctggatgagagcctgaccaacagaaacctgcagacctgcatggaggtgctggaggccctgtatgatggcagcctgggggactgcaaggaggccgctgagatctaccgggccaactgccacaagctgttcccctatgccctggccttcatgcctcctggctatgaggaggacatgaagatcaccgtgaatggagacagcagcgctgaggccgaggagctggccaatgagatctag

SEQ ID NO: 278391 - DNA, 2598 bp, Artificial Sequence
  derived and/or modified sequence
atgcccgccgtgagcctgccccccaaggagaacgccctgttcaagagaatcctgagatgttacgagcacaagcaatatcggaatggccttaagttctgcaagcaaatcctgagtaaccctaaatttgcagagcatggcgagacactggcaatgaaaggacttactcttaactgtttaggaaaaaaagaggaagcttatgagttggttagaaggggactgaggaacgaccttaagagtcacgtctgctggcatgtttatggtctgttgcagcgcagcgacaaaaagtacgatgaggccattaagtgctaccggaacgcactgaagtgggacaaagacaacctccaaatcttgcgtgacctgagcttgctgcagatacagatgcgcgatcttgagggataccgagaaactagatatcagctgttgcagttgagacctgcacagcgggcctcctggatagggtacgccattgcctaccatcttctggaggactatgaaatggccgcaaaaatcttggaggagtttaggaagactcagcagaccagtccggacaaagttgattacgaatatagcgagttactgctgtatcagaatcaggtcctcagggaagcaggtctgtaccgagaggccctggaacacctctgtacatatgagaagcaaatctgtgataaactggccgttgaggaaaccaagggggagttattattgcagctctgtcgcctggaggatgccgccgacgtctaccgcggccttcaggagaggaatccggagaattgggcctactacaaaggcctcgaaaaggctctcaagccggccaacatgctagagaggttgaaaatctacgaagaggcatggaccaagtatccaagaggactcgttcccaggaggctgccactgaattttctcagcggcgaaaagttcaaggagtgtctcgataagttcctgcgaatgaacttttccaagggatgtccccccgtgtttaataccttaaggtctctatataaggacaaggaaaaggtcgctattatcgaggagctggtggtaggctacgagacctctctgaagtcttgtaggctctttaaccctaatgatgatgggaaggaggagccaccaacaacactgctttgggtacagtattatctggctcagcattatgataagatcggacaacccagcatcgctctggagtacatcaacaccgctattgagtctacacccaccctcattgagctcttcttggtaaaggcaaaaatctacaagcatgccggcaatattaaggaagcagctcgctggatggacgaggcacaggcccttgacacagctgatcgctttatcaatagtaagtgtgccaaatatatgctaaaggcaaacttaatcaaggaggctgaagagatgtgctccaagtttacaagagaggggactagcgccgtggagaacctgaacgagatgcagtgcatgtggtttcagacagaatgtgcacaggcatataaagccatgaacaaatttggggaagcactgaaaaagtgtcacgaaatcgagcggcacttcatcgaaataacagacgaccaattcgatttccacacctattgtatgcgtaaaatcacactccgaagctacgtcgatctccttaagctagaggatgtgcttaggcagcatcctttctattttaaggcagctcgcatcgcgattgaaatctaccttaagcttcacgataatccgctaactgacgaaaacaaagagcacgaggctgatacagctaacatgtctgataaggaactgaaaaaactccggaataagcagcgaagggctcagaaaaaggcacaaatcgaggaagagaaaaagaatgccgaaaaagagaagcaacaaagaaatcagaagaaaaagaaagacgatgacgatgaagaaataggtggacccaaggaggagttgatcccggaaaagcttgcaaaggtggagacacccctggaggaggctatcaaattcctgaccccattgaagaatctcgtcaaaaacaaaattgaaacccatctctttgcgtttgagatctattttcgaaaagagaagttcctgctgatgttgcagtcagtgaaacgagcattcgccattgacagtagtcacccttggctgcacgaatgtatgatcagactattcaacacggtctgcgaaagtaaggacctgtctgataccgtgcggacagtgctgaagcaggagatgaacagactctttggcgccactaatcccaaaaacttcaatgaaacatttctgaagcggaattccgatagtttaccccatcggctgtcagccgcaaaaatggtatactacttagaccctagttcccagaaacgcgcgattgagctggctactacgctggatgaatccctgacgaatcgaaacctgcaaacatgtatggaagtcctcgaggccctgtacgacgggagtctgggagactgcaaggaagcagccgagatatatcgggctaattgtcataaattgtttccatacgcccttgccttcatgcctccaggctatgaagaagatatgaaaatcacagtgaatggagactcaagtgccgaagccgaagagctggctaatgaaatttag

SEQ ID NO: 278392 - DNA, 6072 bp, Artificial Sequence
  derived and/or modified sequence
agaaaggaaaaaagacaacgaggaaaaaggaggtgtccgggtagggcaacgcggcgacacccgaggcctggtggtggcggcggatcgagatattcaaggctgaagcagctacggaacggcagcggcggcggtcggacaaactgactgaccgagccgggtggtggcgggagcagcgggagcagccggaacgatgccggccgtgagcctcccgcccaaggagaatgcgctcttcaagcggatcttgaggtgttatgaacataaacagtatagaaatggattgaaattctgtaaacaaatactttctaatcccaaatttgcagagcatggagaaaccttggctatgaaaggattaacattgaactgtttggggaaaaaggaagaagcttatgaattggttcgtagaggtttgagaaatgacttgaagagtcatgtgtgttggcacgtttatggccttcttcagaggtcagacaagaagtatgatgaagccattaagtgttacagaaatgcactaaaatgggataaagacaatcttcaaatcttaagggacctttccttactacagattcaaatgcgagatcttgagggttacagggaaacgaggtatcagttacttcagcttcgacctgcgcagagagcatcatggattggttatgctattgcttaccatttattagaagattatgaaatggcagcaaagattttagaagaatttaggaaaacacaacagacatcccctgacaaggtggattatgaatatagtgaactactcttatatcagaatcaagttcttcgggaagcaggtctctatagagaagctttggaacatctttgtacctatgaaaagcagatttgtgataaacttgctgtagaagaaaccaaaggggaacttctgttgcaactatgtcgtttggaagatgctgcagatgtttatagaggattgcaagagagaaatcctgaaaactgggcctattacaaaggcttggaaaaagcactcaagccagctaatatgttagaacggctaaaaatttatgaggaagcctggactaaatatcccaggggactggtgccaagaaggctgccgttaaactttttatctggtgagaagtttaaagaatgtttggataagttcctaaggatgaatttcagcaagggttgcccaccagtcttcaatactttaagatcattatacaaagacaaagaaaaggtggcaatcatagaagagttagtagtaggttatgaaacctctctaaaaagctgccggttatttaaccccaatgatgatggaaaggaggaaccaccaaccacattactttgggtccagtactacttggcacaacattatgacaaaattggtcagccatctattgctttggagtacataaatactgctattgaaagtacacctacattaatagaactctttctcgtgaaagctaaaatctataagcatgctggaaatattaaagaagctgcaaggtggatggatgaggcccaggccttggacacagcagacagatttatcaactccaaatgtgcaaaatacatgctaaaagccaacctgattaaagaagctgaagaaatgtgctcaaagtttacaagggaaggaacatcagcggtagagaatttgaatgaaatgcagtgcatgtggttccaaacagaatgtgcccaggcttataaagcaatgaataaatttggtgaagcacttaagaaatgtcatgagattgagagacattttatagaaatcactgatgaccagtttgactttcatacatactgtatgaggaagattacccttagatcatatgtggacttattaaaactagaagatgtacttcgacagcatccattttacttcaaggcagcaagaattgctatagagatctatttgaagcttcatgacaacccccttacagatgagaataaagaacacgaagctgatacagcaaacatgtctgacaaagagctaaagaagctacgtaataaacaaagaagagctcaaaagaaagcccagatagaagaagagaaaaaaaatgcagaaaaagaaaagcagcagagaaatcagaaaaagaagaaggatgatgatgatgaggagataggaggtccaaaagaagaacttattccagagaaactggccaaggttgaaactccattggaagaagctattaaatttttaacaccgttgaagaacttggtgaagaacaagatagagactcatctttttgcctttgagatttactttaggaaagaaaagtttcttttgatgctacaatcagtaaagagggcatttgctattgattctagtcatccctggcttcatgagtgtatgattcgtctctttaatactgtgtgtgaaagtaaagatttatctgatacagttagaacagtattaaaacaagaaatgaatcgtctttttggagcaacgaatccaaagaattttaatgaaacttttctgaaaaggaattctgattcattgccacacagattatcagctgccaaaatggtatattacttagatccttctagtcagaagcgagctatagagttggcaacaacacttgatgaatctctcactaacagaaacctccagacatgtatggaggtattggaagccttgtatgatggtagcctaggagactgtaaagaagctgctgaaatttatagagcaaattgtcataagcttttcccttatgctttggctttcatgcctcctggatatgaagaggatatgaagatcacagttaatggagatagttctgcagaagctgaagaactggccaatgaaatttgaacatcactaaacaagcaaatggaatgactttggaccatatctagtatataatatttttgtcacgcacctgctgcattgctctaacttacacagaatgagaggagtaaatgttcttgccttcaaatagtgttttacgttttttatcctgctgaaaaagtatatataaaatatctaacattacaggatagaggttcagtttcttaaaaaattaaagctgctaaaattgagtggttaaaaaagataccttatcctattcctccccacccacccatgtttttaaactaatttatataaaatctggaggctgttacagctaacaaagcaggtgtgtggcagaaatattactttaaatttgtcttgtgagattttactatatctcagacagcataaatgctgttttagcactggattctttcactgagcacaaagagttgttggggctttagcatctgactgattttgttacggggttgattctgaccataggaagtatgcaatgtgaatcactatttacagagaaacctacaacagatgcttgatgttgtagaaactgggacatatagataccaagcaaaattataagaaacctataaggtgttcaatacgcttgtgtttccaaaattcactgtacatgatcagtttggtgttcttgtaccacagtttttaactgaaggaaccagttgtaacagtctcaattttaactaaaacttgaagaactaaaacaacaatgcaaacctttcagcattgtttggccaaacttgttaaaactgtaatgcaagaaccaaatgcactgtgatgtggcaccaactaattagcaagcatgaatttttcacccaagagtgaaaaaaggaaaatctaccatggcttgaagttaaagagcagaactcctgactaccattctatgactgatcaaaagactaatagttaaaaacctcagcaggccttgttcacgatatgcagaaaaaaaagtgctgcagtttagatacctctggaatttttccacagtgtcacaggtttgtaatacttgaagccctacatttctaagaatatatttcttgctcagttgtttcaggcaagcccaagactttgtaatttttaaagggcccaagattttttttttttttttttttttcaaataacagaccagcttctttttcttgcagttacagatgtaatttcctttttgttgtcaaacataaggtaccaaatatgatgcaataaattgttttgaaaaacagttgtgtgaatatttcaactaatctgtgttgggcttctgtgaaatacacaggtggaaacagaggtgcaagccagaggcaatgtaatatgctgtaaggctagtgcagatgggagctttttagaaggggctaagtgctggtgtcagggaaattccataatgaagtagaatgctgctcctgcattaagatttcattgagggcaaggctggtggcaggtactatgaatgtaattcataatttaaaaggaaaactaaaaactattttgatttgggaaaatgagccttaatttgttaaacctatacactgagaactagcctcaggcttaatattctcattgcatttgcaagatctgagcaaataagattaagtaaaacaaatcaattgtatatataattgacctttttgtggaacatgtagtttatagaaagtatactctaaagggaatttgccgaagaccttttactgattgaacagttgtgctacaatcaacttttcatagtacatgacctgcattccacatctcagtctaacagtttagtagtgatgtaaagagaagtacaaaccgaactccagtgctttgttatgttttattaactggccctgtctcaggaacatcttaacagatggcaaaaaaacaaaaactttttttcaactcctatgagtggcaactgaagttcttattgttgggaaagaacactagtcctacctctgccactaatgaggtgtttggaggaggtaccagccatataatagggggtgtatgtgtgaattttgtttaaactctactgtatattgaaatgaaattcatttatttgtcttgacaatgttcaaatgatgtagattgtcttagaatgaatattcataagtactcagaactcttaagatgcagatgccacccgtgaggagctaaattcctaatgtgtattgtattccaacccaattttactggaactattgaataaatcttttattttctttcaggtttacttgatagtggatacattggtgtcagaggaccttgactgggttcattttatgtccagacatcacccctgaaacactgtactgtactatcttgctctgagtagtatcaactggatcgtctcatatttgcctcattcatcctattaatttcaaatgatactgtgggggaaaaacagggttagaaaaacaagtggaaaaaatggagtgatgttgtaatctaaacaagtgccttatgtttattgctaagaactggtgttaccaacccttttgagaagaaagggtctcttgacctgtattaacataggaaagtaaagttctttttgtttttctttatattcagctactcttgtcatttctcgttgaaaaactaaaatctgactaggttagtttactcagctttaattagatagttgagtcatatattttcaacatttttctgtatcgtatttattatgcacaaaaataaagtgtgatctctaatagcatggctaaaggtaatgccaatattagtgaatagctttgctgtgggctttatcaggcccttgtttttcacagtgttgtttgtactccatggtgtattgctattagagctgtgaaatgaaagctgtgactttatgaagagatcaaaaaaagtgtggtccagattcaggtaggttgtggtaagttcagggaagtcttgtatgatttctaagaatatttcagttaccatgtatagtatttgggaaaagctgtaatgtaaaatattggactttgttgcaagataggtatatacttgtgtcagataattaaagccttaaattttgaaatgaatctttgagatttcaaagaaagactgacctttcaaatagaaggcggtctttctattctagctaatgccccacttctttaagttataaacaaagtttcatgataccattctgctatcatctaaactttgctgaactctactgccaacctacattaaaaacaaagtcccacgaaatggctgtgttacaccatagtgagcagaaacttaaattttgttctaattttgatggttgaaaaatttcaacctgtagcaataaa

SEQ ID NO: 278393 - DNA, 2598 bp, Artificial Sequence
  derived and/or modified sequence
atgcccgcagtatcattgcctccaaaggagaacgccctgttcaaacgtattctacgttgctacgaacataagcagtatagaaatggtctgaagttttgcaagcagatcctcagcaaccctaaatttgcagaacacggggaaacactcgcgatgaaggggctgaccctcaattgtctagggaagaaggaggaagcctacgagctggtgcggagaggcctacggaacgatctaaagtctcatgtgtgttggcatgtctacggtcttctgcaaaggagcgataagaagtacgacgaggccattaagtgctatcgcaacgccctcaagtgggataaggataatcttcaaattctgcgagatctgtcgctccttcaaatccagatgcgggatttggagggataccgggaaacccgatatcaacttctgcagttgaggcccgcacagcgggcatcttggattgggtatgcaattgcctaccatctgctcgaggattacgaaatggcggctaagattttggaggaatttcggaaaacgcagcagaccagccccgataaggtcgactacgagtatagtgagctgctgctctatcagaaccaggtcttgcgcgaggccggtctctaccgggaagctctggagcatctctgtacatacgaaaagcagatctgcgacaagctcgcggtcgaagaaacaaagggcgagttactgctgcagctctgtcgtctcgaagatgcggcagacgtataccggggactccaggaacgcaacccggagaattgggcatactataaaggccttgaaaaagccttgaaacctgccaatatgctagaaagactcaagatctacgaagaggcatggactaagtacccgaggggcctcgttccacgacggctgccactcaacttccttagtggcgaaaagttcaaggaatgcttggacaaatttttaagaatgaatttctccaaggggtgtccgccagtgtttaatactctgcgatctctgtacaaagacaaagagaaggtggcaatcattgaggagttagtggtaggctacgaaacctctctgaaatcttgcagactgtttaatccaaacgacgatgggaaagaggagccaccgaccactttgctctgggtgcaatattacctggctcagcattacgataagattggacagccttcaattgctttggaatacataaatacagctatcgagtcaacacccacactcattgagctgttcctggtaaaggctaagatctacaagcatgcaggtaacatcaaagaggccgctcgctggatggatgaagcccaagcactcgacactgcggaccggttcatcaactccaagtgcgcaaagtacatgttgaaggccaatctgatcaaagaagcggaggaaatgtgctccaagttcactcgcgagggcacatccgctgtcgaaaatctgaatgagatgcagtgcatgtggttccaaactgaatgtgcccaggcctataaagccatgaataagttcggcgaggcactgaaaaaatgtcacgagatcgaaagacactttattgagatcactgatgatcagttcgatttccatacctactgtatgcgaaagataacgctccgatcatacgttgatctgcttaagcttgaagatgtgttgcgtcaacaccctttttacttcaaggccgcacgaatagctattgagatctatctcaagcttcacgacaatccgcttactgacgaaaacaaagagcacgaggctgataccgctaacatgagcgataaggaactgaaaaagctgcgcaacaaacagcggcgagctcagaaaaaggcccagatagaagaggaaaagaagaatgcagaaaaagaaaaacagcagcggaaccagaaaaaaaagaaagacgatgatgatgaagagattggcggacccaaggaggaactgattccggaaaagctggccaaggttgaaacaccgctggaggaggctatcaagttcctcactcccctgaaaaacttggtgaaaaataaaatcgaaacacacctgtttgctttcgaaatatatttcagaaaagagaagttcttgcttatgttgcagtccgttaaacgcgcttttgcaatagactcctctcatccatggctgcatgaatgcatgatcagactattcaacacagtctgtgagagtaaggatctttcagacactgtgaggactgtactcaaacaggaaatgaaccggttgtttggtgccaccaaccccaaaaactttaatgagaccttcctgaagcgaaattctgacagtctcccccacaggctctccgccgctaaaatggtgtactatctggacccaagcagccagaaaagggctatcgagctggcaacgactcttgacgaatctttgacaaaccggaatctccaaacttgcatggaagtgttggaagcgctgtatgacggaagtctgggagactgcaaagaggcggcagagatttaccgagcaaattgccacaagctgttcccctacgcattggcttttatgccgcctggttacgaagaggatatgaaaatcacagtgaacggtgacagctccgctgaagcggaggagctggctaacgaaatctag

SEQ ID NO: 278394 - protein, 519 aa, Artificial Sequence
  derived and/or modified sequence
MASTTTCTRFTDEYQLFEELGKGAFSVVRRCMKIPTGQEYAAKIINTKKLSARDHQKLEREARICRLLKHPNIVRLHDSISEEGFHYLVFDLVTGGELFEDIVAREYYSEADASHCIQQILESVNHCHLNGIVHRDLKPENLLLASKSKGAAVKLADFGLAIEVQGDQQAWFGFAGTPGYLSPEVLRKDPYGKPVDMWACGVILYILLVGYPPFWDEDQHRLYQQIKAGAYDFPSPEWDTVTPEAKDLINKMLTINPAKRITASEALKHPWICQRSTVASMMHRQETVDCLKKFNARRKLKGAILTTMLATRNFSAAKSLLKKPDGVKINNKANVVTSPKENIPTPALESTESSNTTIEDEDVKARKQEIIKVTEQLIEAINNGDFEAYTKICDPGLTAFEPEALGNLVEGMDFHRFYFENALSKSNKPIHTIILNPHVHLVGDDAACIAYIRLTQYMDGSGMPKTMQSEETRVWHRRDGKWQNVHFHRSGSPTVPIKPPCIPNGKENFSGGTSLWQNI

SEQ ID NO: 278395 - protein, 524 aa, Artificial Sequence
  derived and/or modified sequence
MASTTTCTRFTDEYQLFEELGKGAFSVVRRCMKIPTGQEYAAKIINTKKLSARDHQKLEREARICRLLKHPNIVRLHDSISEEGFHYLVFDLVTGGELFEDIVAREYYSEADASHCIQQILESVNHCHLNGIVHRDLKPENLLLASKSKGAAVKLADFGLAIEVQGDQQAWFGFAGTPGYLSPEVLRKDPYGKPVDMWACGVILYILLVGYPPFWDEDQHRLYQQIKAGAYDFPSPEWDTVTPEAKDLINKMLTINPAKRITASEALKHPWICQRSTVASMMHRQETVDCLKKFNARRKLKGAILTTMLATRNFSAAKSLLKKPDGVKKRKSSSSVQMMEPQTTVIHNPDGNKESTESSNTTIEDEDVKARKQEIIKVTEQLIEAINNGDFEAYTKICDPGLTAFEPEALGNLVEGMDFHRFYFENALSKSNKPIHTIILNPHVHLVGDDAACIAYIRLTQYMDGSGMPKTMQSEETRVWHRRDGKWQNVHFHRSGSPTVPIKPPCIPNGKENFSGGTSLWQNI

SEQ ID NO: 278396 - DNA, 1560 bp, Artificial Sequence
  derived and/or modified sequence
atggcaagcacgactacctgtactcgattcaccgacgagtaccagctcttcgaggagttgggtaagggagccttctctgtggtccgtcgctgcatgaagatccctaccggacaggaatacgctgccaaaataatcaacaccaaaaaactttccgcccgagaccaccagaagttggagagggaagcgaggatctgtcgactcctgaagcaccccaacatcgttcgcctccatgacagtatttcagaagaggggttccattatctggtattcgatttggttacgggcggtgagctgttcgaggatatcgtcgccagggagtactactctgaggccgacgcttcccactgtattcaacaaatcctcgagagcgtgaatcattgccacctgaatggaatcgtgcaccgggacttaaaacccgagaatctactgttggcgtcaaagagtaaaggagccgccgtgaagttggcagattttggactggcaattgaagtccaaggggaccagcaggcttggttcgggttcgccggcacccccggttacctctccccagaagtcttgagaaaggacccgtacggtaagccagtggatatgtgggcatgtggagtgatactgtatatcctgcttgtggggtacccgcctttctgggatgaggaccagcataggctctaccagcagataaaggccggcgcctatgattttccctctcccgagtgggatacagtgacgccggaggctaaggatcttatcaacaagatgctgacaatcaatcccgctaagcggattacagccagcgaggcccttaagcacccctggatttgccagcggtccacagtagcatctatgatgcatcgacaagagaccgtggactgcctgaagaaattcaatgcccggaggaaactcaagggcgctattctcacaaccatgttggctacacgtaactttagtgctgcaaaatcgctcctgaagaaacccgatggcgtgaagataaacaataaggcaaacgtggtgacctcccccaaagagaacatccctacgcctgctctcgaaagcacagagtcctcaaacaccactattgaagatgaggatgtcaaggccagaaagcaagaaatcatcaaagttacagaacagctgattgaggcgattaacaatggtgattttgaggcctataccaagatctgtgaccctgggctgacggcattcgagcccgaggccctggggaacctcgtcgaaggaatggatttccatcgattctactttgaaaatgcattgtctaagagcaataagcccatccacacgatcatcctgaacccccacgtccacctggtgggggacgatgccgcttgtatcgcctacatccggctgacccagtatatggacggcagcggaatgcctaagacgatgcagtcggaggagacacgtgtttggcatcgacgggacgggaaatggcagaacgtacacttccatcgctcggggagtcctacagtgcccatcaaacctccatgtattcctaatggcaaggagaatttctctggaggcacatcactctggcaaaacatctag

SEQ ID NO: 278397 - DNA, 1575 bp, Artificial Sequence
  derived and/or modified sequence
atggccagcacaacaacctgtactaggttcacagatgaatatcaattatttgaagagctgggcaaaggtgctttcagcgttgtcagacgctgtatgaaaataccaacgggccaagagtacgccgccaagatcattaatacgaaaaaactttcagctagagatcaccaaaagttggagcgggaagcgcgaatttgtcgtctcttgaagcatccaaacattgtaaggctgcatgattcaattagcgaagaaggctttcattacctcgtattcgacttagttacaggcggagagctgtttgaggacatcgttgcccgggaatactactctgaagcggatgccagccattgtatccagcaaatcttggagtcggtgaatcactgccacttaaatgggatcgtgcacagagatctcaaaccagagaacctgttgctagcctcaaaatcaaaaggggctgccgtgaagctggcagacttcggcctcgccatcgaggtacagggagaccagcaagcctggtttggctttgccggcacgcccggctacctatcccctgaagtactgcgtaaggacccctacgggaagcctgtggatatgtgggcttgtggagttatcctgtacattttgttggtcggataccctcccttctgggacgaggatcagcatcggctctatcaacagatcaaggctggagcatacgattttccctcacccgagtgggacaccgtgaccccagaagccaaggatctcattaacaaaatgctgactattaatcccgctaaaaggataaccgcctctgaggccctgaagcatccttggatctgtcaacgctccacagttgcctcaatgatgcaccgccaggagactgtggattgcttgaagaagtttaatgcccgccgaaaactcaagggcgccattctgacgactatgttggccacccgtaattttagcgccgcaaaatctctgctgaagaagccggacggagtgaagaagcgtaagtcctcttcctctgtgcagatgatggaaccgcaaaccactgttatccacaaccccgatggaaacaaggagagcacggagagcagcaacactaccatagaggatgaggacgtgaaagcacgtaagcaggaaatcatcaaggtcacagagcaattgatcgaggcaatcaacaacggcgactttgaagcttatacaaaaatatgcgaccccggccttactgcttttgagccagaggctctcggcaaccttgtggaaggcatggacttccacaggttttactttgagaacgcgctctcaaaatcaaataagccgattcacacaattatattgaacccacacgtacacctggttggtgatgacgccgcatgcattgcctacattcgcctaacacagtacatggacggctccgggatgccgaaaaccatgcagtcagaggaaacaagggtctggcacaggagagatggaaaatggcagaatgtgcatttccatcgctcagggtccccgactgtgcctatcaagcctccttgtatccccaatggtaaggagaacttttcgggtggtactagcctgtggcagaacatttag

SEQ ID NO: 278398 - DNA, 1560 bp, Artificial Sequence
  derived and/or modified sequence
atggccagcaccaccacctgcacccgcttcacagatgagtaccagctgtttgaggagctgggcaagggggccttctctgtggtgcggcgctgcatgaagatccccaccggccaggagtatgctgccaagatcatcaacaccaagaagctgagcgcccgggaccaccagaagctggagcgggaggcccgcatctgccgcctgctgaagcaccccaacatcgtgcggctgcatgacagcatcagcgaggagggcttccactacctggtgtttgacctggtgactggaggagagctgtttgaggacatcgtggcccgggagtactacagcgaggctgatgccagccactgcatccagcagatcctggagagcgtgaaccactgccacctgaatggcatcgtgcaccgggacctgaagccagagaacctgctgctggccagcaagagcaaaggagctgctgtgaagctggccgactttggcctggccatcgaggtgcagggcgaccagcaggcctggtttggatttgctggcaccccaggctacctgagccctgaggtgctgaggaaggacccctacggcaagcctgtggacatgtgggcctgtggggtcatcctgtacatcctgctggtgggctacccacccttctgggatgaggaccagcaccggctgtaccagcagatcaaggccggggcctatgacttccccagccctgagtgggacacagtgaccccagaggccaaggacctgatcaacaagatgctgaccatcaacccagccaagaggatcacagccagcgaggccctgaagcacccctggatctgccagaggagcacagtggcctccatgatgcaccggcaggagaccgtggactgcctgaagaagttcaatgcccggaggaagctgaagggggccatcctgaccaccatgctggccaccaggaacttctctgctgccaagagcctgctgaagaagccagatggagtgaagatcaacaacaaggccaacgtggtgaccagccccaaggagaacatccccaccccagccctggagagcacagagagcagcaacaccaccattgaagatgaagatgtgaaggccaggaagcaggagatcatcaaggtgacagagcagctgattgaggccatcaacaatggagactttgaggcctacaccaagatctgtgaccccggcctgacagcctttgagcctgaggccctgggcaacctggtggagggcatggacttccaccgcttctactttgaaaatgccctgagcaagagcaacaagcccatccacaccatcatcctgaacccccacgtgcacctggtgggagatgatgctgcctgcatcgcctacatccggctgacccagtacatggatggcagcggcatgcccaagaccatgcagagcgaggagaccagggtgtggcacagaagagatggcaagtggcagaatgtgcacttccacaggagcggcagccccaccgtgcccatcaagccaccctgcatccccaacgggaaggagaacttcagcggcggcaccagcctgtggcagaacatctag

SEQ ID NO: 278399 - DNA, 1575 bp, Artificial Sequence
  derived and/or modified sequence
atggccagcaccaccacctgcacccgcttcacagatgagtaccagctgtttgaggagctgggcaagggggccttctctgtggtgcggcgctgcatgaagatccccaccggccaggagtatgctgccaagatcatcaacaccaagaagctgagcgcccgggaccaccagaagctggagcgggaggcccgcatctgccgcctgctgaagcaccccaacatcgtgcggctgcatgacagcatcagcgaggagggcttccactacctggtgtttgacctggtgactggaggagagctgtttgaggacatcgtggcccgggagtactacagcgaggctgatgccagccactgcatccagcagatcctggagagcgtgaaccactgccacctgaatggcatcgtgcaccgggacctgaagccagagaacctgctgctggccagcaagagcaaaggagctgctgtgaagctggccgactttggcctggccatcgaggtgcagggcgaccagcaggcctggtttggatttgctggcaccccaggctacctgagccctgaggtgctgaggaaggacccctacggcaagcctgtggacatgtgggcctgtggggtcatcctgtacatcctgctggtgggctacccacccttctgggatgaggaccagcaccggctgtaccagcagatcaaggccggggcctatgacttccccagccctgagtgggacacagtgaccccagaggccaaggacctgatcaacaagatgctgaccatcaacccagccaagaggatcacagccagcgaggccctgaagcacccctggatctgccagaggagcacagtggcctccatgatgcaccggcaggagaccgtggactgcctgaagaagttcaatgcccggaggaagctgaagggggccatcctgaccaccatgctggccaccaggaacttctctgctgccaagagcctgctgaagaagccagatggagtgaagaagaggaagagcagcagctctgtgcagatgatggagccccagaccaccgtcatccacaacccagatggcaacaaggagagcacagagagcagcaacaccaccattgaagatgaagatgtgaaggccaggaagcaggagatcatcaaggtgacagagcagctgattgaggccatcaacaacggggactttgaggcctacaccaagatctgtgaccccggcctgacagcctttgagcctgaggccctgggcaacctggtggagggcatggacttccaccgcttctactttgaaaatgccctgagcaagagcaacaagcccatccacaccatcatcctgaacccccacgtgcacctggtgggagatgatgctgcctgcatcgcctacatccggctgacccagtacatggatggcagcggcatgcccaagaccatgcagagcgaggagaccagggtgtggcacagaagagatggcaagtggcagaatgtgcacttccacaggagcggcagccccaccgtgcccatcaagccaccctgcatccccaacgggaaggagaacttcagcggcggcaccagcctgtggcagaacatctag

SEQ ID NO: 278400 - DNA, 1560 bp, Artificial Sequence
  derived and/or modified sequence
atggccagcaccaccacctgcacccggttcaccgacgagtaccagctttttgaggaactcggaaaaggggccttttctgtggtgcggcggtgtatgaagatacctaccggacaggagtatgctgctaagattattaacactaagaagctcagcgccagagaccaccagaaactcgaacgggaggccagaatatgtagactcttgaaacaccctaatattgtgcgtcttcacgactccatttctgaggaaggtttccattacctcgtctttgatctggttacaggcggggagctctttgaagatatagtggctcgggaatattacagcgaggccgatgcctcacactgtatacagcagatcctcgagtctgtgaaccactgtcacctgaacggaatcgttcatagggatctgaaacccgagaatctcctgttggcatctaagagtaaaggcgctgccgtgaaactagctgactttggattggcaattgaggtgcagggagatcagcaggcatggtttggattcgccggtaccccgggttacctcagccccgaggttctgaggaaggacccttatggcaaacctgtggacatgtgggcctgcggagtgatcctatacatcttgctcgtgggctacccccctttctgggatgaagatcagcatcggctttatcagcagatcaaagcaggggcatacgactttcctagccccgagtgggacacggtgacaccagaagcgaaggatttaattaataaaatgttgaccatcaaccccgcaaaacggataactgcatctgaggccctgaaacacccttggatctgtcagcgctcaaccgtggcgtctatgatgcatcgacaggagacagtggattgtctgaagaagtttaatgcccggaggaagttgaaaggtgctatcctaacaaccatgctagccactcggaacttttccgccgccaagagcctgttaaagaaaccagatggagtcaaaatcaataataaggccaacgtcgtgaccagcccaaaagagaatatccccactcctgcccttgagagtaccgagagtagcaacactaccattgaggatgaagacgtaaaggcacgaaagcaagagattattaaagtcacagagcaacttatcgaggcaataaataatggcgactttgaagcttataccaagatttgcgacccaggtctaactgcctttgagcctgaggccctgggcaacctcgtcgaaggtatggacttccatagattttattttgagaatgccctgtctaagtcaaacaaacccattcacaccattatccttaatccccacgtgcatttagtaggtgacgatgctgcctgcattgcatatatacggctgacccagtacatggatgggtccggtatgcccaaaacaatgcaatccgaggagacccgggtgtggcacaggcgcgacggcaaatggcaaaatgtacacttccataggtctgggtcacccactgttcctatcaaacctccatgtataccgaatgggaaggaaaattttagcggcggaacgtctctgtggcagaacatttag

SEQ ID NO: 278401 - DNA, 1575 bp, Artificial Sequence
  derived and/or modified sequence
atggccagcaccaccacctgcacccggttcaccgacgagtaccagctattcgaggagctcggcaagggcgctttctccgtggtgcgaaggtgtatgaagatccccacagggcaagaatacgccgcaaaaataataaatactaagaagctatcagcgcgagaccaccagaaacttgaaagggaagccagaatctgtaggttgttgaagcacccaaacattgtgcggctgcatgacagcatttctgaggaaggatttcactaccttgtattcgacctggtgactggaggtgagctgtttgaagacattgtggcacgcgagtattattctgaggcggacgcaagccactgcatacaacagatcctggagagtgtgaatcactgccatctgaacggcatcgtgcatcgggatctcaagcccgagaacctgctcctggcctcaaaatctaaaggggcagctgtcaaactggctgactttgggctcgccattgaggttcagggcgaccagcaggcttggtttggctttgcaggaaccccaggatatctgtctccagaagtcctgaggaaagatccttatggtaagcccgtggacatgtgggcgtgcggcgtcatcctgtacattttactggtgggctatccccctttttgggatgaggaccagcatcgcttgtatcagcagattaaagcgggggcctatgacttccctagccctgagtgggatacggtaaccccggaagccaaagaccttattaacaaaatgctgactatcaatccggcgaagagaattaccgctagcgaggccctcaaacatccgtggatctgccaacggtcaaccgttgcctccatgatgcaccggcaagaaaccgttgactgcttgaagaagttcaacgcccgcagaaagttaaaaggagcaatcctcactactatgctggccacacgcaatttctctgctgccaaatccctcctaaagaaacccgatggtgtgaagaagcggaaaagctccagctccgtgcaaatgatggaacctcagaccactgtaatacataaccccgatgggaataaggagagcacagagagcagcaataccactatcgaagatgaggacgtgaaagctaggaaacaggagatcatcaaagtcacagagcagttgatcgaagcgatcaataacggagattttgaggcatacaccaaaatctgtgaccccgggctaaccgccttcgagccagaggcactcgggaacctggttgagggaatggattttcaccgattttatttcgagaacgcactttctaaaagcaacaagccgatccacacaattattctcaaccctcacgtccacttggttggcgatgatgccgcatgtatagcctacataagactcacccagtacatggatggatccggtatgcccaaaacgatgcagagcgaggaaacccgggtttggcatcggagagatggtaagtggcaaaacgtgcattttcatagaagtggcagtccgaccgttcccatcaagcctccttgcatccccaatggtaaggaaaactttagcggcggaacaagcctgtggcaaaatatctag

SEQ ID NO: 278402 - DNA, 1560 bp, Artificial Sequence
  derived and/or modified sequence
atggcttccacgaccacgtgcacacggttcacggatgagtatcagctgttcgaagagttgggcaaaggcgcttttagcgtcgtgaggcgctgcatgaagattccaaccggccaggagtatgcagctaaaattatcaacactaaaaagctctccgccagggaccaccaaaaattagaacgagaggcaagaatttgccgacttctgaaacatccaaacatagtaaggttacatgactctatctccgaagagggctttcattatttagtctttgatttagtaaccggcggagaacttttcgaggacattgttgccagggaatactactcagaagcggatgcctcacactgcatccaacagattttggaaagcgtgaatcactgccacctcaacggtattgtccaccgcgacttgaaacctgagaacctgctgcttgcatcaaagtccaagggggctgccgtgaagttggcagacttcggactggccatcgaagtacagggtgaccagcaggcgtggttcggttttgcaggcactccaggctatctaagccccgaagtgcttcggaaggatccttacggcaagccggtggatatgtgggcatgcggagtgatactttatattttgctggtaggctacccaccgttctgggatgaggaccagcaccggctgtaccagcaaatcaaagctggggcttacgattttcccagtccggagtgggatactgtgaccccagaggcgaaggaccttattaataaaatgctgaccatcaacccagccaaaagaattaccgcgtctgaggccctgaagcacccgtggatatgtcagaggtctacagtggcatctatgatgcaccgtcaggagacagtagactgtctaaagaagtttaacgctaggcggaagttaaaaggggctatactcacaacaatgctggccaccaggaatttcagcgctgcgaaatcccttctgaaaaagcctgatggtgtgaagattaacaataaagcgaatgtggttacaagccccaaggaaaatattcccacacccgctttggaaagtactgagtcttcgaacaccaccatcgaggacgaggacgtaaaggcgaggaagcaagagattattaaggtgaccgagcagcttattgaagctattaacaacggtgacttcgaagcctatacaaagatatgcgacccaggactgactgcatttgaaccagaggcgctaggaaacctggtggagggaatggatttccaccgcttttattttgaaaacgccctgtcaaaatccaacaagcctatacatacaataattctaaatcctcacgtgcatctcgtcggcgacgacgcggcatgcattgcttacatcaggttaacgcagtatatggacggtagcggcatgccaaagaccatgcagtcagaggagaccagggtgtggcaccgtcgagacggaaagtggcagaacgtgcactttcatcgaagcgggtctcctaccgtgcccatcaaacccccttgcattcccaacggaaaggagaatttctccggcggtacaagcctgtggcagaatatttag

SEQ ID NO: 278403 - DNA, 1575 bp, Artificial Sequence
  derived and/or modified sequence
atggcctcgacgaccacctgcacgcggtttactgatgagtatcagttgttcgaggaactggggaaaggggctttttcagtggtgagaaggtgtatgaaaatccctaccggccaggagtacgcggctaagatcatcaatacaaaaaaactatccgccagggatcaccagaaactcgagcgcgaggccagaatttgtaggctgctgaagcacccgaatatcgtgcgcttgcacgattccatctccgaggaggggtttcactatctggtctttgacctggttactggaggggaactgtttgaggacattgttgcgagggaatactactctgaggctgatgcttcgcattgcattcaacagatactcgagagcgtcaatcactgtcacttgaatggcatcgtgcatcgggatcttaaaccagaaaacctgctgttagcttccaaaagcaagggcgcagctgtgaagttggctgactttggcttggctatcgaagtgcaaggggatcagcaggcgtggttcgggttcgccggtacacccggttatttatcgcccgaggtgctaaggaaggacccctacggaaaaccagtggacatgtgggcctgcggcgtgattctgtacatcctgcttgttgggtatccccctttctgggacgaagatcaacataggctgtatcagcaaatcaaggcaggtgcctatgattttccctctccagaatgggacacagttacgccagaggcgaaggacctgatcaataaaatgctgactattaacccagccaagcgcatcactgccagcgaggctcttaagcatccctggatttgccagaggagtactgtggctagtatgatgcatcggcaagaaaccgtagactgcctgaagaagttcaacgctcgccgaaagctgaagggcgcaatcctgacaacaatgctggctactcggaacttttctgctgccaaatccctccttaaaaagccagacggagtcaagaaacgaaaatctagtagcagtgtgcaaatgatggagcctcaaacgacagtcatccacaatccggacggaaataaagagtctacagaatcctctaacacaactatagaagacgaggacgttaaggcccgaaagcaagagatcatcaaggtgaccgaacaacttatagaagcaatcaataatggggattttgaggcctacaccaagatctgcgacccgggactcacagctttcgaacctgaggcgcttgggaatctggtcgagggcatggactttcataggttctatttcgagaacgccctgagcaagtcaaataaacccattcataccattatcctcaatccacatgtccatctggtcggagatgacgccgcatgtatcgcctacatacgactgacgcaatacatggatggaagtggcatgcccaagactatgcagagcgaagaaacccgagtctggcaccgaagggacggtaaatggcagaacgtacactttcataggagcggatctccaactgtgcctataaagccaccttgcatacccaacggcaaggaaaacttttcaggcggaacctctctctggcagaatatatag

SEQ ID NO: 278404 - DNA, 5932 bp, Artificial Sequence
  derived and/or modified sequence
aaaggagggagtgcgagagatccacgaagggacaggcttggagtcgctagagggaggtgtgggaccagcgaggagggggcttcgccagggagggggtgctggcaggcggagggagcggcgggaggaggcgccggaggaggagacggaggcctggggacggcagaagaggcttcgcctgagccgagcgctctttctctcgccgcgccgtcttgaagccgcgcgggctcgtgagcagcgcgaggccgccaaggtgcctcgcttcgccggagccgctgccgcccgccggagggaagccggcctcgggcgcgcacgctcgtcggagccccggcgcgccccgcgcctgagcctgctgacagcggccgctgggctcaggctgtccgctctgggctccgcggcctcggccccgctgcactccacctccgccccctcggactccctcccctctgcttctactcctcctgctccagtgcggatcgtttcgcaactgcttgccactcgtcccgtgcctggctgtttttccatttcccggccccctcttcttgagtactttaccccctgcatttggggacagggactggaaaaggggcgggtggagcgtccagtggagaagaaggaagcgaggcccgcaggaggaggaggatcggcggactgtggggaggagaccccacgccaccctttctggtcatctcccctcccgccccgcccctgcgcacactccctcgcgggcgagctactttcggaccaggaaagtaagagcggccctgggtgacagcgccgcggggccagtcccggggttagccgcgcgtctgctcgcttctggtccgtcgcgctcccagccagggcacagcccggaccgaggatggcttcgaccacaacctgcaccaggttcacggacgagtatcagcttttcgaggagcttggaaagggggcattctcagtggtgagaagatgtatgaaaattcctactggacaagaatatgctgccaaaattatcaacaccaaaaagctttctgctagggatcatcagaaactagaaagagaagctagaatctgccgtcttttgaagcaccctaatattgtgcgacttcatgatagcatatcagaagagggctttcactacttggtgtttgatttagttactggaggtgaactgtttgaagacatagtggcaagagaatactacagtgaagctgatgccagtcattgtatacagcagattctagaaagtgttaatcattgtcacctaaatggcatagttcacagggacctgaagcctgagaatttgcttttagctagcaaatccaagggagcagctgtgaaattggcagactttggcttagccatagaagttcaaggggaccagcaggcgtggtttggttttgctggcacacctggatatctttctccagaagttttacgtaaagatccttatggaaagccagtggatatgtgggcatgtggtgtcattctctatattctacttgtggggtatccacccttctgggatgaagaccaacacagactctatcagcagatcaaggctggagcttatgattttccatcaccagaatgggacacggtgactcctgaagccaaagacctcatcaataaaatgcttactatcaaccctgccaaacgcatcacagcctcagaggcactgaagcacccatggatctgtcaacgttctactgttgcttccatgatgcacagacaggagactgtagactgcttgaagaaatttaatgctagaagaaaactaaagggtgccatcttgacaactatgctggctacaaggaatttctcagcagccaagagtttgttgaagaaaccagatggagtaaagataaacaacaaagccaacgtggtaaccagccccaaagaaaatattcctaccccagcgctggagtcaactgagagttcaaatacaacaattgaggatgaagatgtgaaagcacgaaagcaagagattatcaaagtcactgaacaactgatcgaagctatcaacaatggggactttgaagcctacacaaaaatctgtgacccaggccttactgcttttgaacctgaagctttgggtaatttagtggaagggatggattttcaccgattctactttgaaaatgctttgtccaaaagcaataaaccaatccacactattattctaaaccctcatgtacatctggtaggggatgatgccgcctgcatagcatatattaggctcacacagtacatggatggcagtggaatgccaaagacaatgcagtcagaagagactcgtgtgtggcaccgccgggatggaaagtggcagaatgttcattttcatcgctcggggtcaccaacagtacccatcaagccaccctgtattccaaatgggaaagaaaacttctcaggaggcacctctttgtggcaaaacatctaaggcctgaaaaccattcacatatgggtcttctaaatttcaacagtgccacttctgcattctctgttctcaaggcacctggatggtgaccctgggccgtcctctcctcctcttcatgcatgtttctgagtgcatgaagttgtgaaggtcctacatgtaatgcatatgtgatgcatcatcttatcatatattccttcctatacattgtttacacttcaactacggggatgttccacacaaacttaaattactgttggcaaaacaatagggggagattagacaaaaaaaaaaatccacaatattccaagtacaactcttcatcaagtttctctgttaatgccaagatttaacagacttaagaactattgttctctgaatgacagttgtaagagaaatgtaaattttttagaactctttgctgttaatctgttttggtttgtttggtttttttttttttttttaaggtaaaaaaaaaatacaccttcagtttcctggtgtgatcctggttaaaatggatgatttttcattgaaagttttgctgattaacaattaaagtgggatgatatgtgggcaaaatcacttatgaaagtagaagcaagaatcagttggtttgctaccacataaagccatgctgtttttggtcaaactgtgtaaactggaaaaattcacatcatttctgagtttaatcactttaggatatattcacattgttttggtgaatttgctgaattgaattgtttttctttctcaaatctgtgatctcttttctttatcctgtttctttgttcctttcgtttgctttcttatttttcttttgttccattcttttcttacttttttcccttttccttttttggggaggctggctagtagtgtgtgagaaaagaatagaagtgaaatttgcataatgaatgtaaaagggaaataaaagtcttttgaaggtagctatactagcacttttgatcatcttcagggcccacaaaaatgttgtcaagattttaaaggtttataattctgcttaagctctagtttggacttaggtatcctaactatgttggaggtatttgcattgtttaaagttaggataaaagcaagttcctcctgtgactgcaacgtcttactgattgggacagttgccaggaggataccaacttgatagcagagggggttttatgcaaacgcactcacctccgccttggggaatgaaagggtcacttctgcatcatcactagctagttttctagtgttagagaggcttacaaatgtttgccattctcataagtgttttgaacttgatctttgtgacttgtgcttttttagcttctctcttgaatcagagtatcattgtcttcctccaaggagttagaatttcccagtttaaaacaaaaagggaaatgtcctaggttttctttgtgcttctcatttttcctttgttgattcaattcctgtgatttttgttctcttccctgaagtgctttacagtgcatggaatctccatcattgttattttaacgatagtaattcacagtcctcagaagcctatttttaaagcagaagcaaaaaagaaaaacaaaataacaaaaacaacccttcctcttttctctcatctcacctctctgtgttgattactaatcatcttagatattattgctagtggatgtatggtagatgggttgaagcttttctgataattattacacaatttaaaacaacatatatatttaaaataaatatatacagtaaatatattgagccatgttaacctgccaatgagatctgtgaaaaaataatggcctcatttttctctttttaatttcttttacccttttgtgaagcagctatacgtggcatacatgtatttaaagaaaaaaaaatagatgtagagtgttttttttacacttttaacttagcatgtggtgttgaagtattactgtagatcaagtttgtcttccgcactaagatgtgaggaaattgtgatttgttctctccaccacaaatgaattacacatttattatcttctatcattttgaaacactgcagtttaccatgggacactgtatatatttcttgccataatggtaaaggactgattgatatatttaagagttaataaatttgtgatttctgctgacagtgcgtccatctttatttcttcagaagaggtactgtatgtatgcctgcatagtgctggccagtgtcaagggcagtgtgtcctactctggtctcatttagtacataacaatttgcacttggtgagaatggcaagttaattgttctctgtgagcaaaacaatggtctcttctgggaaaatgttgctgagaacaatatagttaacaactaagactcctaaaagcttctctaaactgtaccctccaatccagccttcacatggctgctttttttttttttttttaatacgaacctgtccttgtaacactttgatgttatcatttctgggatacaggcaagcaccccagctcctgctactccccagcttgaacttgagcatacatggatgctcagcttcttttgatttgctaaaaacatcacacttgctcacatgcctgtttatgctgttcatgttgtttatgtttcttacctagaataaatagtctcttcccctacttcttttcccgacttcttactttttcctaagattcagtgtacagcatcatgctccacagcaaaccttcctaggccctattctgggcttgccttccctctcaaaacctacataatagattgtatttacctctcctgtcaaccacattgttttgaaaatatatttctatttgtgtctcctctactgcagtataatgtctccatgggcaagaactgtgtattcatcattgcattcctaaacccaaaccaaggccaggaatggagatatcattgataaatagttgttgaattgaggccaagcccttttgataacagaagcctcaaggggtacccagatagtccttgttttaatgatgggttctctcaccactgtcttgatgctctgagcaagttacctcttccctctgaccctcagtttccatatttgtaaaatgagaataaacataccaacttaataaagatattgtgaggattaatgggtacagagtgactagaatgatatttgatagaaattaaatggtagcagtataactattctgatcactgacattaatattcctattgttattattctttgctcacgagggtatacaactcttgttttgctgttgggctgccctctttatgtaggtttactgttaatgctgaggatatactcggactcaaatgtctcagcagaaggctgagagacaccaaatgaagtggtcatctagctgaatgtaggaaaaatgaaatgtagtagcaaatcagtatattctaaggaaattttcaaggaatattaatcttcacccaaattttgaatttttatgtaaaaaattataatttaagggtaaacatagatgacacagctttcgagtgatttcattgaataaaattctactgacttctatgaa

SEQ ID NO: 278405 - DNA, 5947 bp, Artificial Sequence
  derived and/or modified sequence
aaaggagggagtgcgagagatccacgaagggacaggcttggagtcgctagagggaggtgtgggaccagcgaggagggggcttcgccagggagggggtgctggcaggcggagggagcggcgggaggaggcgccggaggaggagacggaggcctggggacggcagaagaggcttcgcctgagccgagcgctctttctctcgccgcgccgtcttgaagccgcgcgggctcgtgagcagcgcgaggccgccaaggtgcctcgcttcgccggagccgctgccgcccgccggagggaagccggcctcgggcgcgcacgctcgtcggagccccggcgcgccccgcgcctgagcctgctgacagcggccgctgggctcaggctgtccgctctgggctccgcggcctcggccccgctgcactccacctccgccccctcggactccctcccctctgcttctactcctcctgctccagtgcggatcgtttcgcaactgcttgccactcgtcccgtgcctggctgtttttccatttcccggccccctcttcttgagtactttaccccctgcatttggggacagggactggaaaaggggcgggtggagcgtccagtggagaagaaggaagcgaggcccgcaggaggaggaggatcggcggactgtggggaggagaccccacgccaccctttctggtcatctcccctcccgccccgcccctgcgcacactccctcgcgggcgagctactttcggaccaggaaagtaagagcggccctgggtgacagcgccgcggggccagtcccggggttagccgcgcgtctgctcgcttctggtccgtcgcgctcccagccagggcacagcccggaccgaggatggcttcgaccacaacctgcaccaggttcacggacgagtatcagcttttcgaggagcttggaaagggggcattctcagtggtgagaagatgtatgaaaattcctactggacaagaatatgctgccaaaattatcaacaccaaaaagctttctgctagggatcatcagaaactagaaagagaagctagaatctgccgtcttttgaagcaccctaatattgtgcgacttcatgatagcatatcagaagagggctttcactacttggtgtttgatttagttactggaggtgaactgtttgaagacatagtggcaagagaatactacagtgaagctgatgccagtcattgtatacagcagattctagaaagtgttaatcattgtcacctaaatggcatagttcacagggacctgaagcctgagaatttgcttttagctagcaaatccaagggagcagctgtgaaattggcagactttggcttagccatagaagttcaaggggaccagcaggcgtggtttggttttgctggcacacctggatatctttctccagaagttttacgtaaagatccttatggaaagccagtggatatgtgggcatgtggtgtcattctctatattctacttgtggggtatccacccttctgggatgaagaccaacacagactctatcagcagatcaaggctggagcttatgattttccatcaccagaatgggacacggtgactcctgaagccaaagacctcatcaataaaatgcttactatcaaccctgccaaacgcatcacagcctcagaggcactgaagcacccatggatctgtcaacgttctactgttgcttccatgatgcacagacaggagactgtagactgcttgaagaaatttaatgctagaagaaaactaaagggtgccatcttgacaactatgctggctacaaggaatttctcagcagccaagagtttgttgaagaaaccagatggagtaaagaaaaggaagtccagttcgagtgttcagatgatggagccccaaactactgtaatccacaaccctgatggaaacaaggagtcaactgagagttcaaatacaacaattgaggatgaagatgtgaaagcacgaaagcaagagattatcaaagtcactgaacaactgatcgaagctatcaacaatggggactttgaagcctacacaaaaatctgtgacccaggccttactgcttttgaacctgaagctttgggtaatttagtggaagggatggattttcaccgattctactttgaaaatgctttgtccaaaagcaataaaccaatccacactattattctaaaccctcatgtacatctggtaggggatgatgccgcctgcatagcatatattaggctcacacagtacatggatggcagtggaatgccaaagacaatgcagtcagaagagactcgtgtgtggcaccgccgggatggaaagtggcagaatgttcattttcatcgctcggggtcaccaacagtacccatcaagccaccctgtattccaaatgggaaagaaaacttctcaggaggcacctctttgtggcaaaacatctaaggcctgaaaaccattcacatatgggtcttctaaatttcaacagtgccacttctgcattctctgttctcaaggcacctggatggtgaccctgggccgtcctctcctcctcttcatgcatgtttctgagtgcatgaagttgtgaaggtcctacatgtaatgcatatgtgatgcatcatcttatcatatattccttcctatacattgtttacacttcaactacggggatgttccacacaaacttaaattactgttggcaaaacaatagggggagattagacaaaaaaaaaaatccacaatattccaagtacaactcttcatcaagtttctctgttaatgccaagatttaacagacttaagaactattgttctctgaatgacagttgtaagagaaatgtaaattttttagaactctttgctgttaatctgttttggtttgtttggtttttttttttttttttaaggtaaaaaaaaaatacaccttcagtttcctggtgtgatcctggttaaaatggatgatttttcattgaaagttttgctgattaacaattaaagtgggatgatatgtgggcaaaatcacttatgaaagtagaagcaagaatcagttggtttgctaccacataaagccatgctgtttttggtcaaactgtgtaaactggaaaaattcacatcatttctgagtttaatcactttaggatatattcacattgttttggtgaatttgctgaattgaattgtttttctttctcaaatctgtgatctcttttctttatcctgtttctttgttcctttcgtttgctttcttatttttcttttgttccattcttttcttacttttttcccttttccttttttggggaggctggctagtagtgtgtgagaaaagaatagaagtgaaatttgcataatgaatgtaaaagggaaataaaagtcttttgaaggtagctatactagcacttttgatcatcttcagggcccacaaaaatgttgtcaagattttaaaggtttataattctgcttaagctctagtttggacttaggtatcctaactatgttggaggtatttgcattgtttaaagttaggataaaagcaagttcctcctgtgactgcaacgtcttactgattgggacagttgccaggaggataccaacttgatagcagagggggttttatgcaaacgcactcacctccgccttggggaatgaaagggtcacttctgcatcatcactagctagttttctagtgttagagaggcttacaaatgtttgccattctcataagtgttttgaacttgatctttgtgacttgtgcttttttagcttctctcttgaatcagagtatcattgtcttcctccaaggagttagaatttcccagtttaaaacaaaaagggaaatgtcctaggttttctttgtgcttctcatttttcctttgttgattcaattcctgtgatttttgttctcttccctgaagtgctttacagtgcatggaatctccatcattgttattttaacgatagtaattcacagtcctcagaagcctatttttaaagcagaagcaaaaaagaaaaacaaaataacaaaaacaacccttcctcttttctctcatctcacctctctgtgttgattactaatcatcttagatattattgctagtggatgtatggtagatgggttgaagcttttctgataattattacacaatttaaaacaacatatatatttaaaataaatatatacagtaaatatattgagccatgttaacctgccaatgagatctgtgaaaaaataatggcctcatttttctctttttaatttcttttacccttttgtgaagcagctatacgtggcatacatgtatttaaagaaaaaaaaatagatgtagagtgttttttttacacttttaacttagcatgtggtgttgaagtattactgtagatcaagtttgtcttccgcactaagatgtgaggaaattgtgatttgttctctccaccacaaatgaattacacatttattatcttctatcattttgaaacactgcagtttaccatgggacactgtatatatttcttgccataatggtaaaggactgattgatatatttaagagttaataaatttgtgatttctgctgacagtgcgtccatctttatttcttcagaagaggtactgtatgtatgcctgcatagtgctggccagtgtcaagggcagtgtgtcctactctggtctcatttagtacataacaatttgcacttggtgagaatggcaagttaattgttctctgtgagcaaaacaatggtctcttctgggaaaatgttgctgagaacaatatagttaacaactaagactcctaaaagcttctctaaactgtaccctccaatccagccttcacatggctgctttttttttttttttttaatacgaacctgtccttgtaacactttgatgttatcatttctgggatacaggcaagcaccccagctcctgctactccccagcttgaacttgagcatacatggatgctcagcttcttttgatttgctaaaaacatcacacttgctcacatgcctgtttatgctgttcatgttgtttatgtttcttacctagaataaatagtctcttcccctacttcttttcccgacttcttactttttcctaagattcagtgtacagcatcatgctccacagcaaaccttcctaggccctattctgggcttgccttccctctcaaaacctacataatagattgtatttacctctcctgtcaaccacattgttttgaaaatatatttctatttgtgtctcctctactgcagtataatgtctccatgggcaagaactgtgtattcatcattgcattcctaaacccaaaccaaggccaggaatggagatatcattgataaatagttgttgaattgaggccaagcccttttgataacagaagcctcaaggggtacccagatagtccttgttttaatgatgggttctctcaccactgtcttgatgctctgagcaagttacctcttccctctgaccctcagtttccatatttgtaaaatgagaataaacataccaacttaataaagatattgtgaggattaatgggtacagagtgactagaatgatatttgatagaaattaaatggtagcagtataactattctgatcactgacattaatattcctattgttattattctttgctcacgagggtatacaactcttgttttgctgttgggctgccctctttatgtaggtttactgttaatgctgaggatatactcggactcaaatgtctcagcagaaggctgagagacaccaaatgaagtggtcatctagctgaatgtaggaaaaatgaaatgtagtagcaaatcagtatattctaaggaaattttcaaggaatattaatcttcacccaaattttgaatttttatgtaaaaaattataatttaagggtaaacatagatgacacagctttcgagtgatttcattgaataaaattctactgacttctatgaa

SEQ ID NO: 278406 - DNA, 1560 bp, Artificial Sequence
  derived and/or modified sequence
atggccagcaccaccacctgcaccagattcaccgacgagtaccagctgttcgaggagctgggcaagggcgccttcagcgtggtgagaagatgcatgaagatccccaccggccaggagtacgccgccaagatcatcaacaccaagaagctgagcgccagagaccaccagaagctggagagagaggccagaatctgcagactgctgaagcaccccaacatcgtgagactgcacgacagcatcagcgaggagggcttccactacctggtgttcgacctggtgaccggcggcgagctgttcgaggacatcgtggccagagagtactacagcgaggccgacgccagccactgcatccagcagatcctggagagcgtgaaccactgccacctgaacggcatcgtgcacagagacctgaagcccgagaacctgctgctggccagcaagagcaagggcgccgccgtgaagctggccgacttcggcctggccatcgaggtgcagggcgaccagcaggcctggttcggcttcgccggcacccccggctacctgagccccgaggtgctgagaaaggacccctacggcaagcccgtggacatgtgggcctgcggcgtgatcctgtacatcctgctggtgggctacccccccttctgggacgaggaccagcacagactgtaccagcagatcaaggccggcgcctacgacttccccagccccgagtgggacaccgtgacccccgaggccaaggacctgatcaacaagatgctgaccatcaaccccgccaagagaatcaccgccagcgaggccctgaagcacccctggatctgccagagaagcaccgtggccagcatgatgcacagacaggagaccgtggactgcctgaagaagttcaacgccagaagaaagctgaagggcgccatcctgaccaccatgctggccaccagaaacttcagcgccgccaagagcctgctgaagaagcccgacggcgtgaagatcaacaacaaggccaacgtggtgaccagccccaaggagaacatccccacccccgccctggagagcaccgagagcagcaacaccaccatcgaggacgaggacgtgaaggccagaaagcaggagatcatcaaggtgaccgagcagctgatcgaggccatcaacaacggcgacttcgaggcctacaccaagatctgcgaccccggcctgaccgccttcgagcccgaggccctgggcaacctggtggagggcatggacttccacagattctacttcgagaacgccctgagcaagagcaacaagcccatccacaccatcatcctgaacccccacgtgcacctggtgggcgacgacgccgcctgcatcgcctacatcagactgacccagtacatggacggcagcggcatgcccaagaccatgcagagcgaggagaccagagtgtggcacagaagagacggcaagtggcagaacgtgcacttccacagaagcggcagccccaccgtgcccatcaagcccccctgcatccccaacggcaaggagaacttcagcggcggcaccagcctgtggcagaacatctag

SEQ ID NO: 278407 - DNA, 1575 bp, Artificial Sequence
  derived and/or modified sequence
atggccagcaccaccacctgcaccagattcaccgacgagtaccagctgttcgaggagctgggcaagggcgccttcagcgtggtgagaagatgcatgaagatccccaccggccaggagtacgccgccaagatcatcaacaccaagaagctgagcgccagagaccaccagaagctggagagagaggccagaatctgcagactgctgaagcaccccaacatcgtgagactgcacgacagcatcagcgaggagggcttccactacctggtgttcgacctggtgaccggcggcgagctgttcgaggacatcgtggccagagagtactacagcgaggccgacgccagccactgcatccagcagatcctggagagcgtgaaccactgccacctgaacggcatcgtgcacagagacctgaagcccgagaacctgctgctggccagcaagagcaagggcgccgccgtgaagctggccgacttcggcctggccatcgaggtgcagggcgaccagcaggcctggttcggcttcgccggcacccccggctacctgagccccgaggtgctgagaaaggacccctacggcaagcccgtggacatgtgggcctgcggcgtgatcctgtacatcctgctggtgggctacccccccttctgggacgaggaccagcacagactgtaccagcagatcaaggccggcgcctacgacttccccagccccgagtgggacaccgtgacccccgaggccaaggacctgatcaacaagatgctgaccatcaaccccgccaagagaatcaccgccagcgaggccctgaagcacccctggatctgccagagaagcaccgtggccagcatgatgcacagacaggagaccgtggactgcctgaagaagttcaacgccagaagaaagctgaagggcgccatcctgaccaccatgctggccaccagaaacttcagcgccgccaagagcctgctgaagaagcccgacggcgtgaagaagagaaagagcagcagcagcgtgcagatgatggagccccagaccaccgtgatccacaaccccgacggcaacaaggagagcaccgagagcagcaacaccaccatcgaggacgaggacgtgaaggccagaaagcaggagatcatcaaggtgaccgagcagctgatcgaggccatcaacaacggcgacttcgaggcctacaccaagatctgcgaccccggcctgaccgccttcgagcccgaggccctgggcaacctggtggagggcatggacttccacagattctacttcgagaacgccctgagcaagagcaacaagcccatccacaccatcatcctgaacccccacgtgcacctggtgggcgacgacgccgcctgcatcgcctacatcagactgacccagtacatggacggcagcggcatgcccaagaccatgcagagcgaggagaccagagtgtggcacagaagagacggcaagtggcagaacgtgcacttccacagaagcggcagccccaccgtgcccatcaagcccccctgcatccccaacggcaaggagaacttcagcggcggcaccagcctgtggcagaacatctag

SEQ ID NO: 278408 - protein, 513 aa, Artificial Sequence
  derived and/or modified sequence
MASTTTCTRFTDEYQLFEELGKGAFSVVRRCMKIPTGQEYAAKIINTKKLSARDHQKLEREARICRLLKHPNIVRLHDSISEEGFHYLVFDLVTGGELFEDIVAREYYSEADASHCIQQILESVNHCHLNGIVHRDLKPENLLLASKSKGAAVKLADFGLAIEVQGDQQAWFGFAGTPGYLSPEVLRKDPYGKPVDMWACGVILYILLVGYPPFWDEDQHRLYQQIKAGAYDFPSPEWDTVTPEAKDLINKMLTINPAKRITASEALKHPWICQRSTVASMMHRQETVDCLKKFNARRKLKGAILTTMLATRNFSAAKSLLKKPDGVKEPQTTVIHNPDGNKESTESSNTTIEDEDVKARKQEIIKVTEQLIEAINNGDFEAYTKICDPGLTAFEPEALGNLVEGMDFHRFYFENALSKSNKPIHTIILNPHVHLVGDDAACIAYIRLTQYMDGSGMPKTMQSEETRVWHRRDGKWQNVHFHRSGSPTVPIKPPCIPNGKENFSGGTSLWQNI

SEQ ID NO: 278409 - DNA, 1542 bp, Artificial Sequence
  derived and/or modified sequence
atggcttctactaccacctgcacacgtttcactgacgagtaccaactctttgaggagctcgggaagggtgctttcagcgtcgttagaagatgtatgaagattcctactggccaggagtatgccgccaaaatcataaataccaaaaagctatcggctagagatcaccagaaactggaacgcgaggccaggatttgcagattgctaaagcaccccaatatcgttcgcctccatgactccataagcgaggaaggattccattacctggtgtttgatctggtaaccgggggagagctgtttgaggacatcgtcgcacgtgagtattattccgaagcggatgcatcacattgtattcagcaaattttggagtccgtcaaccactgccaccttaatggcattgttcatagggacctaaaaccagaaaatttgttgttggcttccaagtctaagggggcagctgtgaaactggcagattttggtttggctatagaggtgcagggggaccagcaggcctggttcgggtttgccgggaccccgggatacctcagccctgaggtcctgcgaaaagacccttatggtaagcccgtggacatgtgggcctgcggcgttatcctgtacatactgctggtcggctaccctcccttttgggacgaagaccagcatcggctctaccagcaaattaaggctggagcctatgatttcccctccccagagtgggacaccgtcactcctgaagctaaggatctcatcaataagatgctcacgatcaacccggcaaagcggataaccgcctctgaagccctgaaacacccttggatttgccagagatctaccgtggcaagcatgatgcacaggcaagagactgtggattgcctcaagaagtttaacgcccggaggaaactgaagggagccattctgaccaccatgctggcaacccgaaactttagcgccgcaaagtccctgcttaaaaagccagacggcgtaaaggagcctcagaccacagttatccacaatccagacggcaacaaggagagcactgagagtagcaacaccacaattgaggacgaagacgttaaagcccgcaagcaggagatcatcaaggtaaccgaacaactgatcgaggccatcaacaatggagacttcgaggcctacacaaaaatctgcgatcccgggctgacagcttttgaaccagaagccctaggaaacctggtagagggcatggacttccacaggttttatttcgagaatgccctatccaaatccaacaagcctattcatacaataatccttaacccacatgtacatcttgtgggagatgacgccgcctgcatagcttacatccggctgacacagtacatggacggaagcggcatgccgaagactatgcagtctgaggagacccgggtatggcaccgaagggacggcaaatggcaaaatgtccacttccatcgctccggcagccctaccgtgccgatcaagcccccctgtatccctaacggaaaagagaatttctctgggggcaccagcctctggcagaacatttag

SEQ ID NO: 278410 - DNA, 1542 bp, Artificial Sequence
  derived and/or modified sequence
atggccagcaccaccacctgcacccgcttcacagatgagtaccagctgtttgaggagctgggcaagggggccttctctgtggtgcggcgctgcatgaagatccccaccggccaggagtatgctgccaagatcatcaacaccaagaagctgagcgcccgggaccaccagaagctggagcgggaggcccgcatctgccgcctgctgaagcaccccaacatcgtgcggctgcatgacagcatcagcgaggagggcttccactacctggtgtttgacctggtgactggaggagagctgtttgaggacatcgtggcccgggagtactacagcgaggctgatgccagccactgcatccagcagatcctggagagcgtgaaccactgccacctgaatggcatcgtgcaccgggacctgaagccagagaacctgctgctggccagcaagagcaaaggagctgctgtgaagctggccgactttggcctggccatcgaggtgcagggcgaccagcaggcctggtttggatttgctggcaccccaggctacctgagccctgaggtgctgaggaaggacccctacggcaagcctgtggacatgtgggcctgtggggtcatcctgtacatcctgctggtgggctacccacccttctgggatgaggaccagcaccggctgtaccagcagatcaaggccggggcctatgacttccccagccctgagtgggacacagtgaccccagaggccaaggacctgatcaacaagatgctgaccatcaacccagccaagaggatcacagccagcgaggccctgaagcacccctggatctgccagaggagcacagtggcctccatgatgcaccggcaggagaccgtggactgcctgaagaagttcaatgcccggaggaagctgaagggggccatcctgaccaccatgctggccaccaggaacttctctgctgccaagagcctgctgaagaagccagatggagtgaaggagccccagaccaccgtcatccacaacccagatggcaacaaggagagcacagagagcagcaacaccaccattgaagatgaagatgtgaaggccaggaagcaggagatcatcaaggtgacagagcagctgattgaggccatcaacaatggagactttgaggcctacaccaagatctgtgaccccggcctgacagcctttgagcctgaggccctgggcaacctggtggagggcatggacttccaccgcttctactttgaaaatgccctgagcaagagcaacaagcccatccacaccatcatcctgaacccccacgtgcacctggtgggagatgatgctgcctgcatcgcctacatccggctgacccagtacatggatggcagcggcatgcccaagaccatgcagagcgaggagaccagggtgtggcacagaagagatggcaagtggcagaatgtgcacttccacaggagcggcagccccaccgtgcccatcaagccaccctgcatccccaacgggaaggagaacttcagcggcggcaccagcctgtggcagaacatctag

SEQ ID NO: 278411 - DNA, 1542 bp, Artificial Sequence
  derived and/or modified sequence
atggccagcaccaccacctgcacccggttcaccgacgagtaccagctgtttgaggaacttggaaagggggctttcagcgtggtcagaaggtgcatgaaaattccaaccgggcaggagtacgccgcaaaaatcattaacacaaagaagctgagcgcaagggaccaccagaagcttgagagggaagcccgtatttgccgattgctgaaacaccccaacattgtgagactgcacgactctatcagcgaagaagggtttcattacttggtgttcgacctcgtgacaggcggcgagctctttgaggatatcgttgccagggagtattactcagaagctgatgcgagtcattgcatccagcaaatactggaaagtgtgaatcattgccaccttaatggcatagtacacagggacttaaagccagaaaacctgcttctggccagtaagagcaaaggagccgcagtcaagttggcagattttgggcttgcaatagaggtgcaaggggatcagcaggcctggttcgggttcgcggggacgccaggctacttgagccccgaggttctgaggaaggacccctacggaaaacccgtcgacatgtgggcttgtggtgtcatactgtacatcctgctggttggctatcctcccttttgggacgaagaccagcataggctctatcagcaaataaaggccggcgcttacgacttcccaagtcctgagtgggacactgtgactcctgaagctaaggacttgatcaacaaaatgttaacgattaacccagctaagaggatcactgccagtgaggcgctgaagcacccctggatatgtcagcgatctaccgtggcctccatgatgcacagacaagaaactgtggactgtctcaagaagtttaatgctcgccggaagctgaaaggtgctattttgacgacgatgctggccacacgtaatttctcagctgctaaatctttgctcaaaaagccggacggagtcaaagagccacagaccaccgttatccacaatccggatggaaataaggaatccacagaaagttcaaacacaactatcgaagacgaggacgtcaaggcacgtaagcaggaaataatcaaagtgaccgaacagctgattgaagccatcaacaacggtgactttgaggcatatactaagatttgtgatcctggcctgacggcctttgagccggaggcgctcggcaacctggtcgagggaatggatttccacaggttctatttcgagaacgcactctccaaatcgaataagccaattcatacaatcatactcaatccccacgttcacctcgtgggcgacgatgctgcatgcatagcttatatccggctgactcagtacatggacgggagtggcatgcctaagaccatgcaaagtgaggagactcgggtgtggcaccgaagggacggaaagtggcagaatgtgcactttcatcggtctggctcccccacagtgccaataaaacccccttgtataccaaacggcaaagaaaactttagcggtgggacttctctatggcaaaacatttag

SEQ ID NO: 278412 - DNA, 1542 bp, Artificial Sequence
  derived and/or modified sequence
atggcctctacaacgacctgtacccgcttcacagacgaatatcagctctttgaggagctcggtaaaggagcgttctcagttgtgcggaggtgtatgaaaatacccactggccaggagtacgcggcaaaaatcataaacaccaagaagttaagtgcccgagatcatcaaaagttagaacgggaagccagaatttgccgcttgctcaaacaccctaacattgtccggctccatgactctatcagcgaagaaggcttccactatcttgtgttcgatctggtgaccggaggagagctctttgaggatatcgttgccagggagtattatagcgaagcagacgcctcgcactgtatccaacagatactcgaatccgtcaatcattgccacttaaatgggatcgtccacagggacctgaagccagaaaacctgctcctggcgtccaagtcgaaaggtgctgccgtaaagctggccgatttcggcctcgcgattgaggttcagggagatcagcaagcatggtttggcttcgccggtaccccgggatacctgtcacccgaggtcctgaggaaggacccttatggcaagcccgtcgatatgtgggcctgtggcgtaatactttatatcttactggtgggatacccccctttttgggatgaggaccagcacagactgtatcagcagatcaaggctggggcttacgacttcccatccccagaatgggacaccgtaaccccggaggcaaaagatctaattaacaagatgctgacaataaatccggcaaaacggattacagcttctgaagccctgaagcatccctggatttgccagagaagcacagtggctagcatgatgcaccggcaagaaaccgtggactgcttaaaaaagtttaatgcacgccgtaaacttaaaggcgctattctcaccacaatgctggcaactcggaacttcagcgcagcaaagtcgctcctaaaaaagcctgatggagtcaaagagccacagacgacagtgattcacaatcctgatggtaacaaggaatccacggaatcatcaaataccaccatcgaggacgaagacgtaaaggctaggaagcaagagatcatcaaagtcacagaacagctcatagaagcgatcaacaacggcgacttcgaggcttatacaaagatctgcgatcccggactgactgcattcgaacctgaggccctgggaaatctcgtcgagggaatggatttccacaggttttatttcgaaaatgcgctgtcgaagagcaacaaacctatccatacaatcattctaaacccacatgtgcacctcgtgggcgatgacgccgcttgtatcgcatatattcgtttgacacaatatatggacggatctggcatgcccaagacaatgcagtctgaagagacacgggtgtggcacagacgggatgggaagtggcaaaacgtccattttcatcgcagcggctccccgacagtacccattaagccaccatgtattcccaacggaaaggagaatttcagcggagggacctctctgtggcagaacatctag

SEQ ID NO: 278413 - DNA, 5914 bp, Artificial Sequence
  derived and/or modified sequence
aaaggagggagtgcgagagatccacgaagggacaggcttggagtcgctagagggaggtgtgggaccagcgaggagggggcttcgccagggagggggtgctggcaggcggagggagcggcgggaggaggcgccggaggaggagacggaggcctggggacggcagaagaggcttcgcctgagccgagcgctctttctctcgccgcgccgtcttgaagccgcgcgggctcgtgagcagcgcgaggccgccaaggtgcctcgcttcgccggagccgctgccgcccgccggagggaagccggcctcgggcgcgcacgctcgtcggagccccggcgcgccccgcgcctgagcctgctgacagcggccgctgggctcaggctgtccgctctgggctccgcggcctcggccccgctgcactccacctccgccccctcggactccctcccctctgcttctactcctcctgctccagtgcggatcgtttcgcaactgcttgccactcgtcccgtgcctggctgtttttccatttcccggccccctcttcttgagtactttaccccctgcatttggggacagggactggaaaaggggcgggtggagcgtccagtggagaagaaggaagcgaggcccgcaggaggaggaggatcggcggactgtggggaggagaccccacgccaccctttctggtcatctcccctcccgccccgcccctgcgcacactccctcgcgggcgagctactttcggaccaggaaagtaagagcggccctgggtgacagcgccgcggggccagtcccggggttagccgcgcgtctgctcgcttctggtccgtcgcgctcccagccagggcacagcccggaccgaggatggcttcgaccacaacctgcaccaggttcacggacgagtatcagcttttcgaggagcttggaaagggggcattctcagtggtgagaagatgtatgaaaattcctactggacaagaatatgctgccaaaattatcaacaccaaaaagctttctgctagggatcatcagaaactagaaagagaagctagaatctgccgtcttttgaagcaccctaatattgtgcgacttcatgatagcatatcagaagagggctttcactacttggtgtttgatttagttactggaggtgaactgtttgaagacatagtggcaagagaatactacagtgaagctgatgccagtcattgtatacagcagattctagaaagtgttaatcattgtcacctaaatggcatagttcacagggacctgaagcctgagaatttgcttttagctagcaaatccaagggagcagctgtgaaattggcagactttggcttagccatagaagttcaaggggaccagcaggcgtggtttggttttgctggcacacctggatatctttctccagaagttttacgtaaagatccttatggaaagccagtggatatgtgggcatgtggtgtcattctctatattctacttgtggggtatccacccttctgggatgaagaccaacacagactctatcagcagatcaaggctggagcttatgattttccatcaccagaatgggacacggtgactcctgaagccaaagacctcatcaataaaatgcttactatcaaccctgccaaacgcatcacagcctcagaggcactgaagcacccatggatctgtcaacgttctactgttgcttccatgatgcacagacaggagactgtagactgcttgaagaaatttaatgctagaagaaaactaaagggtgccatcttgacaactatgctggctacaaggaatttctcagcagccaagagtttgttgaagaaaccagatggagtaaaggagccccaaactactgtaatccacaaccctgatggaaacaaggagtcaactgagagttcaaatacaacaattgaggatgaagatgtgaaagcacgaaagcaagagattatcaaagtcactgaacaactgatcgaagctatcaacaatggggactttgaagcctacacaaaaatctgtgacccaggccttactgcttttgaacctgaagctttgggtaatttagtggaagggatggattttcaccgattctactttgaaaatgctttgtccaaaagcaataaaccaatccacactattattctaaaccctcatgtacatctggtaggggatgatgccgcctgcatagcatatattaggctcacacagtacatggatggcagtggaatgccaaagacaatgcagtcagaagagactcgtgtgtggcaccgccgggatggaaagtggcagaatgttcattttcatcgctcggggtcaccaacagtacccatcaagccaccctgtattccaaatgggaaagaaaacttctcaggaggcacctctttgtggcaaaacatctaaggcctgaaaaccattcacatatgggtcttctaaatttcaacagtgccacttctgcattctctgttctcaaggcacctggatggtgaccctgggccgtcctctcctcctcttcatgcatgtttctgagtgcatgaagttgtgaaggtcctacatgtaatgcatatgtgatgcatcatcttatcatatattccttcctatacattgtttacacttcaactacggggatgttccacacaaacttaaattactgttggcaaaacaatagggggagattagacaaaaaaaaaaatccacaatattccaagtacaactcttcatcaagtttctctgttaatgccaagatttaacagacttaagaactattgttctctgaatgacagttgtaagagaaatgtaaattttttagaactctttgctgttaatctgttttggtttgtttggtttttttttttttttttaaggtaaaaaaaaaatacaccttcagtttcctggtgtgatcctggttaaaatggatgatttttcattgaaagttttgctgattaacaattaaagtgggatgatatgtgggcaaaatcacttatgaaagtagaagcaagaatcagttggtttgctaccacataaagccatgctgtttttggtcaaactgtgtaaactggaaaaattcacatcatttctgagtttaatcactttaggatatattcacattgttttggtgaatttgctgaattgaattgtttttctttctcaaatctgtgatctcttttctttatcctgtttctttgttcctttcgtttgctttcttatttttcttttgttccattcttttcttacttttttcccttttccttttttggggaggctggctagtagtgtgtgagaaaagaatagaagtgaaatttgcataatgaatgtaaaagggaaataaaagtcttttgaaggtagctatactagcacttttgatcatcttcagggcccacaaaaatgttgtcaagattttaaaggtttataattctgcttaagctctagtttggacttaggtatcctaactatgttggaggtatttgcattgtttaaagttaggataaaagcaagttcctcctgtgactgcaacgtcttactgattgggacagttgccaggaggataccaacttgatagcagagggggttttatgcaaacgcactcacctccgccttggggaatgaaagggtcacttctgcatcatcactagctagttttctagtgttagagaggcttacaaatgtttgccattctcataagtgttttgaacttgatctttgtgacttgtgcttttttagcttctctcttgaatcagagtatcattgtcttcctccaaggagttagaatttcccagtttaaaacaaaaagggaaatgtcctaggttttctttgtgcttctcatttttcctttgttgattcaattcctgtgatttttgttctcttccctgaagtgctttacagtgcatggaatctccatcattgttattttaacgatagtaattcacagtcctcagaagcctatttttaaagcagaagcaaaaaagaaaaacaaaataacaaaaacaacccttcctcttttctctcatctcacctctctgtgttgattactaatcatcttagatattattgctagtggatgtatggtagatgggttgaagcttttctgataattattacacaatttaaaacaacatatatatttaaaataaatatatacagtaaatatattgagccatgttaacctgccaatgagatctgtgaaaaaataatggcctcatttttctctttttaatttcttttacccttttgtgaagcagctatacgtggcatacatgtatttaaagaaaaaaaaatagatgtagagtgttttttttacacttttaacttagcatgtggtgttgaagtattactgtagatcaagtttgtcttccgcactaagatgtgaggaaattgtgatttgttctctccaccacaaatgaattacacatttattatcttctatcattttgaaacactgcagtttaccatgggacactgtatatatttcttgccataatggtaaaggactgattgatatatttaagagttaataaatttgtgatttctgctgacagtgcgtccatctttatttcttcagaagaggtactgtatgtatgcctgcatagtgctggccagtgtcaagggcagtgtgtcctactctggtctcatttagtacataacaatttgcacttggtgagaatggcaagttaattgttctctgtgagcaaaacaatggtctcttctgggaaaatgttgctgagaacaatatagttaacaactaagactcctaaaagcttctctaaactgtaccctccaatccagccttcacatggctgctttttttttttttttttaatacgaacctgtccttgtaacactttgatgttatcatttctgggatacaggcaagcaccccagctcctgctactccccagcttgaacttgagcatacatggatgctcagcttcttttgatttgctaaaaacatcacacttgctcacatgcctgtttatgctgttcatgttgtttatgtttcttacctagaataaatagtctcttcccctacttcttttcccgacttcttactttttcctaagattcagtgtacagcatcatgctccacagcaaaccttcctaggccctattctgggcttgccttccctctcaaaacctacataatagattgtatttacctctcctgtcaaccacattgttttgaaaatatatttctatttgtgtctcctctactgcagtataatgtctccatgggcaagaactgtgtattcatcattgcattcctaaacccaaaccaaggccaggaatggagatatcattgataaatagttgttgaattgaggccaagcccttttgataacagaagcctcaaggggtacccagatagtccttgttttaatgatgggttctctcaccactgtcttgatgctctgagcaagttacctcttccctctgaccctcagtttccatatttgtaaaatgagaataaacataccaacttaataaagatattgtgaggattaatgggtacagagtgactagaatgatatttgatagaaattaaatggtagcagtataactattctgatcactgacattaatattcctattgttattattctttgctcacgagggtatacaactcttgttttgctgttgggctgccctctttatgtaggtttactgttaatgctgaggatatactcggactcaaatgtctcagcagaaggctgagagacaccaaatgaagtggtcatctagctgaatgtaggaaaaatgaaatgtagtagcaaatcagtatattctaaggaaattttcaaggaatattaatcttcacccaaattttgaatttttatgtaaaaaattataatttaagggtaaacatagatgacacagctttcgagtgatttcattgaataaaattctactgacttctatgaa

SEQ ID NO: 278414 - DNA, 1542 bp, Artificial Sequence
  derived and/or modified sequence
atggccagcaccaccacctgcaccagattcaccgacgagtaccagctgttcgaggagctgggcaagggcgccttcagcgtggtgagaagatgcatgaagatccccaccggccaggagtacgccgccaagatcatcaacaccaagaagctgagcgccagagaccaccagaagctggagagagaggccagaatctgcagactgctgaagcaccccaacatcgtgagactgcacgacagcatcagcgaggagggcttccactacctggtgttcgacctggtgaccggcggcgagctgttcgaggacatcgtggccagagagtactacagcgaggccgacgccagccactgcatccagcagatcctggagagcgtgaaccactgccacctgaacggcatcgtgcacagagacctgaagcccgagaacctgctgctggccagcaagagcaagggcgccgccgtgaagctggccgacttcggcctggccatcgaggtgcagggcgaccagcaggcctggttcggcttcgccggcacccccggctacctgagccccgaggtgctgagaaaggacccctacggcaagcccgtggacatgtgggcctgcggcgtgatcctgtacatcctgctggtgggctacccccccttctgggacgaggaccagcacagactgtaccagcagatcaaggccggcgcctacgacttccccagccccgagtgggacaccgtgacccccgaggccaaggacctgatcaacaagatgctgaccatcaaccccgccaagagaatcaccgccagcgaggccctgaagcacccctggatctgccagagaagcaccgtggccagcatgatgcacagacaggagaccgtggactgcctgaagaagttcaacgccagaagaaagctgaagggcgccatcctgaccaccatgctggccaccagaaacttcagcgccgccaagagcctgctgaagaagcccgacggcgtgaaggagccccagaccaccgtgatccacaaccccgacggcaacaaggagagcaccgagagcagcaacaccaccatcgaggacgaggacgtgaaggccagaaagcaggagatcatcaaggtgaccgagcagctgatcgaggccatcaacaacggcgacttcgaggcctacaccaagatctgcgaccccggcctgaccgccttcgagcccgaggccctgggcaacctggtggagggcatggacttccacagattctacttcgagaacgccctgagcaagagcaacaagcccatccacaccatcatcctgaacccccacgtgcacctggtgggcgacgacgccgcctgcatcgcctacatcagactgacccagtacatggacggcagcggcatgcccaagaccatgcagagcgaggagaccagagtgtggcacagaagagacggcaagtggcagaacgtgcacttccacagaagcggcagccccaccgtgcccatcaagcccccctgcatccccaacggcaaggagaacttcagcggcggcaccagcctgtggcagaacatctag

SEQ ID NO: 278415 - protein, 748 aa, Artificial Sequence
  derived and/or modified sequence
MEENNDSTENPQQGQGRQNAIKCGWLRKQGGFVKTWHTRWFVLKGDQLYYFKDEDETKPLGTIFLPGNKVSEHPCNEENPGKFLFEVVPGGDRDRMTANHESYLLMASTQNDMEDWVKSIRRVIWGPFGGGIFGQKLEDTVRYEKRYGNRLAPMLVEQCVDFIRQRGLKEEGLFRLPGQANLVKELQDAFDCGEKPSFDSNTDVHTVASLLKLYLRELPEPVIPYAKYEDFLSCAKLLSKEEEAGVKELAKQVKSLPVVNYNLLKYICRFLDEVQSYSGVNKMSVQNLATVFGPNILRPKVEDPLTIMEGTVVVQQLMSVMISKHDCLFPKDAELQSKPQDGVSNNNEIQKKATMGQLQNKENNNTKDSPSRQCSWDKSESPQRSSMNNGSPTALSGSKTNSPKNSVHKLDVSRSPPLMVKKNPAFNKGSGIVTNGSFSSSNAEGLEKTQTTPNGSLQARRSSSLKVSGTKMGTHSVQNGTVRMGILNSDTLGNPTNVRNMSWLPNGYVTLRDNKQKEQAGELGQHNRLSTYDNVHQQFSMMNLDDKQSIDSATWSTSSCEISLPENSNSCRSSTTTCPEQDFFGGNFEDPVLDGPPQDDLSHPRDYESKSDHRSVGGRSSRATSSSDNSETFVGNSSSNHSALHSLVSSLKQEMTKQKIEYESRIKSLEQRNLTLETEMMSLHDELDQERKKFTMIEIKMRNAERAKEDAEKRNDMLQKEMEQFFSTFGELTVEPRRTERGNTIWIQ

SEQ ID NO: 278416 - protein, 246 aa, Artificial Sequence
  derived and/or modified sequence
MEENNDSTENPQQGQGRQNAIKCGWLRKQGGFVKTWHTRWFVLKGDQLYYFKDEDETKPLGTIFLPGNKVSEHPCNEENPGKFLFEVVPGGDRDRMTANHESYLLMASTQNDMEDWVKSIRRVIWGPFGGGIFGQKLEDTVRYEKRYGNRLAPMLVEQCVDFIRQRGLKEEGLFRLPGQANLVKELQDAFDCGEKPSFDSNTDVHTVASLLKLYLRELPEPVIPYAKYEDFLSCAKLLSKEEEAVS

SEQ ID NO: 278417 - DNA, 2247 bp, Artificial Sequence
  derived and/or modified sequence
atggaagagaacaatgacagcaccgaaaacccccagcaagggcaggggcggcagaacgctattaaatgcggctggctgcgtaagcagggcgggtttgtgaaaacctggcacactcggtggtttgttctgaaaggtgatcagctgtattactttaaggacgaggatgagacaaagcctcttggaacaatattcctcccagggaacaaagtaagcgaacacccatgcaacgaggagaaccccggtaagttcttatttgaggtggtccctggaggggatcgcgaccgaatgaccgctaatcatgaatcctatctcttgatggcaagtacccagaacgacatggaggactgggtcaagtccatacgaagagtcatttggggcccattcggcggcggcatctttggccaaaagctggaggatacggtgcgctacgagaagaggtatggcaatcgccttgcccccatgctcgtggaacagtgcgtcgactttatccggcagcggggactcaaggaggaaggactgttccgtctgcccggtcaggctaacttggtcaaggagttgcaggacgcctttgactgtggcgaaaaacctagcttcgactctaacacagacgtgcatactgtggcctctttgctgaaactgtacctccgggaattgccagaacctgtaattccctatgcaaaatacgaggacttcctatcctgtgccaagctgctgagtaaagaggaggaagccggcgtcaaagaattggcaaaacaggtgaaatctttgcctgtagtgaactataatttgctgaagtatatttgccgctttctggacgaagtacagtcctactccggggtgaataagatgtccgtgcagaacctggctaccgtgttcgggccaaacattctgaggccaaaggttgaagatccactgacgatcatggagggcacagtcgtcgtgcagcagctgatgagcgtcatgatttcaaagcacgactgtcttttcccaaaggatgcagagctccaatcaaaaccccaggacggcgttagcaataacaacgagatccagaagaaggcaaccatgggccagttgcagaataaagagaacaacaataccaaagattccccgtcacggcagtgctcttgggataaatccgagagtccacagagatcctcaatgaataatggttctcccacagctttatctggcagcaagacaaatagccccaaaaattcagtccacaaactggacgtgtcccgttctccaccactgatggtcaaaaagaaccccgcctttaacaagggaagcgggattgtgaccaacggctccttttcttcgtccaacgctgaaggattagagaagactcagacaacacctaacgggtccctgcaggctaggcgctcatctagtcttaaggtgagtggcactaaaatgggcactcactctgtgcagaatggaacggtgaggatgggaattctcaactcggacaccctcgggaatcctaccaacgttcgcaacatgagctggctcccgaacggttacgtgacactcagggacaataagcagaaagaacaagccggagagctcggccaacataataggcttagtacatatgataacgtccatcagcagttttccatgatgaatctcgacgacaaacagtcaatcgactccgcaacatggagtaccagtagttgcgaaatatccctccctgagaattcgaactcctgtcggtcatccacaacgacctgccccgagcaagatttttttggaggcaactttgaagaccccgtgctggatggtccccctcaggatgacctgtctcacccccgcgattacgaatctaagtccgaccacaggagcgttgggggcaggtcttcaagagccactagttcgtcagacaactctgaaactttcgttggtaacagcagttccaaccacagcgctcttcacagcctcgtgtcaagcctcaagcaagagatgacaaagcagaaaatcgagtatgagtcacgaattaaatcgctcgagcaacggaaccttaccctcgaaacagaaatgatgtctctgcacgatgagctagaccaagagagaaaaaagtttaccatgatagagatcaaaatgcgcaatgccgagagagcaaaagaggacgccgagaaacggaacgatatgctccagaaagaaatggagcagttttttagcacattcggcgagctcaccgtggagcccaggcgaacagagcgagggaataccatttggatacagtag

SEQ ID NO: 278418 - DNA, 741 bp, Artificial Sequence
  derived and/or modified sequence
atggaagagaacaatgactccacggagaatccacagcaaggccaggggcgccagaatgccattaagtgtggatggttgaggaagcagggtggctttgtcaaaacctggcatacccgctggtttgtattgaagggagaccagttgtattatttcaaggatgaagacgagactaaaccacttgggacaattttcttaccaggcaataaggtgtctgagcacccatgtaacgaagagaatcctggtaaattcctctttgaagtggtacccgggggggaccgagatcggatgacagctaaccacgaatcatatctcttgatggcctctacgcagaacgatatggaggactgggtgaagtcaatacgccgggtgatttgggggcctttcggcggaggcatattcgggcaaaaactggaagacacggtccgatacgagaaaaggtacgggaatcgtctcgcgccgatgttggtagaacaatgcgtggactttatccgtcagagaggcctgaaagaagagggactcttcaggttgcctggtcaggccaacttggtgaaagagctgcaggatgcattcgattgcggcgaaaagccaagcttcgacagcaatactgacgtgcacacggttgcgagtctgctgaagctatatctgcgagagctaccggagcctgtgattccctacgctaaatatgaggactttctgagctgcgcaaagctgctcagcaaagaggaggaggctgtgagttag

SEQ ID NO: 278419 - DNA, 2247 bp, Artificial Sequence
  derived and/or modified sequence
atggaggagaacaatgacagcacagagaacccccagcagggccagggccggcagaatgccatcaagtgtggctggctgaggaagcagggcggctttgtgaagacctggcacacccgctggtttgtgctgaagggggaccagctgtactacttcaaggatgaagatgagaccaagcccctgggcaccatcttcctgcccggcaacaaggtgtctgagcacccctgcaatgaggagaaccctgggaagttcctgtttgaggtggtgcctggaggagaccgggacaggatgacagccaaccacgagagctacctgctgatggccagcacccagaatgacatggaggactgggtgaagagcatcagaagagtcatctggggcccctttggaggcggcatcttcggccagaagctggaggacacagtgcgctatgagaagagatatggcaaccggctggcccccatgctggtggagcagtgtgtggacttcatccggcagaggggcctgaaggaggagggcctcttccggctgcccggccaggccaacctggtgaaggagctgcaggatgcctttgactgtggggagaagcccagctttgacagcaacacagatgtgcacacagtggccagcctgctgaagctgtacctgcgggagctgcctgagcctgtgatcccctatgccaagtatgaggacttcctgagctgtgccaagctgctgagcaaggaggaggaggccggcgtgaaggagctggccaagcaggtgaagagcctgcctgtggtgaactacaacctgctgaagtacatctgccgcttcctggatgaggtgcagagctacagcggcgtgaacaagatgtctgtgcagaacctggccaccgtgtttggccccaacatcctgcggcccaaggtggaggaccccctgaccatcatggagggcaccgtggtggtgcagcagctgatgtctgtgatgatcagcaagcatgactgcctcttccccaaggatgctgagctgcagagcaagccccaggatggagtgagcaacaacaatgagatccagaagaaggccaccatgggccagctgcagaacaaggagaacaacaacaccaaggacagccccagccggcagtgctcctgggacaagtctgagagcccccagaggagctccatgaacaacggcagccccacagccctgagcggcagcaagaccaacagccccaagaacagcgtgcacaagctggatgtgagccgcagcccccccctgatggtgaagaagaacccagccttcaacaagggcagcggcatcgtgaccaacggcagcttcagcagcagcaatgctgagggcctggagaagacccagaccacccccaacggcagcctgcaggcccggcgcagcagcagcctgaaggtgtctggcaccaagatgggcacccacagcgtgcagaatggaacagtgaggatgggcatcctgaacagcgacaccctgggcaaccccaccaacgtgaggaacatgtcctggctgcccaacggctacgtgaccctgcgggacaacaagcagaaggagcaggccggggagctgggccagcacaaccggctgagcacctatgacaacgtgcaccagcagttctccatgatgaacctggatgacaagcagagcattgacagcgccacctggagcaccagcagctgtgagatcagcctgcctgagaacagcaacagctgccgcagcagcaccaccacctgcccagagcaggacttcttcggcggcaactttgaagatcctgtgctggatggccccccccaggatgacctgagccacccccgggactatgagagcaagagtgaccacaggtctgtgggcggccgcagcagccgggccaccagcagcagtgacaacagcgagacctttgtgggcaacagcagcagcaaccacagcgccctgcacagcctggtgagcagcctgaagcaggagatgaccaagcagaagattgaatatgagagccgcatcaagagcctggagcagaggaacctgaccctggagacagagatgatgagcctgcatgatgagctggaccaggagaggaagaagttcaccatgattgagatcaagatgagaaatgctgagcgggccaaggaggatgctgagaagagaaatgacatgctgcagaaggagatggagcagttcttcagcacctttggagagctgactgtggagcccaggagaacagagcggggcaacaccatctggatccagtag

SEQ ID NO: 278420 - DNA, 741 bp, Artificial Sequence
  derived and/or modified sequence
atggaggagaacaatgacagcacagagaacccccagcagggccagggccggcagaatgccatcaagtgtggctggctgaggaagcagggcggctttgtgaagacctggcacacccgctggtttgtgctgaagggggaccagctgtactacttcaaggatgaagatgagaccaagcccctgggcaccatcttcctgcccggcaacaaggtgtctgagcacccctgcaatgaggagaaccctgggaagttcctgtttgaggtggtgcctggaggagaccgggacaggatgacagccaaccacgagagctacctgctgatggccagcacccagaatgacatggaggactgggtgaagagcatcagaagagtcatctggggcccctttggaggcggcatcttcggccagaagctggaggacacagtgcgctatgagaagagatatggcaaccggctggcccccatgctggtggagcagtgtgtggacttcatccggcagaggggcctgaaggaggagggcctcttccggctgcccggccaggccaacctggtgaaggagctgcaggatgcctttgactgtggggagaagcccagctttgacagcaacacagatgtgcacacagtggccagcctgctgaagctgtacctgcgggagctgcctgagcctgtgatcccctatgccaagtatgaggacttcctgagctgtgccaagctgctgagcaaggaggaggaggccgtgtcctag

SEQ ID NO: 278421 - DNA, 2247 bp, Artificial Sequence
  derived and/or modified sequence
atggaggagaacaacgacagcaccgagaacccccagcagggccagggaaggcagaatgcaatcaagtgtggatggctgcggaagcaaggcggttttgtgaagacatggcatacgcgctggttcgtactgaagggggaccagttgtactacttcaaagacgaagacgaaacgaagcctctcggtactatcttcctgcctggcaataaagtctccgaacacccatgcaacgaggaaaatccgggcaagttcttattcgaagtcgtgccaggcggagatagggatcgaatgaccgcaaaccacgaatcttaccttctgatggcaagcactcagaatgatatggaagactgggtgaaaagcatccggcgggttatctggggacctttcggcgggggtattttcggccaaaaactggaggataccgtgcgatacgaaaaaagatacggcaacaggctggctcctatgctcgtggaacagtgtgtcgactttataagacagagaggattgaaggaggaaggcttatttaggctccctggtcaagctaacctggtgaaggaattgcaagatgcgtttgattgtggggaaaagccgagcttcgatagtaacactgatgtccatacagtggccagcctgctgaagttatatctccgggagctgcccgaaccagtcataccttacgcaaaatatgaggacttcctctcatgcgccaagctgttgtccaaggaggaggaggcaggagttaaagagctggccaaacaggtaaaaagcttgcccgttgtcaattataacctgctcaaatacatttgcagattcttagacgaggtgcagagttattctggcgtgaataagatgagcgtgcagaacctggctacagtcttcggacccaatattctgaggcccaaggtcgaggacccactgactattatggaaggcaccgtcgtggtccagcaactcatgtcagttatgatttctaaacatgactgcttgttcccaaaggacgcagagcttcagtcgaagccacaggacggtgtgagtaataataatgagattcagaaaaaagcgacaatgggacagctacagaacaaggagaacaataacaccaaagacagtccaagccgacagtgctcatgggacaagtccgagagcccccagagatcctccatgaataacggctcacctacagcactctcgggcagcaagaccaacagtcccaagaattctgtacataagctcgatgtgtctaggtcccccccattgatggtgaagaagaacccagcgttcaataaaggatcaggcatcgtaaccaacggatccttctcaagcagtaacgccgagggcctcgagaaaacacaaacgacgcctaatggctcactgcaggcccgcaggtccagtagcttgaaagtcagcggcacgaaaatgggcacacactccgtgcagaacggaactgtaagaatggggattcttaattcagacacactcggtaaccccaccaacgtgcgcaatatgtcttggctccccaacgggtatgtaacactacgtgacaacaaacagaaagaacaagccggtgagctgggtcaacataatagattgtccacatatgataatgtccaccagcagttttccatgatgaacctggacgacaagcagtccattgactctgccacatggtctacctctagctgtgaaatctccttgcccgagaattcgaattcctgtcgctctagcactaccacctgtccagaacaggacttctttggcggcaattttgaggatccagtgctggatggccccccccaagatgacttgtcacaccctagagattacgaaagtaagtctgatcaccgtagcgttggggggcggtctagtcgcgccacctcctctagcgataactccgagaccttcgttggcaactcctcttccaaccattccgcactgcacagtttggtctctagcctgaaacaagagatgactaagcagaagatcgagtatgaaagccggatcaagtccctggaacagaggaatctaacattagaaaccgaaatgatgtcactgcacgatgaactcgatcaggaaagaaaaaaattcaccatgatagagattaaaatgcggaacgcagaacgtgccaaagaggatgcagaaaagcggaacgacatgttgcaaaaggaaatggaacaatttttttccaccttcggagaactgactgttgaaccgcgccggacagaaagaggaaacaccatttggatacagtag

SEQ ID NO: 278422 - DNA, 741 bp, Artificial Sequence
  derived and/or modified sequence
atggaggagaacaacgacagcaccgagaacccccagcagggccagggacgacagaatgccatcaaatgtggctggttgcggaaacagggcggctttgtgaagacatggcacactcgatggtttgtcttgaagggtgaccaactctactatttcaaggacgaagatgaaaccaagcccctgggaaccatctttttacctggtaacaaagtcagtgaacacccctgtaacgaagaaaaccccggcaagtttctgtttgaagttgtgcccggaggcgacagggatagaatgacagcaaatcacgaatcctacctgctcatggcatccacccagaacgacatggaagactgggtgaagtccatcaggcgggttatatggggacccttcgggggtggaatattcggtcagaagctggaagacactgtgcggtacgaaaaaaggtatggcaatcggttggcccccatgttggtagagcagtgcgtggactttatccgccagaggggactgaaggaagagggcctgttccgcctgcctggtcaggccaatctcgtgaaggaattacaggacgcctttgactgtggggaaaaacccagtttcgactcaaacactgatgtgcacacagtggcctctctcctgaagctctacttgagggagttgcctgagcccgtgatcccatacgctaaatacgaggatttcctcagctgtgctaagcttctgtctaaggaagaggaggcggtcagctag

SEQ ID NO: 278423 - DNA, 2247 bp, Artificial Sequence
  derived and/or modified sequence
atggaagaaaataatgatagcactgaaaacccccaacagggacagggccgacagaacgccatcaagtgcggatggttacgtaaacagggcggttttgtcaagacatggcacactcggtggttcgtcctgaaaggggatcagttgtattattttaaggacgaggatgaaactaaaccactcggcactatattcttgccagggaataaggtgtctgagcatccttgtaatgaggaaaaccctggtaaattcctcttcgaggtggtgcccggaggagaccgggatcgtatgacggccaaccatgagtcatacttactgatggccagcactcagaacgatatggaggactgggttaagtctatacgccgtgtcatatggggaccctttggtggtgggattttcgggcagaagctggaagacacagtcagatacgaaaagagatacggaaatcgcctcgcaccaatgctggtcgaacagtgtgttgatttcatacgtcagcggggtctgaaggaagaagggctcttcaggctacccggacaggccaatctcgtcaaggagctgcaggatgcttttgactgcggggagaaaccctctttcgacagtaacacggacgtgcatacagtggcgagcctcctgaaactttaccttagggaattaccagagcctgtgatcccatacgccaaatacgaagactttctgagctgcgcaaaactgctttccaaagaggaggaagcaggggtgaaggagctcgcgaagcaagtgaaatcactccccgtagttaactacaacctgctgaagtacatctgtcggttcctggatgaggtccagtcctacagtggcgttaacaagatgagcgtgcagaacctagcaactgtgttcggacctaatattctccggccaaaagttgaggatccattgacgattatggaaggcaccgtggtggtgcagcagttaatgagcgtgatgattagtaagcacgactgcttgttcccaaaagatgccgagctacaaagcaaaccccaagacggcgtttccaataacaatgagattcaaaaaaaggctaccatgggccagctccagaacaaggaaaacaataataccaaggacagccctagccgccagtgcagctgggacaagtctgaatcgccccagaggagcagcatgaacaacggaagtccaaccgccctgtcaggttctaagactaatagtcctaaaaacagcgtccataaactggacgtgagtcgatcccccccactcatggttaagaagaacccagcgttcaacaaggggtccggcatcgttaccaatggctcgttttcatcttccaatgcggagggcttggaaaagacgcaaactacccctaacggaagcttacaggccaggcgcagcagtagccttaaggtcagtggtaccaagatgggtacccacagcgtgcaaaacggtactgtccggatgggcatcctcaatagcgacacactcggcaatccgacgaatgtccgcaatatgtcttggctgcctaatggctacgtaacgcttagggataataaacagaaagaacaggctggcgagctgggacaacacaatcgcctgagcacctacgacaacgtccaccagcagttcagcatgatgaacctggacgacaagcaaagtattgacagcgcaacgtggagcaccagctcttgcgaaatcagcttacccgaaaactcgaatagttgtcgaagcagcacgacaacgtgccccgagcaagatttcttcggcggaaacttcgaggatcccgtgcttgatggccctccacaggacgacctttctcatccacgcgattatgaatccaaatctgatcacaggagtgtaggcggtcggtcttcccgcgctacctctagctccgataactctgagacctttgtgggcaactctagttcaaatcatagcgccctccactccttggtgagtagtctgaagcaagaaatgacaaagcaaaaaatagaatatgagagtcggattaagtccctggagcagcggaatctgacgcttgaaacagaaatgatgagtctgcacgacgagctcgaccaagaacggaagaaatttacgatgatcgaaatcaagatgcgtaatgcggagcgagctaaagaagacgctgagaagagaaatgacatgctgcagaaagagatggaacagtttttttctacttttggggaattgaccgtggagcccagaaggactgaacgaggcaatacgatttggatccagtag

SEQ ID NO: 278424 - DNA, 741 bp, Artificial Sequence
  derived and/or modified sequence
atggaggaaaacaatgacagcactgaaaaccctcagcagggccagggtaggcagaacgcaattaaatgtggttggcttcggaaacagggcggtttcgtgaaaacatggcacactagatggttcgtgcttaagggggaccagttatattatttcaaggacgaagatgagactaaacccctaggaacaatattcctcccgggaaacaaagtcagtgaacatccttgcaatgaggagaatccgggtaagtttttattcgaggttgtgcccggtggagaccgggaccggatgacggccaaccacgagagctacctactgatggctagcactcagaacgatatggaggattgggtgaaatcaattcgccgtgttatctggggtcctttcgggggtgggatatttggacaaaagctggaggatactgtaagatatgagaaaaggtacgggaacagactggctcccatgcttgtggaacaatgtgtcgacttcatcaggcaaagagggttgaaggaggaggggctcttccgcctgcctgggcaggcaaacctggtgaaggaactgcaggatgcattcgattgtggggagaagccctccttcgactcaaacacggacgttcacaccgtggcgtctctactgaagctatatctcagggagttacccgagcctgtgattccttacgctaaatatgaagactttctgagctgtgctaagctgctatccaaagaggaggaggcagtttcatag

SEQ ID NO: 278425 - DNA, 2740 bp, Artificial Sequence
  derived and/or modified sequence
ggatgggaggatactgactaagtctgagaaggaggagaaagaaaattagctacaggaagagtttatatccccttctacaagaaaacttaaatatagctaccaccgctttgaaaggaatggtttgtgtccaaacagcattttccagacaagctctgtacttttttgccaaaagaattaactttaaactgaaggcagtggacagttaaacaagagtcggcactgggaacagctgtgcgtagaccagaccagtgacttataaggaggcgatcgagatcggatgacagcaaatcatgaaagctacctcctcatggcaagcacccagaatgatatggaagactgggtgaagtcaatccgccgagtcatatggggacctttcggaggaggcatttttggacagaaactggaggatactgttcgttatgagaagagatatgggaaccgtctggctccgatgttggtggagcagtgcgtggactttatccgacaaagggggctgaaagaagagggtctctttcgactgccaggccaggctaatcttgttaaggagctccaagatgcctttgactgtggggagaagccatcatttgacagcaacacagatgtacacacggtggcatcacttcttaagctgtacctccgagaacttccagaaccagttattccttatgcgaagtatgaagattttttgtcatgtgccaaactgctcagcaaggaagaggaagcaggtgttaaggaattagcaaagcaggtgaagagtttgccagtggtaaattacaacctcctcaagtatatttgcagattcttggatgaagtacagtcctactcgggagttaacaaaatgagtgtgcagaacttggcaacggtctttggtcctaatatcctgcgccccaaagtggaagatcctttgactatcatggagggcactgtggtggtccagcagttgatgtcagtgatgattagcaaacatgattgcctctttcccaaagatgcagaactacaaagcaagccccaagatggagtgagcaacaacaatgaaattcagaagaaagccaccatggggcagttacagaacaaggagaacaataacaccaaggacagccctagtaggcagtgctcctgggacaagtctgagtcaccccagagaagcagcatgaacaatggatcccccacagctctatcaggcagcaaaaccaacagcccaaagaacagtgttcacaagctagatgtgtctagaagcccccctctcatggtcaaaaagaacccagcctttaataagggtagtgggatagttaccaatgggtccttcagcagcagtaatgcagaaggtcttgagaaaacccaaaccacccccaatgggagcctacaggccagaaggagctcttcactgaaggtatctggtaccaaaatgggcacgcacagtgtacagaatggaacggtgcgcatgggcattttgaacagcgacacactcgggaaccccacaaatgttcgaaacatgagctggctgccaaatggctatgtgaccctgagggataacaagcagaaagaacaagctggagagttaggccagcacaacagactgtccacctatgataatgtccatcaacagttctccatgatgaaccttgatgacaagcagagcattgacagtgctacctggtccacttcctcctgtgaaatctccctccctgagaactccaactcctgtcgctcttctaccaccacctgcccagagcaagacttttttggggggaactttgaggaccctgttttggatgggcccccgcaggacgacctttcccaccccagggactatgaaagcaaaagtgaccacaggagtgtgggaggtcgaagtagtcgtgccaccagtagcagtgacaacagtgagacatttgtgggcaacagcagcagcaaccacagtgcactgcacagtttagtttccagcctgaaacaggaaatgaccaaacagaagatagagtatgagtccaggataaagagcttagaacagcgaaacttgactttggaaacagaaatgatgagcctccatgatgaactggatcaggagaggaaaaagttcacaatgatagaaataaaaatgcgaaatgccgagcgagcaaaagaagatgccgagaaaagaaatgacatgctacagaaagaaatggagcagtttttttccacgtttggagaactgacagtggaacccaggagaaccgagagaggaaacacaatatggattcagtgagcctgctttcgcctgctgtctctgatggctctggcaaggactccagggattctggtgggatatgacttagaaccaggtggctggtcacctggatgtacagaagtctaactggtgaaggaatatcatttacagacattaaacatccatatctgcaatgtgtaccaaagttatatcatgccccataatgctactgtcaagtgttacaactggatatgtgtatatagagtagtttttcaaaagtaaactaaaaatgagaagcatatttcaagaattattttattgcaagtcttgtatttaaatgttaaatcaatatgttgttgcaatttagcttgctttcaagcttcaccccttgcacttaacataagctatttttggcattgtgttatcatcggcttattttatagatcaatatttttatttcccttttttgctgaggaaatgaagataagcaaaaatataaatatatatataaatatatgagttattaaaatcagaagaata

SEQ ID NO: 278426 - DNA, 4661 bp, Artificial Sequence
  derived and/or modified sequence
ttgtactgtatatttacacattcacacacaatcaccctttctaacttctgggactctttgcgcaactgctaggatttctcaagtgcatgtggcaacacagcccagctccgggtggaaaccagcagggctctggaggggctcggagaccaggggagctgtcaaggctgcggcggggaccagagaggagcctggcgggggtggctgggtggctgggggaatccccccaacttcccatcgcaggcgcagctctctcggccgcctatttcctccgaaacccgcgctgcggagcagcccagtgcatagagttcaacacttccccttgttgtggaaagtaaaggagcctcactaccacctttttttctttgcgttttcttactgctggtcctgggagccttttccttcggagcagcagccctgtccggcatctgtcttgagctcccagcaaggaaagtccatcagcttgataatggaggagaacaatgactccacggagaacccccaacaaggccaagggcggcagaatgccatcaagtgtgggtggctgaggaagcaaggaggctttgtcaagacttggcatactcgctggtttgtgctcaagggggatcagctctattatttcaaagatgaagatgaaaccaagcccttgggtactatttttctgcctggaaataaagtttctgagcatccctgcaatgaagagaacccagggaagttcctttttgaagtagttccaggaggcgatcgagatcggatgacagcaaatcatgaaagctacctcctcatggcaagcacccagaatgatatggaagactgggtgaagtcaatccgccgagtcatatggggacctttcggaggaggcatttttggacagaaactggaggatactgttcgttatgagaagagatatgggaaccgtctggctccgatgttggtggagcagtgcgtggactttatccgacaaagggggctgaaagaagagggtctctttcgactgccaggccaggctaatcttgttaaggagctccaagatgcctttgactgtggggagaagccatcatttgacagcaacacagatgtacacacggtggcatcacttcttaagctgtacctccgagaacttccagaaccagttattccttatgcgaagtatgaagattttttgtcatgtgccaaactgctcagcaaggaagaggaagcaggtgttaaggaattagcaaagcaggtgaagagtttgccagtggtaaattacaacctcctcaagtatatttgcagattcttggatgaagtacagtcctactcgggagttaacaaaatgagtgtgcagaacttggcaacggtctttggtcctaatatcctgcgccccaaagtggaagatcctttgactatcatggagggcactgtggtggtccagcagttgatgtcagtgatgattagcaaacatgattgcctctttcccaaagatgcagaactacaaagcaagccccaagatggagtgagcaacaacaatgaaattcagaagaaagccaccatggggcagttacagaacaaggagaacaataacaccaaggacagccctagtaggcagtgctcctgggacaagtctgagtcaccccagagaagcagcatgaacaatggatcccccacagctctatcaggcagcaaaaccaacagcccaaagaacagtgttcacaagctagatgtgtctagaagcccccctctcatggtcaaaaagaacccagcctttaataagggtagtgggatagttaccaatgggtccttcagcagcagtaatgcagaaggtcttgagaaaacccaaaccacccccaatgggagcctacaggccagaaggagctcttcactgaaggtatctggtaccaaaatgggcacgcacagtgtacagaatggaacggtgcgcatgggcattttgaacagcgacacactcgggaaccccacaaatgttcgaaacatgagctggctgccaaatggctatgtgaccctgagggataacaagcagaaagaacaagctggagagttaggccagcacaacagactgtccacctatgataatgtccatcaacagttctccatgatgaaccttgatgacaagcagagcattgacagtgctacctggtccacttcctcctgtgaaatctccctccctgagaactccaactcctgtcgctcttctaccaccacctgcccagagcaagacttttttggggggaactttgaggaccctgttttggatgggcccccgcaggacgacctttcccaccccagggactatgaaagcaaaagtgaccacaggagtgtgggaggtcgaagtagtcgtgccaccagtagcagtgacaacagtgagacatttgtgggcaacagcagcagcaaccacagtgcactgcacagtttagtttccagcctgaaacaggaaatgaccaaacagaagatagagtatgagtccaggataaagagcttagaacagcgaaacttgactttggaaacagaaatgatgagcctccatgatgaactggatcaggagaggaaaaagttcacaatgatagaaataaaaatgcgaaatgccgagcgagcaaaagaagatgccgagaaaagaaatgacatgctacagaaagaaatggagcagtttttttccacgtttggagaactgacagtggaacccaggagaaccgagagaggaaacacaatatggattcagtgagcctgctttcgcctgctgtctctgatggctctggcaaggactccagggattctggtgggatatgacttagaaccaggtggctggtcacctggatgtacagaagtctaactggtgaaggaatatcatttacagacattaaacatccatatctgcaatgtgtaccaaagttatatcatgccccataatgctactgtcaagtgttacaactggatatgtgtatatagagtagtttttcaaaagtaaactaaaaatgagaagcatatttcaagaattattttattgcaagtcttgtatttaaatgttaaatcaatatgttgttgcaatttagcttgctttcaagcttcaccccttgcacttaacataagctatttttggcattgtgttatcatcggcttattttatagatcaatatttttatttcccttttttgctgaggaaatgaagataagcaaaaatataaatatatatataaatatatgagttattaaaatcagaagaatactttgtggctgtgctgtttgtgccaatagactttgtcatgaccaaaaagagaaatgtaaatagttttataaaatacagtcgaatcaccaggaacctttgagctgcttttaaaattcttcccctggcaccactcagttttgcttttgcgaggcgatttgacataggaactttgagactccatgagaaagtccctttctgaggcccactgtctaccttgccagatcctcagtgcgtatcgccaatgcaggatgctccttagaaaagaaaaaatggtaaagaatggcatttaacgattcaggctttgaattactctgtccctctggaccgaatctctttaactgctggatagttttagaggaattctcctgctacttaggtactgggaaacaatgcttgctaaaccatgcccacgtgagcacctgtctcccactcaaacctctcccatctcccaacaactgcactttagaataccagcagtgaaatggtattactgtttccctctgagtgaaactgctagagtatatgtcacgtagtgacatttttttctcactcaggctattgccatctgggattctctccctactacagctggcaaagttggtttgcagcaagaagatagtgggagggggccaggctgcaggagaaggagaaaagtttagaagaaacaaaccattttgcttctaattttgacagtatcactttcctgttaaaacatacaataattttaaaaggtgaatgcctaaagttccaattttagcaaatatgggaacctcagcaatgctaattttctagaaaaacccagggctctttggagctagagttttgggagaacagttcttcacaataaggcaatggttttgagaggccaggcaaataatctttctcaccgtagaacaaaaagttacaaaaggcataatcggaaatagagactacatacttgagtttatggggtttgtgttgtttgaaggttcaatgcttgcatgtgtttatttattttcaagagggaaagtggtctgtactgctttcatccttgccactgtcttgcttttattttttactctcccactgagcaagcgtctgtggtcctatggtatcaaccagtatctttatagcaataatttctttaattcccttttctctctctttccaattatttaaccagttacttccacctggacatacgataggaaattcaaactcaaaatatgaaaattgatcttaataactctcccttcatatcttttcacctatttccagtccttatcatagttgataaaaacctcagactcatccagaaagctatatgatgcactagtaaaaaaaacaaagatattcaaactgcttgggttcaaatggtatacaatttgccagctgttactgaaccttctatgcataactttttttttcctctgtgcaattggaataataaaaatactactcccataga

SEQ ID NO: 278427 - DNA, 1273 bp, Artificial Sequence
  derived and/or modified sequence
gggctctggaggggctcggagaccaggggagctgtcaaggctgcggcggggaccagagaggagcctggcgggggtggctgggtggctgggggaatccccccaacttcccatcgcaggcgcagctctctcggccgcctatttcctccgaaacccgcgctgcggagcagcccagtgcatagagttcaacacttccccttgttgtggaaagtaaaggagcctcactaccacctttttttctttgcgttttcttactgctggtcctgggagccttttccttcggagcagcagccctgtccggcatctgtcttgagctcccagcaaggaaagtccatcagcttgataatggaggagaacaatgactccacggagaacccccaacaaggccaagggcggcagaatgccatcaagtgtgggtggctgaggaagcaaggaggctttgtcaagacttggcatactcgctggtttgtgctcaagggggatcagctctattatttcaaagatgaagatgaaaccaagcccttgggtactatttttctgcctggaaataaagtttctgagcatccctgcaatgaagagaacccagggaagttcctttttgaagtagttccaggaggcgatcgagatcggatgacagcaaatcatgaaagctacctcctcatggcaagcacccagaatgatatggaagactgggtgaagtcaatccgccgagtcatatggggacctttcggaggaggcatttttggacagaaactggaggatactgttcgttatgagaagagatatgggaaccgtctggctccgatgttggtggagcagtgcgtggactttatccgacaaagggggctgaaagaagagggtctctttcgactgccaggccaggctaatcttgttaaggagctccaagatgcctttgactgtggggagaagccatcatttgacagcaacacagatgtacacacggtggcatcacttcttaagctgtacctccgagaacttccagaaccagttattccttatgcgaagtatgaagattttttgtcatgtgccaaactgctcagcaaggaagaggaagcagtaagttgatgcatttatttccaaataagcttttgtttggaatttttttctgtgttcttagtcttaaatctgtaaatttccattgccctatcccggtgttactctccactatcctttgaattgacctcacacacactgagactttccgtatacagctcaagcaccatttccgatcccctctctgatcaaaaaaaaagaa

SEQ ID NO: 278428 - DNA, 567 bp, Artificial Sequence
  derived and/or modified sequence
ataactcattaggcttgaatgagatgctttgaactgtggtgactacagtaatgttcccctctgcatgttgaagtgacaagtgcctccttggcctattgctgatcctgcctgctgtagaaatctccagctgtccaatatttggaagaaaactggctgtgcgtgtagtagagatgctctctctttgtgaagaaggccctgcatacattaaacaagtccggtactatttttctgcctggaaataaagtttctgagcatccctgcaatgaagagaacccagggaagttcctttttgaagtagttccaggaggcgatcgagatcggatgacagcaaatcatgaaagctacctcctcatggcaagcacccagaatgatatggaagactgggtgaagtcaatccgccgagtcatatggggacctttcggaggaggcatttttggacagaaactggaggatactgttcgttatgagaagagatatgggaaccgtctggctccgatgttggtggagcagtgcgtggactttatccgacaaagggggctgaaagaagagggtctctttcgactgcca

SEQ ID NO: 278429 - DNA, 2247 bp, Artificial Sequence
  derived and/or modified sequence
atggaggagaacaacgacagcaccgagaacccccagcagggccagggcagacagaacgccatcaagtgcggctggctgagaaagcagggcggcttcgtgaagacctggcacaccagatggttcgtgctgaagggcgaccagctgtactacttcaaggacgaggacgagaccaagcccctgggcaccatcttcctgcccggcaacaaggtgagcgagcacccctgcaacgaggagaaccccggcaagttcctgttcgaggtggtgcccggcggcgacagagacagaatgaccgccaaccacgagagctacctgctgatggccagcacccagaacgacatggaggactgggtgaagagcatcagaagagtgatctggggccccttcggcggcggcatcttcggccagaagctggaggacaccgtgagatacgagaagagatacggcaacagactggcccccatgctggtggagcagtgcgtggacttcatcagacagagaggcctgaaggaggagggcctgttcagactgcccggccaggccaacctggtgaaggagctgcaggacgccttcgactgcggcgagaagcccagcttcgacagcaacaccgacgtgcacaccgtggccagcctgctgaagctgtacctgagagagctgcccgagcccgtgatcccctacgccaagtacgaggacttcctgagctgcgccaagctgctgagcaaggaggaggaggccggcgtgaaggagctggccaagcaggtgaagagcctgcccgtggtgaactacaacctgctgaagtacatctgcagattcctggacgaggtgcagagctacagcggcgtgaacaagatgagcgtgcagaacctggccaccgtgttcggccccaacatcctgagacccaaggtggaggaccccctgaccatcatggagggcaccgtggtggtgcagcagctgatgagcgtgatgatcagcaagcacgactgcctgttccccaaggacgccgagctgcagagcaagccccaggacggcgtgagcaacaacaacgagatccagaagaaggccaccatgggccagctgcagaacaaggagaacaacaacaccaaggacagccccagcagacagtgcagctgggacaagagcgagagcccccagagaagcagcatgaacaacggcagccccaccgccctgagcggcagcaagaccaacagccccaagaacagcgtgcacaagctggacgtgagcagaagcccccccctgatggtgaagaagaaccccgccttcaacaagggcagcggcatcgtgaccaacggcagcttcagcagcagcaacgccgagggcctggagaagacccagaccacccccaacggcagcctgcaggccagaagaagcagcagcctgaaggtgagcggcaccaagatgggcacccacagcgtgcagaacggcaccgtgagaatgggcatcctgaacagcgacaccctgggcaaccccaccaacgtgagaaacatgagctggctgcccaacggctacgtgaccctgagagacaacaagcagaaggagcaggccggcgagctgggccagcacaacagactgagcacctacgacaacgtgcaccagcagttcagcatgatgaacctggacgacaagcagagcatcgacagcgccacctggagcaccagcagctgcgagatcagcctgcccgagaacagcaacagctgcagaagcagcaccaccacctgccccgagcaggacttcttcggcggcaacttcgaggaccccgtgctggacggccccccccaggacgacctgagccaccccagagactacgagagcaagagcgaccacagaagcgtgggcggcagaagcagcagagccaccagcagcagcgacaacagcgagaccttcgtgggcaacagcagcagcaaccacagcgccctgcacagcctggtgagcagcctgaagcaggagatgaccaagcagaagatcgagtacgagagcagaatcaagagcctggagcagagaaacctgaccctggagaccgagatgatgagcctgcacgacgagctggaccaggagagaaagaagttcaccatgatcgagatcaagatgagaaacgccgagagagccaaggaggacgccgagaagagaaacgacatgctgcagaaggagatggagcagttcttcagcaccttcggcgagctgaccgtggagcccagaagaaccgagagaggcaacaccatctggatccagtag

SEQ ID NO: 278430 - DNA, 741 bp, Artificial Sequence
  derived and/or modified sequence
atggaggagaacaacgacagcaccgagaacccccagcagggccagggcagacagaacgccatcaagtgcggctggctgagaaagcagggcggcttcgtgaagacctggcacaccagatggttcgtgctgaagggcgaccagctgtactacttcaaggacgaggacgagaccaagcccctgggcaccatcttcctgcccggcaacaaggtgagcgagcacccctgcaacgaggagaaccccggcaagttcctgttcgaggtggtgcccggcggcgacagagacagaatgaccgccaaccacgagagctacctgctgatggccagcacccagaacgacatggaggactgggtgaagagcatcagaagagtgatctggggccccttcggcggcggcatcttcggccagaagctggaggacaccgtgagatacgagaagagatacggcaacagactggcccccatgctggtggagcagtgcgtggacttcatcagacagagaggcctgaaggaggagggcctgttcagactgcccggccaggccaacctggtgaaggagctgcaggacgccttcgactgcggcgagaagcccagcttcgacagcaacaccgacgtgcacaccgtggccagcctgctgaagctgtacctgagagagctgcccgagcccgtgatcccctacgccaagtacgaggacttcctgagctgcgccaagctgctgagcaaggaggaggaggccgtgagctag

SEQ ID NO: 278431 - protein, 840 aa, Artificial Sequence
  derived and/or modified sequence
MDKALKEVFDYSYRDYILSWYGNLSRDEGQLYHLLLEDFWEIARQLHHRLSHVDVVKVVCNDVVRTLLTHFCDLKAANARHEEQPRPFVLHACLRNSDDEVRFLQTCSRVLVFCLLPSKDVQSLSLRIMLAEILTTKVLKPVVELLSNPDYINQMLLAQLAYREQMNEHHKRAYTYAPSYEDFIKLINSNSDVEFLKQLRYQIVVEIIQATTISSFPQLKRHKGKETAAMKADLLRARNMKRYINQLTVAKKQCEKRIRILGGPAYDQQEDGALDEGEGPQSQKILQFEDILANTFYREHFGMYMERMDKRALISFWESVEHLKNANKNEIPQLVGEIYQNFFVESKEISVEKSLYKEIQQCLVGNKGIEVFYKIQEDVYETLKDRYYPSFIVSDLYEKLLIKEEEKHASQMISNKDEMGPRDEAGEEAVDDGTNQINEQASFAVNKLRELNEKLEYKRQALNSIQNAPKPDKKIVSKLKDEIILIEKERTDLQLHMARTDWWCENLGMWKASITSGEVTEENGEQLPCYFVMVSLQEVGGVETKNWTVPRRLSEFQNLHRKLSECVPSLKKVQLPSLSKLPFKSIDQKFMEKSKNQLNKFLQNLLSDERLCQSEALYAFLSPSPDYLKVIDVQGKKNSFSLSSFLERLPRDFFSHQEEETEEDSDLSDYGDDVDGRKDALAEPCFMLIGEIFELRGMFKWVRRTLIALVQVTFGRTINKQIRDTVSWIFSEQMLVYYINIFRDAFWPNGKLAPPTTIRSKEQSQETKQRAQQKLLENIPDMLQSLVGQQNARHGIIKIFNALQETRANKHLLYALMELLLIELCPELRVHLDQLKAGQV

SEQ ID NO: 278432 - DNA, 3264 bp, Artificial Sequence
  derived and/or modified sequence
gcggggctgagctccgtcctgttcaggctcagcctgtacctgagctgcgcggcggccgccttcctgctggggatcctgtttgccctcgtctgccggagcccgcgcgcccagccgcccgacttcgccgccgcctggagccggctggccgcgacctcagccgcccgccgcccgccggggagtcctgtgtatggaaactcacatgagtcagctcagtctagaagggtagtaatttctcataatatggataaagctctgaaagaagtgttcgactacagttatagagattacattctgtcctggtatggaaacctcagcagagatgagggacaactttaccatctgctcttggaagacttttgggaaattgccagacagctgcaccacagactgagtcacgtggatgtggttaaagttgtctgcaatgatgttgtgaggactttactcactcatttctgtgacctgaaagctgccaatgccagacatgaagaacagccaagaccttttgtgttgcacgcatgcttgaggaactcagatgatgaagtaagatttctacaaacgtgttctcgggttctggtgttttgtctcctcccctcaaaggatgtgcagtctctcagcttacgtataatgcttgcagaaattctcacaacaaaagtcttgaagccggtagtggagttactgagtaatccagattacattaaccaaatgctgcttgcccagctggcgtacagagagcaaatgaatgagcatcacaagagagcctacacctatgccccctcttacgaggacttcatcaagctcattaacagcaactctgatgtggagttcttgaagcaactaaggtatcaaattgtagtggaaataatccaggcgactacaattagcagctttccccaactgaagaggcacaaaggtaaagaaactgcggcaatgaaagctgatctcctgagggccaggaacatgaagaggtacatcaaccaactgactgtggcaaagaagcagtgtgagaagagaatccgaatcctgggaggccctgcctatgaccagcaagaggatggggccctggatgagggggaagggcctcaaagccagaagattcttcagtttgaagatatcttggccaatacgttctaccgagagcactttggaatgtacatggaaaggatggacaaaagagctctgattagtttttgggaatctgtggaacatttaaagaatgctaacaagaatgaaattccacaattagttggtgaaatttatcagaatttctttgtggagagcaaagaaatatctgtggaaaaatcactttacaaagaaattcagcagtgtcttgtaggaaataaaggtattgaagtattctacaaaatccaggaagatgtttatgagaccctaaaggataggtattacccttcatttattgtcagtgacctgtatgagaaattgttgataaaagaggaagaaaaacatgcctcacagatgatttccaacaaggatgagatgggcccaagagatgaggctggtgaggaagccgtggatgatggtaccaatcagatcaatgaacaagccagttttgctgtaaacaaactgcgagaactaaatgagaaacttgaatataaaaggcaagctctaaattctattcaaaatgcaccaaaacctgacaagaagattgtttccaagttgaaggatgaaataatcctaatagagaaagaacgcacagaccttcagctgcacatggcaagaacggattggtggtgtgaaaaccttggcatgtggaaagcctccatcaccagtggagaggttacagaagagaatggtgagcaattgccatgttactttgtcatggtaagcctacaagaagttggaggagttgaaactaagaactggacggtccccagaaggctcagcgagtttcagaatttacaccggaaactcagtgagtgcgtcccttctttaaaaaaagtccagttgccttctcttagcaagctgcctttcaaatctatagatcaaaagtttatggaaaagtcgaagaatcaattaaataagtttttacagaatctgctttcagatgaaagactgtgtcagagtgaagcactttatgccttcttgagcccttctcctgactacctcaaggttatcgacgtgcaggggaaaaaaaattctttttcattatcctcatttttggaaagacttcctcgcgacttcttctcccaccaggaggaggagacagaggaggacagtgacctgtcagattatggtgatgatgtggatgggaggaaagacgccttggctgaaccatgtttcatgttgattggggagatttttgaacttcgaggaatgtttaaatgggtgagaagaacattaattgccctcgttcaggtcacttttggaagaaccatcaacaaacaaatccgggacacagtcagctggattttcagtgagcaaatgttggtttactacatcaatattttccgggatgctttttggccaaatgggaagttggcaccaccgaccacaatcagaagcaaagagcaaagtcaggaaacaaaacagagagcacagcaaaagctgcttgaaaacattccagatatgcttcagagccttgttggacagcaaaatgcccgccacggtataataaaaatattcaatgcactgcaagaaacaagagccaacaagcatctgttatatgcgctgatggaactgctgctaattgaactgtgtcctgagctgagagttcatttagatcaacttaaagctggccaagtttgagactacacaaataaaccaccagaaaaatgtctgtgtaataatagacatgaaacattttcctcttttccacagagggcttaactgagaaccgtattgatttttattttagttacctccctctagttttatgtgaaattagtagaatcagggaggacgggacttatgctgtggtaggcaacagaaaaaaacttctattgattttaatttaatatgaatactttaaagatcaacataccgattgaaatacaaatgttaatatgtgagaacctaggaagtattttaaatatttatgaaaatattttgttttaaaatgaactatgaatattgtacagttaatttcctcactgaggactgtgaacattcttatattatttcatgtatattgaagaacattgttatgcaatgctttgtgtaaagttattgtgaagattttattgtctttatttttaccaaagatttcccatagtttgagcattcaaagcaataaaatataaaaatgaa

SEQ ID NO: 278433 - DNA, 3323 bp, Artificial Sequence
  derived and/or modified sequence
ctgctcccggctgcctagggcggcgcgggtaggccccgttgttctcgtgcgttaatagggaaagctgccttgattatcttgtaattctctaccaaaccaagaataaaaaagaacggcggctgtgtgtttgtgatattttctatcagcaaatttcagttcataccactagttagttctgtggaccagaggctggtttcagaatggaaagacctttgccgagtggtaaacgagagtcctgtgtatggaaactcacatgagtcagctcagtctagaagggtagtaatttctcataatatggataaagctctgaaagaagtgttcgactacagttatagagattacattctgtcctggtatggaaacctcagcagagatgagggacaactttaccatctgctcttggaagacttttgggaaattgccagacagctgcaccacagactgagtcacgtggatgtggttaaagttgtctgcaatgatgttgtgaggactttactcactcatttctgtgacctgaaagctgccaatgccagacatgaagaacagccaagaccttttgtgttgcacgcatgcttgaggaactcagatgatgaagtaagatttctacaaacgtgttctcgggttctggtgttttgtctcctcccctcaaaggatgtgcagtctctcagcttacgtataatgcttgcagaaattctcacaacaaaagtcttgaagccggtagtggagttactgagtaatccagattacattaaccaaatgctgcttgcccagctggcgtacagagagcaaatgaatgagcatcacaagagagcctacacctatgccccctcttacgaggacttcatcaagctcattaacagcaactctgatgtggagttcttgaagcaactaaggtatcaaattgtagtggaaataatccaggcgactacaattagcagctttccccaactgaagaggcacaaaggtaaagaaactgcggcaatgaaagctgatctcctgagggccaggaacatgaagaggtacatcaaccaactgactgtggcaaagaagcagtgtgagaagagaatccgaatcctgggaggccctgcctatgaccagcaagaggatggggccctggatgagggggaagggcctcaaagccagaagattcttcagtttgaagatatcttggccaatacgttctaccgagagcactttggaatgtacatggaaaggatggacaaaagagctctgattagtttttgggaatctgtggaacatttaaagaatgctaacaagaatgaaattccacaattagttggtgaaatttatcagaatttctttgtggagagcaaagaaatatctgtggaaaaatcactttacaaagaaattcagcagtgtcttgtaggaaataaaggtattgaagtattctacaaaatccaggaagatgtttatgagaccctaaaggataggtattacccttcatttattgtcagtgacctgtatgagaaattgttgataaaagaggaagaaaaacatgcctcacagatgatttccaacaaggatgagatgggcccaagagatgaggctggtgaggaagccgtggatgatggtaccaatcagatcaatgaacaagccagttttgctgtaaacaaactgcgagaactaaatgagaaacttgaatataaaaggcaagctctaaattctattcaaaatgcaccaaaacctgacaagaagattgtttccaagttgaaggatgaaataatcctaatagagaaagaacgcacagaccttcagctgcacatggcaagaacggattggtggtgtgaaaaccttggcatgtggaaagcctccatcaccagtggagaggttacagaagagaatggtgagcaattgccatgttactttgtcatggtaagcctacaagaagttggaggagttgaaactaagaactggacggtccccagaaggctcagcgagtttcagaatttacaccggaaactcagtgagtgcgtcccttctttaaaaaaagtccagttgccttctcttagcaagctgcctttcaaatctatagatcaaaagtttatggaaaagtcgaagaatcaattaaataagtttttacagaatctgctttcagatgaaagactgtgtcagagtgaagcactttatgccttcttgagcccttctcctgactacctcaaggttatcgacgtgcaggggaaaaaaaattctttttcattatcctcatttttggaaagacttcctcgcgacttcttctcccaccaggaggaggagacagaggaggacagtgacctgtcagattatggtgatgatgtggatgggaggaaagacgccttggctgaaccatgtttcatgttgattggggagatttttgaacttcgaggaatgtttaaatgggtgagaagaacattaattgccctcgttcaggtcacttttggaagaaccatcaacaaacaaatccgggacacagtcagctggattttcagtgagcaaatgttggtttactacatcaatattttccgggatgctttttggccaaatgggaagttggcaccaccgaccacaatcagaagcaaagagcaaagtcaggaaacaaaacagagagcacagcaaaagctgcttgaaaacattccagatatgcttcagagccttgttggacagcaaaatgcccgccacggtataataaaaatattcaatgcactgcaagaaacaagagccaacaagcatctgttatatgcgctgatggaactgctgctaattgaactgtgtcctgagctgagagttcatttagatcaacttaaagctggccaagtttgagactacacaaataaaccaccagaaaaatgtctgtgtaataatagacatgaaacattttcctcttttccacagagggcttaactgagaaccgtattgatttttattttagttacctccctctagttttatgtgaaattagtagaatcagggaggacgggacttatgctgtggtaggcaacagaaaaaaacttctattgattttaatttaatatgaatactttaaagatcaacataccgattgaaatacaaatgttaatatgtgagaacctaggaagtattttaaatatttatgaaaatattttgttttaaaatgaactatgaatattgtacagttaatttcctcactgaggactgtgaacattcttatattatttcatgtatattgaagaacattgttatgcaatgctttgtgtaaagttattgtgaagattttattgtctttatttttaccaaagatttcccatagtttgagcattcaaagcaataaaatataaaaatgaatcaca

SEQ ID NO: 278434 - DNA, 1083 bp, Artificial Sequence
  derived and/or modified sequence
atggatgacgttgaggtggtttacaccatcgatattcaaaagtatatcccatgctatcaactcttttcattttacaactctagtggcgaggtgaacgagcaagccttgaagaagattctttccaacgtgaagaaaaacgttgttgggtggtataaattcaggcgccactctgatcagattatgacctttcgggaacggttgcttcacaaaaatctccaggagcatttctccaaccaggaccttgtatttctgctgctgacccctagcatcattacggagagctgttccacacaccgattagaacattcgctgtacaaacctcagaaaggcttgttccatcgcgtgcctcttgtggtagcaaacctgggcatgtcggaacagctaggttacaagacggtcagcggatcttgcatgtctaccggcttctcaagagctgtgcaaacccactcatctaagttcttcgaagaggacggttcgctgaaggaagtgcacaagataaatgagatgtacgcctccctgcaggaggagcttaagtccatctgtaaaaaggtcgaagattctgagcaggcagtggacaagctcgtaaaggatgtgaacaggctgaagcgggagatagaaaagaggcggggagcacaaattcaggcagccagagaaaagaacatacaaaaggacccccaagaaaacatttttctatgtcaggccttgagaaccttcttccctaactctgagttccttcactcctgcgtgatgtcgttgaagaatcggcacgtttcaaaatcctcctgcaattacaatcaccatttagacgtggtggataacttaaccctgatggtggagcatacagacatccctgaagcgtctcctgcatcaactccacagatcatcaagcacaaggctcttgacttagatgaccgctggcagttcaagaggtcccgccttctggatacacaggataagcgttcaaaggccgataccggatcttcaaatcaggataaggcaagcaaaatgagttcacccgaaacggatgaggagatagagaagatgaaggggtttggtgaatactcacggagcccgaccttctag

SEQ ID NO: 278435 - DNA, 333 bp, Artificial Sequence
  derived and/or modified sequence
atggacgatgttgaagtggtttacactattgatatacagaaatacatcccatgttaccagctgttcagtttctataatagctcgggcgaggtgaacgaacaagccttgaagaagatactgtccaacgtgaagaagaacgttgtagggtggtataagttccgcagacacagcgaccagataatgacctttcgggaacgactgctccataaaaatctccaggaacatttttcaaatcaggatttagtttttttgctattaaccccaagcatcataactgagtcgtgtagtactcaccgccttgagcacagcttgtacaaaccccaaaagggctag

SEQ ID NO: 278436 - DNA, 1083 bp, Artificial Sequence
  derived and/or modified sequence
atggatgatgtggaggtggtgtacaccatcgacatccagaagtacatcccctgctaccagctgttctccttctacaacagcagcggggaggtgaatgagcaggccctgaagaagatcctgagcaatgtgaagaagaatgtggtgggctggtacaagttccgccgccacagcgaccagatcatgaccttccgggagcggctgctgcacaagaacctgcaggagcacttcagcaaccaggacctggtgttcctgctgctgacccccagcatcatcacagagagctgcagcacccaccggctggagcacagcctgtacaagccccagaagggcctcttccaccgggtgcccctggtggtggccaacctgggcatgtctgagcagctgggctacaagacagtgtctggcagctgcatgagcacaggcttcagcagagctgtgcagacccacagcagcaagttctttgaggaggatggcagcctgaaggaggtgcacaagatcaatgagatgtatgccagcctgcaggaggagctgaagagcatctgcaagaaggtggaggacagcgagcaggccgtggacaagctggtgaaggatgtgaaccggctgaagcgggagattgagaagagaagaggagcccagatccaggccgcccgggagaagaacatccagaaggacccccaggagaacatcttcctgtgccaggccctgcggaccttcttccccaacagcgagttcctgcacagctgtgtgatgagcctgaagaacagacatgtgtccaagagcagctgcaactacaaccaccacctggatgtggtggacaacctgaccctgatggtggagcacacagacatccctgaggccagccctgccagcaccccccagatcatcaagcacaaggccctggacctggatgaccgctggcagttcaagaggagccggctgctggacacccaggacaagaggagcaaggctgacaccggcagcagcaaccaggacaaggccagcaagatgagcagccctgagacagatgaggagattgagaagatgaagggctttggagagtacagccgcagccccaccttctag

SEQ ID NO: 278437 - DNA, 333 bp, Artificial Sequence
  derived and/or modified sequence
atggatgatgtggaggtggtgtacaccatcgacatccagaagtacatcccctgctaccagctgttctccttctacaacagcagcggggaggtgaatgagcaggccctgaagaagatcctgagcaatgtgaagaagaatgtggtgggctggtacaagttccgccgccacagcgaccagatcatgaccttccgggagcggctgctgcacaagaacctgcaggagcacttcagcaaccaggacctggtgttcctgctgctgacccccagcatcatcacagagagctgcagcacccaccggctggagcacagcctgtacaagccccagaagggctag

SEQ ID NO: 278438 - DNA, 1083 bp, Artificial Sequence
  derived and/or modified sequence
atggacgacgtggaggtggtgtacaccatcgacatccagaagtacatcccgtgttatcagctgttctcattttacaattcctcgggggaagtcaacgaacaggccctgaaaaagatccttagtaacgttaaaaagaacgtcgtaggatggtacaagtttaggcggcacagtgatcaaattatgaccttcagagagcggctgctgcacaaaaacctacaagaacacttcagtaaccaggatctggtctttttgcttcttactccatccattatcaccgagagttgttctacccaccgactggagcattccctgtataagccacagaaggggctttttcaccgggttccccttgtagtggcaaatctcggcatgtcagaacagcttggctataagactgtgagcggaagctgcatgtcaacggggttttcacgagccgtccagacacatagtagcaaattttttgaagaagatggatcacttaaagaagtgcacaagattaatgagatgtacgcgagccttcaggaagagctgaagtccatctgtaagaaagtggaggatagcgagcaagccgtcgacaagttagtgaaggatgttaacaggctcaaacgagaaattgaaaagcggcgaggtgcacagatacaggctgctagagaaaagaatattcaaaaggatccccaggaaaatatctttctctgtcaggctttacgaaccttcttccctaactctgaattcctgcacagctgtgtcatgagtcttaagaataggcacgtctcgaaatcatcttgcaattataatcatcaccttgacgtggtggacaacttaacgctgatggtggagcataccgacataccagaggcttccccagcttccaccccccagattattaagcacaaagctttggacttggacgacaggtggcaatttaagagaagcaggctgctggacacacaggacaaaagaagcaaagcagatactggaagttctaaccaagataaagcatctaaaatgagttcaccagagaccgacgaggaaattgagaagatgaaagggtttggcgaatatagcagatcgcctacgttttag

SEQ ID NO: 278439 - DNA, 333 bp, Artificial Sequence
  derived and/or modified sequence
atggacgacgtggaggtggtgtacaccatcgacatccagaagtacatcccttgctaccagctgtttagtttttacaactcgagcggtgaggtgaatgaacaagccctgaagaaaatcctcagcaatgtgaaaaaaaatgtcgtggggtggtacaagttcaggcgccactcggatcagatcatgacttttagagagcgcttactccacaagaatctgcaggaacacttcagtaatcaggacttagtgttcttacttttgacaccttcgattattacagagtcatgctccacccaccgcctggagcactccctatacaaaccacaaaagggctag

SEQ ID NO: 278440 - DNA, 1083 bp, Artificial Sequence
  derived and/or modified sequence
atggacgatgttgaagtcgtctacaccatcgatattcagaagtatattccctgctatcaactctttagcttctacaactcttcaggggaggtgaacgaacaggctctgaaaaagatcttgagtaatgtgaaaaagaacgtcgtggggtggtacaagttcaggagacattccgatcagatcatgacattcagggagaggctgctgcacaaaaatttacaagagcactttagcaatcaggacctggtgttcctactcctgacacctagcatcattacagagtcatgcagcacccacagattagaacatagtttgtacaaaccacagaagggcttgttccaccgcgtccccctcgtcgtggccaacctcggcatgtccgagcagctcggatataagacagtaagcggttcctgcatgtccacaggattctcgcgcgctgtacagacgcactcctcaaagttcttcgaggaagacggctcactcaaagaggttcataagattaatgaaatgtacgctagcctgcaggaggaactgaaatccatctgcaagaaagtggaggacagcgaacaagctgtcgacaagctcgtgaaggacgtcaatcgtcttaaacgcgagattgaaaagcgaaggggcgcacagattcaagccgctcgtgagaagaacattcaaaaggacccacaggagaatattttcttgtgtcaagctctccgaacattcttccccaactccgagtttctccactcttgtgtcatgtcgttgaagaaccgacacgtctcaaaatcatcttgcaattacaatcaccatctggacgtggtggataaccttaccttgatggtggagcataccgacatccctgaggcctcgcctgcgtcgaccccccaaattatcaaacataaagcactcgatctcgacgacagatggcagtttaaacgaagcagactgctggacacccaagataagagaagcaaagccgacacaggctcttccaaccaggataaggcgagcaaaatgagtagccctgaaaccgacgaagagatagagaagatgaaaggatttggggagtacagccggagcccgactttctag

SEQ ID NO: 278441 - DNA, 333 bp, Artificial Sequence
  derived and/or modified sequence
atggacgacgtagaagtggtgtatactatcgacattcagaagtacattccatgctaccagcttttcagcttctacaactcttccggagaggtgaacgaacaggcccttaagaagatactatccaacgtgaagaagaacgtcgtgggttggtacaagttccgtagacacagtgatcagatcatgaccttccgggagcgcctcttgcacaagaacctccaagaacacttcagcaaccaagatttggttttcctcttgctcacgccaagcatcatcaccgagagctgttcaacacaccgactagaacattctctctataagcctcaaaagggctag

SEQ ID NO: 278442 - DNA, 1083 bp, Artificial Sequence
  derived and/or modified sequence
atggacgacgtggaggtggtgtacaccatcgacatccagaagtacatcccctgctaccagctgttcagcttctacaacagcagcggcgaggtgaacgagcaggccctgaagaagatcctgagcaacgtgaagaagaacgtggtgggctggtacaagttcagaagacacagcgaccagatcatgaccttcagagagagactgctgcacaagaacctgcaggagcacttcagcaaccaggacctggtgttcctgctgctgacccccagcatcatcaccgagagctgcagcacccacagactggagcacagcctgtacaagccccagaagggcctgttccacagagtgcccctggtggtggccaacctgggcatgagcgagcagctgggctacaagaccgtgagcggcagctgcatgagcaccggcttcagcagagccgtgcagacccacagcagcaagttcttcgaggaggacggcagcctgaaggaggtgcacaagatcaacgagatgtacgccagcctgcaggaggagctgaagagcatctgcaagaaggtggaggacagcgagcaggccgtggacaagctggtgaaggacgtgaacagactgaagagagagatcgagaagagaagaggcgcccagatccaggccgccagagagaagaacatccagaaggacccccaggagaacatcttcctgtgccaggccctgagaaccttcttccccaacagcgagttcctgcacagctgcgtgatgagcctgaagaacagacacgtgagcaagagcagctgcaactacaaccaccacctggacgtggtggacaacctgaccctgatggtggagcacaccgacatccccgaggccagccccgccagcaccccccagatcatcaagcacaaggccctggacctggacgacagatggcagttcaagagaagcagactgctggacacccaggacaagagaagcaaggccgacaccggcagcagcaaccaggacaaggccagcaagatgagcagccccgagaccgacgaggagatcgagaagatgaagggcttcggcgagtacagcagaagccccaccttctag

SEQ ID NO: 278443 - DNA, 333 bp, Artificial Sequence
  derived and/or modified sequence
atggacgacgtggaggtggtgtacaccatcgacatccagaagtacatcccctgctaccagctgttcagcttctacaacagcagcggcgaggtgaacgagcaggccctgaagaagatcctgagcaacgtgaagaagaacgtggtgggctggtacaagttcagaagacacagcgaccagatcatgaccttcagagagagactgctgcacaagaacctgcaggagcacttcagcaaccaggacctggtgttcctgctgctgacccccagcatcatcaccgagagctgcagcacccacagactggagcacagcctgtacaagccccagaagggctag

SEQ ID NO: 278444 - protein, 5005 aa, Artificial Sequence
  derived and/or modified sequence
MDQRKNESIVPSITQLEDFLTEHNSNVVWLLVATILSCGWIIYLTYYNSRNVGLILTLVLNRLYKHGYIHIGSFSFSVLSGKVMVREIYYITEDMSIRIQDGFIIFRWWKMYNPKQKQHDPKAETRLYITVNDFEFHVYNRSDLYGRLQELFGLEPTIIPPKKDDDKTREIGRTRTQSKIERVKVKTESQDPTSSWRSLIPVIKVNVSTGRLAFGNHYQPQTLCINFDDAFLTYTTKPPSSHLDQFMHIVKGKLENVRVMLVPSPRYVGLQNDEPPRLMGEGFVVMQSNDVDIYYYMDEPGLVPEETEENIEGEMSSEDCKLQDLPPCWGLDIVCGKGTDFNYGPWADRQRDCLWKFFFPPDYQVLKVSEIAQPGRPRQILAFELRMNIIADATIDLLFTKNRETNAVHVNVGAGSYLEINIPMTVEENGYTPAIKGQLLHVDATTSMQYRTLLEAEMLAFHINASYPRIWNMPQTWQCELEVYKATYHFIFAQKNFFTDLIQDWSSDSPPDIFSFVPYTWNFKIMFHQFEMIWAANQHNWIDCSTKQQENVYLAACGETLNIDFSLPFTDFVPATCNTKFSLRGEDVDLHLFLPDCHPSKYSLFMLVKNCHPNKMIHDTGIPAECQSGQKTVKPKWRNVTQEKSGWVECWTVPSVMLTIDYTWHPIYPQKADEQLKQSLSEMEETMLSVLRPSQKTSDRVVSSPSTSSRPPIDPSELPPDKLHVEMELSPDSQITLYGPLLNAFLCIKENYFGEDDMYMDFEEVISSPVLSLSTSSSSGWTAVGMENDKKENEGSAKSIHPLALRPWDITVLVNLYKVHGRLPVHGTTDGPECPTAFLERLCFEMKKGFRETMLQLILSPLNVFVSDNYQQRPPVDEVLREGHINLSGLQLRAHAMFSAEGLPLGSDSLEYAWLIDVQAGSLTAKVTAPQLACLLEWGQTFVFHVVCREYELERPKSVIICQHGIDRRFCESKLSCIPGPCPTSDDLKYTMIRLAVDGADIYIVEHGCATNIKMGAIRVANCNLHNQSVGEGISAAIQDFQVRQYIEQLNNCRIGLQPAVLRRAYWLEAGSANLGLITVDIALAADHHSKHEAQRHFLETHDARTKRLWFLWPDDILKNKRCRNKCGCLGGCRFFGGTVTGLDFFKLEELTPSSSSAFSSTSAESDMYYGQSLLQPGEWIITKEIPKIIDGNVNGMKRKEWENKSVGIEVERKTQHLSLQVPLRSHSSSSSSEENSSSSAAQPLLAGEKESPSSVADDHLVQKEFLHGTKRDDGQASIPTEISGNSPVSPNTQDKSVGQSPLRSPLKRQASVCSTRLGSTKSLTAAFYGDKQPVTVGVQFSSDVSRSDENVLDSPKQRRSFGSFPYTPSADSNSFHQYRSMDSSMSMADSEAYFSAAEEFEPISSDEGPGTYPGRKKKKKQTQQIDYSRGSIYHSVEGPLTGHGESIQDSRTLPFKTHPSQASFVSALGGEDDVIEHLYIVEGEKTVESEQITPQQPVMNCYQTYLTQFQVINWSVKHPTNKRTSKSSLHRPLDLDTPTSEESSSSFEQLSVPTFKVIKQGLTANSLLDRGMQLSGSTSNTPYTPLEKKLADNTDDETLTEEWTLDQPVSQTRTTAIVEVKGTVDIVLTPLVAEALDRYIEAMVHCASTRHPAAIVDDLHAKVLREAVQNSKTTFSENLSSKQDIRGTKTEQSTIGTTNQGQAQTNLTMKQDNVTIKGLQTNVSIPKVNLCLLQASVEESPTTAPSRSVTHVSLVALCFDRIATQVRMNRGVVEETSNNAEPGRTSNFDRYVHATKMQPQSSGSLRSNAGAEKGKEIAAKLNIHRVHGQLRGLDTTDIGTCAITAIPFEKSKVLFTLEELDEFTFVDETDQQAVPDVTRIGPSQEKWGWIMFECGLENLTIKGGRQSGAVLYNSFGIMGKASDTERGGVLTSNNSSDSPTGSGYNTDVSDDNLPCDRTSPSSDLNGNSVSDEQDEGVESDDLKKDLPLMPPPPDSCSMKLTIKEIWFSFAAPTNVRSHTHAFSRQLNLLSTATPAVGAWLVPIDQLKSSLNKLETEGTLRICAVMGCIMTEALENKSVHFPLRSKYNRLTKVARFLQENPSCLLCNILHHYLHQANYSIIDDATMSDGLPALVTLKKGLVALARQWMKFIVVTPAFKGVSLHRPAQPLKPQIAMDHEHEDGLGLDNGGGLQSDTSADGAEFEFDAATVSEHTMLLEGTANRPPPGSSGPVTGAEIMRKLSKTHTHSDSALKIKGIHPYHSLSYTSGDTATDSPVHVGRAGMPVKDSPRKESLLSYLTGSFPSLHNLLEGTPQRSSAAVKSSSLTRTGNTVATDMLSEHPLLSEPSSVSFYNWMSNAVGNRGSVLQESPVTKSGHNSLPTGVAPNLPTIPSASDFNTVLSSDQNTLDGTHSQHSTSQDDVAGVEEANQGFPAVQLADAQVVFKPLLSHTGIQSQDTMPFCYRMYFGEHLSFSGTLDCLRADIVDSDTAKERKGKRARRQGHVNLPPLEFKPALMLGTFSISAVVMEKSVCTPQNSTSALSFHDLSKRYYNTFHCNFTISCQSISQHVDMALVRLIHQFSTMIDDIKATQTDIKLSRYTAGSASPTPTFKTRKHRDFRSSDFSRSSRGSLNGGNRVNNAKNKRTNNENNKKESRNKNSLGRSERRTSKVSRKGSKDVVDHMTIHMDDSDSITVSEQSEPSAECWQNMYKLLNFYSLISDPTGILEKSSETFGPAGVRSPTEPTCKVVFENEQDNSSLTKTQRKRSLVTSEPQHVTLIVFGIGMVNRTHLEADIGGLTMESELKRIHGSFTLKEKMKDVLHQKMTETCATAHIGGVNIVLLEGITPNIQLEDFPTSPTSTAKQEFLTVVKCSIAKSQALYSAQRGLKTNNAAVFKVGAISINIPQHPATLHSMMVRSSHQLSKQISDLIRQPSTAPQPVKEDIATPLPSEKTPTSVNQTPVETNEFPQLPEGLEKKPIVLKFSAMLDGIAIGAALLPSLKAEYKMGRMRSHGMTGAQTRFTFELPNHRLRFTSKVSATDMSTIPPSASLNLPPVTMSGKYIMEEHDSYSDQVWSIDELPSKQGYYLQGNYLRCVAEVGSFEHNLTTDLLNHLVFVQKVFMKEVNEVIQKVSGGEQPIPLWNEHDGTADGDKPKILLYSLNLQFKGIQVTATTPSMRAVRFETGLIELELSNRLQTKASPGSSSYLKLFGKCQVDLNLALGQIVKHQVYEEAGSDFHQVAYFKTRIGLRNALREEISGSSDREAVLITLNRPIVYAQPVAFDRAVLFWLNYKAAYDNWNEQRMALHKDIHMATKEVVDMLPGIQQTSAQAFGTLFLQLTVNDLGICLPITNTAQSNHTGDLDTGSALVLTIESTLITACSSESLVSKGHFKNFCIRFADGFETSWDDWKPEIHGDLVMNACVVPDGTYEVCSRTTGQAAAESSSAGTWTLNVLWKMCGIDVHMDPNIGKRLNALGNTLTTLTGEEDIDDIADLNSVNIADLSDEDEVDTMSPTIHTEATDYRRQAASASQPGELRGRKIMKRIVDIRELNEQAKVIDDLKKLGASEGTINQEIQRYQQLESVAVNDIRRDVRKKLRRSSMRAASLKDKWGLSYKPSYSRSKSISASGRPPLKRMERASSRVGETEELPEIRVDAASPGPRVTFNIQDTFPEETELDLLSVTIEGPSHYSSNSEGSCSVFSSPKTPGGFSPGIPFQTEEGRRDDSLSSTSEDSEKDEKDEDHERERFYIYRKPSHTSRKKATGFAAVHQLFTERWPTTPVNRSLSGTATERNIDFELDIRVEIDSGKCVLHPTTLLQEHDDISLRRSYDRSSRSLDQDSPSKKKKFQTNYASTTHLMTGKKVPSSLQTKPSDLETTVFYIPGVDVKLHYNSKTLKTESPNASRGSSLPRTLSKESKLYGMKDSATSPPSPPLPSTVQSKTNTLLPPQPPPIPAAKGKGSGGVKTAKLYAWVALQSLPEEMVISPCLLDFLEKALETIPITPVERNYTAVSSQDEDMGHFEIPDPMEESTTSLVSSSTSAYSSFPVDVVVYVRVQPSQIKFSCLPVSRVECMLKLPSLDLVFSSNRGELETLGTTYPAETLSPGGNATQSGTKTSASKTGIPGSSGLGSPLGRSRHSSSQSDLTSSSSSSSGLSFTACMSDFSLYVFHPYGAGKQKTAVSGLTPGSGGLGNVDEEPTSVTGRKDSLSINLEFVKVSLSRIRRSGGASFFESQSVSKSASKMDTTLINISAVCDIGSASFKYDMRRLSEILAFPRAWYRRSIARRLFLGDQTINLPTSGPGTPDSIEGVSQHLSPESSRKAYCKTWEQPSQSASFTHMPQSPNVFNEHMTNSTMSPGTVGQSLKSPASIRSRSVSDSSVPRRDSLSKTSTPFNKSNKAASQQGTPWETLVVFAINLKQLNVQMNMSNVMGNTTWTTSGLKSQGRLSVGSNRDREISMSVGLGRSQLDSKGGVVGGTIDVNALEMVAHISEHPNQQPSHKIQITMGSTEARVDYMGSSILMGIFSNADLKLQDEWKVNLYNTLDSSITDKSEIFVHGDLKWDIFQVMISRSTTPDLIKIGMKLQEFFTQQFDTSKRALSTWGPVPYLPPKTMTSNLEKSSQEQLLDAAHHRHWPGVLKVVSGCHISLFQIPLPEDGMQFGGSMSLHGNHMTLACFHGPNFRSKSWALFHLEEPNIAFWTEAQKIWEDGSSDHSTYIVQTLDFHLGHNTMVTKPCGALESPMATITKITRRRHENPPHGVASVKEWFNYVTATRNEELNLLRNVDANNTENSTTVKNSSLLSGFRGGSSYNHETETIFALPRMQLDFKSIHVQEPQEPSLQDASLKPKVECSVVTEFTDHICVTMDAELIMFLHDLVSAYLKEKEKAIFPPRILSTRPGQKSPIIIHDDNSSDKDREDSITYTTVDWRDFMCNTWHLEPTLRLISWTGRKIDPVGVDYILQKLGFHHARTTIPKWLQRGVMDPLDKVLSVLIKKLGTALQDEKEKKGKDKEEH

SEQ ID NO: 278445 - DNA, 15018 bp, Artificial Sequence
  derived and/or modified sequence
atggaccagaggaagaatgagtcaattgtgccttccattacccagctggaggactttctaaccgagcacaattctaatgtcgtgtggctcttagtagctacgatactctcttgcggctggattatttacctgacatactacaacagcaggaacgttggacttatcctcactttagtgctgaacagactctataagcacggctacatccatataggatctttcagtttctccgtcctgtctgggaaagtaatggttagagagatttactatatcacggaagatatgtcaatccgcatacaggatggattcattatctttcggtggtggaagatgtacaaccccaaacagaaacagcatgatccgaaggctgaaacgagactgtacataaccgttaacgatttcgagttccacgtgtacaatcgttctgatttatatggacgccttcaagaactgttcgggctggaaccaacaataattccccctaaaaaagacgacgacaaaacccgggagataggcagaacaaggacgcagagtaagatagaacgcgtgaaggtgaagaccgaatctcaggacccaaccagcagctggcgcagccttatacccgtgattaaggtgaacgtgtctaccgggagactcgccttcggtaaccactatcagcctcagacgctttgtatcaacttcgatgacgccttcctcacctataccaccaagcctccatcgagtcatttagaccagtttatgcatattgtcaaaggcaaactggagaacgtcagagttatgctggtgccatctccaagatatgtggggctgcagaacgacgagcctcctcgccttatgggggaagggtttgtcgtcatgcagtccaatgacgtcgacatctactactatatggacgagcctggcctggtgccagaggagactgaagagaatattgagggcgaaatgtcttctgaagattgcaagctgcaagatctgccaccctgctggggactggatattgtatgtgggaaaggaacggattttaattatggtccttgggcagaccgacagcgcgactgtctgtggaaatttttcttccctcccgactaccaggttcttaaagtttcagaaatagcccagcctgggcgacccaggcagatcctggccttcgaactgaggatgaatattatcgccgacgccacgattgatctactgtttactaaaaacagagaaacgaatgccgtgcatgttaacgtcggggcaggtagctacctcgaaatcaacatccctatgaccgtggaggaaaacggatatacccccgccatcaagggacagctactccacgtggacgctactactagtatgcagtatcgcaccctgctggaggctgagatgcttgcatttcacatcaatgcctcctatcctcggatctggaacatgccacagacctggcaatgtgagctggaggtgtataaagccacctatcatttcatatttgcccagaagaacttctttaccgacctcatacaggactggtccagcgattccccccccgacatcttttcatttgtgccttatacatggaatttcaaaataatgtttcatcagttcgaaatgatttgggctgccaaccaacataattggattgattgcagtacgaagcaacaggaaaatgtgtatcttgccgcatgcggagaaactctgaacatcgatttcagtctccctttcaccgattttgtgcctgccacttgtaatactaaattttctctgcggggagaggacgtggatttacacctgtttctgccggactgtcatccgagtaaatattccctgtttatgttggtgaaaaattgtcatccgaataaaatgatccatgacactgggatccctgccgagtgccagtctggtcaaaaaaccgtgaagcccaagtggagaaatgtgactcaggagaagtcaggatgggttgaatgctggactgtacctagcgtgatgctgactatcgactacacgtggcacccaatctacccccagaaggccgatgagcagttgaagcagagtctctccgagatggaggagacgatgctgtccgtccttcgcccttctcagaagacctccgacagagtggtgtcttcaccaagcacttcctctagacctcccatcgacccatccgaactcccaccagacaagctgcacgtggagatggaactgagccctgattcacagatcacgttgtatgggcccctgttgaacgccttcttatgcattaaagaaaattattttggcgaagatgatatgtacatggacttcgaagaagtcattagctctcctgtgttgtcattgtcaacttcctcttcctccggctggaccgccgtggggatggaaaatgacaagaaggagaatgaaggcagcgccaagtctatccaccctctggcgttacgtccttgggacattacagtgcttgtgaacctatataaggttcatgggcggttacctgtgcatggaactactgacggacccgaatgccctacagcgttcctagagcggctgtgtttcgagatgaagaagggcttccgggaaactatgctacaactgattttgtcccccctgaacgtctttgtgagtgataactatcagcagcggcctccagtggatgaagtgctgcgcgaaggccacattaacctcagtggactgcagttgcgcgctcatgctatgttcagcgccgagggcctgcccctgggatctgactctcttgagtatgcttggttaatcgacgtgcaggctggaagcctaaccgcaaaggtaactgctccacagctcgcctgcctgttggagtggggtcagacatttgttttccacgtagtgtgcagggaatatgagctggagcgtccgaaatccgtcattatctgtcagcatggcattgataggcgattctgcgaatctaaactgtcttgtattcctggaccatgtcctacttccgacgacctgaaatatactatgatcagactcgccgttgacggcgctgacatctacatcgtggagcatggttgcgccacaaatattaaaatgggtgccatccgggtagcaaactgcaacctgcataaccagtctgtgggagaaggaatctcagctgccattcaggactttcaggtacgtcagtatatcgagcaactcaataattgtaggatagggcttcaaccagctgtgcttcggcgggcctattggctcgaggctggatccgcgaaccttggattaattactgtcgacatcgcgctggcagcagatcaccactcgaaacacgaggcccagcggcactttctggaaacacacgacgcacgcacaaagcggctctggttcttatggcccgatgacattctgaagaacaagcggtgtagaaataagtgtgggtgcctggggggttgcaggttttttggcggtacagttacaggcctggatttcttcaaattggaagagctgactccttcatcgagctcagccttttccagcacttccgccgagagtgacatgtattatgggcaatctcttctccagcccggtgaatggataatcaccaaggagatccctaaaataattgatggcaacgtcaacgggatgaagaggaaggagtgggaaaacaaatccgtgggcatagaagtggagcgcaagacccaacatctctcgctacaggtccccctgaggtcccacagctcgagctcctcatccgaggagaacagtagttcctcagcagctcagccactgttggccggagagaaggagagtcccagttcggttgcagatgatcacttggtgcagaaggaatttctgcacggcacaaaaagagatgatggacaggcctcaatccccaccgagatttcagggaactcccctgtgtccccgaatacgcaggacaagagtgtgggacagtctccactgagatcaccactcaagcgccaggccagtgtctgcagtacacggctcggttccactaagtccctcaccgcagctttttacggggacaaacaacctgttactgtgggcgtgcaattcagcagcgacgtgtcccgctctgacgagaatgtccttgacagccctaagcaaaggagaagttttggatcgttcccatacacccctagcgccgactcaaattccttccatcagtataggagcatggacagcagcatgtctatggcagattccgaagcttacttctccgccgctgaagagtttgagcccatatctagtgacgaggggccggggacttaccctggaaggaaaaaaaagaaaaagcagactcagcagatcgattactcccgtggctcaatctatcacagcgtcgaagggcctctcactggtcatggtgagtctatccaggattccagaacactacccttcaaaacccaccctagtcaagcatcattcgtgagcgcgttggggggagaggacgatgttatcgagcacctatatatcgtggagggtgaaaaaactgtcgagtctgagcagatcaccccccaacagcccgtgatgaactgctaccagacttatcttacccagtttcaggttataaactggtccgtcaagcacccgaccaataaacggacaagtaaaagctcacttcaccggcctctggacctggatacaccgacttctgaagaaagctcttcgagttttgagcagctttcggttcccacgttcaaagttatcaagcagggattgactgctaattccttgctggatcgtggcatgcagcttagcgggagcacctctaatacaccatacacacccctcgagaaaaagcttgctgacaatacagatgatgagacccttactgaggagtggaccttggatcagcccgtgtcccagacgcgtaccacggcaattgtggaggtgaagggcacagtggacattgtgctgaccccgcttgtggcagaggctctcgatcgctatatcgaggccatggtgcactgtgcttcaacccgccacccggccgcgatcgtggatgatctgcatgccaaagtgcttcgtgaagccgttcagaacagcaaaaccaccttttccgaaaatttatcatctaagcaggacataagaggtacaaaaaccgagcagtctaccatcggtacgacaaatcagggtcaggctcaaactaatttaaccatgaagcaggacaacgtaaccatcaagggactgcagaccaacgtctccatccccaaggtgaacttgtgcctgcttcaggcctccgtggaagaatctccgactacggcccctagccgatccgtgacgcacgtcagcctcgtggctctatgttttgataggatcgccacacaggtcagaatgaataggggagtagtggaagagaccagcaacaacgcggagccaggtaggacctccaactttgacaggtacgtgcatgctaccaagatgcagccacagtcctctggatctctaagaagcaatgccggggctgaaaaaggcaaagaaatcgctgctaaattgaacatccatcgtgtgcacggccagctgagggggcttgacactacagacataggcacgtgcgcgatcaccgccataccatttgagaaatctaaagtcctgtttacccttgaagagttggacgagttcactttcgttgatgagacggatcagcaggctgtgccagacgttacgcggattggtccgagtcaggagaaatggggctggattatgtttgaatgtggacttgagaacttgaccatcaagggaggccgacagtctggcgcagtcctctacaactcttttggaattatgggaaaggcctctgataccgagcgcggtggggtcctgacaagtaacaacagttccgacagtcccaccggcagcggttacaacaccgatgtatccgatgataacctgccatgtgaccgcaccagcccttcatccgacctgaacggtaactccgtgtcagatgagcaggacgaaggcgttgaaagcgacgacctgaaaaaggatttaccactcatgcctccccctcctgactcatgtagcatgaaactcaccatcaaggaaatttggttttccttcgcagcaccgacaaacgttagatcccatacccacgctttttcccgccagttgaacctcctgtctactgcaaccccagcagtcggcgcgtggctagtgcccattgaccagcttaagagcagcctcaacaagctcgagactgaaggcactctgcgtatttgtgccgtgatgggctgtataatgacagaagcgcttgagaacaagtctgtccatttcccgctcagatccaagtataaccggcttactaaagtggctcgattcttgcaggaaaacccttcatgtttgctgtgtaatatactccaccactacctccaccaggccaactatagtatcatcgacgatgctaccatgtccgatggattaccagccctggttactctaaaaaagggccttgtggccctggcaagacagtggatgaaattcattgtggtgacacctgccttcaagggcgtgtccctgcaccgtcccgctcagccactcaaacctcagatcgccatggatcatgagcatgaagatggattagggctcgataatggcggaggtctacagtccgacaccagtgctgacggggccgagttcgagtttgatgctgccacggtaagcgaacatacgatgctactggaagggaccgccaatagacctccaccgggatcgagcggcccggtgaccggcgccgagatcatgcggaaactgtcaaagacgcacacccactctgacagcgccctgaagatcaagggcatccacccctaccactccctttcctataccagcggcgatacagccacagactctccagtacatgtggggagggcaggtatgcccgtgaaagactctccacgcaaagaatctctcctgtcctacctcacggggtctttcccctctctccacaatttactggagggaaccccccagcggtcatccgctgccgtcaaatccagctcacttactcggaccggcaatacagtcgcaaccgacatgctttctgagcacccactgctctcggaacctagcagcgtcagcttctacaattggatgagcaacgctgtgggcaacagaggttccgtgctgcaagaatccccagtgacaaaatcgggccacaacagcttgcctaccggcgtggctcccaatctgcccactataccttccgcttcagactttaacacagtgctaagcagcgatcaaaatacactagatggaactcacagtcagcactctacatcgcaggatgatgtggctggagtcgaggaagccaatcaagggttcccggcagtgcaactggccgatgcacaggttgtgtttaaacccttgctgtcccatacgggtattcagtcgcaggatacaatgcctttctgctatcggatgtatttcggcgagcacctgagctttagcgggacacttgactgcctccgcgccgacatagttgatagcgatacagccaaggagcggaagggtaagcgtgcacgacggcaaggacacgtcaacctgccaccgcttgagtttaagcccgcactaatgttagggaccttcagcattagcgcggtagttatggagaagtccgtgtgcactccgcaaaacagcacatccgccttgagtttccacgatctgagcaaacgttactacaacacgttccattgtaatttcaccatatcttgtcagagcatctcccagcacgtcgatatggcccttgttcggctgatccatcagttctccaccatgattgacgatatcaaagcgacccagacggacattaaactgagtcgatatactgccggaagtgccagtcctacccctacctttaaaacccgaaagcatagagatttccggagcagtgatttctcgcgaagctctcgtggctcattgaatgggggaaaccgcgtgaataacgcaaagaacaagcgcacaaacaatgagaacaataaaaaagaatcaaggaataagaattctcttggtcgtagtgagagacggacaagcaaggtgtcgagaaagggcagtaaagacgtagtagatcatatgaccatccacatggacgacagtgacagcatcacggtctccgagcagagcgagccatccgccgagtgctggcagaacatgtataagcttctgaatttctactccttaatttcagacccgaccggaattctcgaaaagtcgtccgaaacctttggcccagcaggcgtcaggtccccaaccgaacctacctgcaaggtggtgttcgagaatgagcaggataactcttcattgacaaagacccagaggaagcgaagcctcgtgacttctgagccacagcacgtaacactaatagtgtttggtatcggcatggtgaatcgtacacacctggaggccgatattgggggcctaaccatggagagtgagctcaaaagaattcatggttctttcaccctgaaagaaaaaatgaaggatgtgctacaccagaaaatgaccgaaacctgcgccactgcccatattggtggcgtcaatatcgtgctattagagggcatcactcccaatatccagcttgaggatttccctacaagcccgaccagtacggctaagcaagaattcttgacagtggtgaagtgttctatcgcaaagtcacaggccttatacagcgcccagaggggcctgaaaacaaacaatgcggccgtgtttaaagttggcgcaatctctatcaacattccacagcaccctgctaccttgcattctatgatggtgcgctcttcacatcagctgtcaaaacaaatcagcgatctcatcagacaaccatctaccgcgcctcagcctgtgaaggaggatatcgccacaccattgccatccgaaaagacgcccacaagcgtgaaccaaacgcccgtcgaaaccaacgaattcccacagttgcccgaaggtctggaaaaaaagccaatagtgttgaagttttcagccatgctagacggcattgccattggcgccgcattgctgcccagtctcaaggcagagtacaaaatgggccggatgcgatcccacgggatgacaggcgcccagactcgatttacctttgaactgccaaaccacaggctaagattcacttctaaagtgtcagcaactgatatgtcaaccattcctccctcagcatcactcaacctgcctccggtgacaatgtctggcaaatatataatggaggagcacgatagctattctgatcaggtgtggtccatcgacgaactgccatctaaacaagggtactatttgcagggtaattacttgagatgcgtggccgaggtgggatcttttgagcacaatttaacaacagaccttctgaaccacttagttttcgtccagaaggtctttatgaaagaggtcaatgaagtaatccaaaaagttagtggcggagaacagcctatcccactctggaacgagcatgacggaactgccgatggagacaaacccaaaattcttctgtattctttaaacctgcagtttaaaggcatccaagtgactgcaaccacaccctccatgcgcgccgtgagattcgaaactggcctgattgaactcgagctgtcgaataggctacaaacaaaggccagcccaggtagtagctcttatctgaaactcttcgggaaatgtcaggtagatcttaatctggccctgggccagatcgtgaagcatcaggtttacgaagaggctggcagcgattttcatcaggtggcttactttaagactagaatagggctgcggaatgccctgcgtgaggagatctccggatcttctgacagagaggctgttttaatcacgcttaatcggcccattgtgtacgcccagcctgtggccttcgatcgggcggtacttttctggctgaattacaaagcagcatatgataactggaacgagcagaggatggccctgcataaggacatccatatggcaaccaaggaggtggtcgatatgctcccagggattcagcagaccagcgctcaggcattcggcaccctattcctgcagctcacagtcaatgatctggggatttgtcttcctatcaccaacaccgcacagtcaaaccacaccggggacctggatactgggtcagccttagtactgacaattgagagcaccctgatcaccgcttgctccagcgaaagcttggtgtcaaagggacattttaaaaacttctgcatcagatttgccgacggcttcgaaacaagctgggacgattggaaaccagagatccacggcgacctggtgatgaacgcctgtgtggtccccgatggaacgtacgaggtttgcagccggactactggtcaagcagccgctgaatcgtccagcgcaggcacatggaccctgaatgtgttgtggaaaatgtgtggcattgacgtgcacatggaccctaatattggcaaaagattaaatgctcttggcaataccttgacaacccttacaggagaggaagacatagacgacatagccgatctcaattcggtaaatattgcagacctgtcagacgaagacgaggtagatactatgtccccaaccatccataccgaggcaacagactacaggcgtcaagctgccagcgcgagtcagccaggcgagttgcgtggaagaaagatcatgaaacgaattgtggacatcagagagctgaacgaacaggcgaaggtcattgatgatttgaaaaagctgggggcttccgagggcacaattaaccaggaaatccagcggtaccagcaactggagagtgttgccgtaaatgatatcagaagggacgtgcgaaagaaacttcgcaggtcaagcatgcgagcggcatcactgaaggataagtgggggctcagttacaaaccaagctatagcaggtccaaatcgatcagcgcctcaggccggccgccacttaagagaatggaacgcgcgtcctcaagagtgggagaaacagaggaacttccggaaattcgcgtagacgccgccagtccaggcccaagagtgactttcaacatccaggacactttcccggaagagaccgagctggatctgctgtccgtaactatagaggggccttcacactattcctctaattcggagggctcatgttcagtgttctcaagtcctaagacccccggcggcttttccccggggattcccttccaaactgaggagggccgccgggatgactccttgtcctccacaagtgaagattcagaaaaggacgaaaaggacgaggaccatgagagggagcggttctatatttataggaagcccagccataccagtaggaagaaagctactggattcgcagcggttcaccagctgtttaccgagcggtggcccacaacccctgtgaacaggtctttgagtggcaccgccaccgagcggaacattgacttcgagcttgacattagagtggagatcgacagcggtaagtgcgtactgcaccctactaccctgctgcaggagcacgatgacataagcctgaggcgcagctatgataggagttcaagaagccttgatcaggactctccttcgaaaaagaaaaagttccagactaactacgcctcgactactcaccttatgacagggaaaaaagttccaagtagcttgcagacaaagccttccgatctcgagaccaccgtcttctacatacctggcgtggatgttaaactgcactataattctaagacactgaagacagaatctccaaatgcttctcgcggctcttccttgcccagaacactctctaaagagtctaagttgtacggcatgaaagattcagctaccagcccacccagcccccccctgccatccactgtccagtccaagacaaatacgctcctaccgccccagcctcccccaatcccggctgccaaaggtaaaggcagcggtggcgtgaagacagccaaactgtacgcctgggtcgctctgcagtccttgcccgaagaaatggtcatcagcccgtgcctcttggatttcctggagaaggcactggagacgatccctatcactcccgtggagcgaaactatacagcagtaagtagccaagacgaggacatgggccactttgagataccagatcctatggaggagtctactacttcacttgtgtcaagtagtacatccgcttatagtagtttcccggttgacgtcgtggtctacgtcagggtccaaccgagccagatcaagtttagctgtctcccagtttcacgggtcgagtgcatgctgaagctgccgagtttggacctggtgttttcttctaaccgcggcgaactggagacactcggcaccacataccccgccgagacactgagccctgggggaaacgctacccagagcggcacaaaaacatcagcttccaagacagggatacctggaagttccggattgggctcacctttgggaaggtcccgacattcgtcgtcacagtcagatttgaccagctccagctctagctcaagtggactgtcatttaccgcatgtatgtcagacttttccctgtatgttttccatccctatggggccggaaagcaaaagaccgcagtgagtgggctgactcctgggagcggcgggttgggcaacgtggacgaggaacctacaagcgtgaccgggcggaaagatagcctgtccatcaacttggaatttgtgaaagtcagtctgagccgcattagaaggagcggtggcgcttctttttttgaatcccaatctgtctcaaagtctgccagcaaaatggacacaactctgataaatatttccgcagtgtgtgatattgggtccgcaagcttcaaatacgacatgagaaggctctcggaaatcttggccttccccagggcttggtataggcggtccatagcacgtcgcttgtttctgggagatcagaccattaacttgccaacctctggacctgggacgcccgattccatcgagggagtgagccaacatctgagcccagagtcttcccgcaaagcctattgtaagacctgggagcagccatcacagtctgcgtcattcactcatatgccacaaagccccaacgtgtttaacgaacacatgacaaactctaccatgtcccccggtacggtgggccaatccctgaaatcgcccgccagcattcgtagtaggagtgtgtcagacagcagcgttccacggagagactccctatccaaaacttctacccctttcaacaagagcaataaagcggcgtctcaacaaggaacaccttgggagactctagtcgtattcgctattaatctcaaacagctcaatgtccaaatgaatatgagcaatgtaatgggcaataccacctggaccacctcaggcctgaagtcacaaggaaggctgtccgtcggcagtaatcgcgacagggaaatctcaatgtcagttggcctgggcaggtctcagctggactccaaagggggagtggtgggcggaacaattgatgtcaacgctctggagatggtggctcacataagcgagcacccaaatcagcagccaagtcacaaaattcagattacaatgggctcaaccgaggctcgggtggattacatgggttcctccatactgatgggtattttttctaacgcggatctcaaactgcaggacgaatggaaggtcaatctctataacactctggactcgagtattaccgataagtccgagatctttgttcatggcgatctcaaatgggacatcttccaagtaatgatttccaggtccacaacgccagatttaatcaaaattggcatgaagctacaagagttctttactcagcagttcgacacatccaagcgcgccctcagcacatgggggccagtgccctatctacccccgaaaacaatgacttcaaatcttgagaagtcatcccaagagcagttactggatgccgcacaccaccggcattggcccggagtgctgaaggtggtgtcaggctgtcatatcagcctgttccagattcccctgcctgaggatggtatgcagttcggtggctcaatgagcttgcatggaaaccatatgaccttagcatgcttccacggcccaaatttcagatccaagagctgggctttgtttcacttggaagagccaaacattgccttttggaccgaagcacagaaaatctgggaggacgggtcctctgatcattcaacctacattgtccagactctggacttccacctggggcacaacaccatggtaactaaaccctgcggagcactggagtctcccatggcaaccattacaaagattacaagaagacggcatgagaatccacctcatggtgtggcatcagttaaggagtggtttaactatgtgacagcgactcgcaatgaggagttgaacttgctgaggaatgtagacgccaacaacacggagaactcgactactgttaaaaactcgagcctgttgagcggtttcaggggcggatcaagctacaaccatgaaactgagaccatcttcgccctcccaaggatgcaactcgatttcaagtctattcacgtacaggagccacaggaaccaagtctccaggacgccagcttgaagccgaaggtcgaatgtagcgtcgtaaccgagtttactgatcatatatgcgtgacaatggatgcagagcttataatgtttctgcacgacctggtttctgcttacctgaaggaaaaagagaaagccatttttcctccaaggatactgtcgactcgacctggacagaagtcccccattatcatacacgatgataattccagtgacaaagacagagaggatagtattacctacaccaccgtcgactggagggatttcatgtgcaacacctggcacctggagcctacactacgactcatctcttggaccggcagaaagatcgatcctgtgggcgtcgactatattctgcagaaactaggctttcaccatgcccgaacaaccattccaaagtggctccagcgaggagtgatggatccccttgacaaagtgttgagcgtgctgatcaagaagcttggcactgctctacaggacgaaaaagagaagaagggcaaggacaaggaggaacactag

SEQ ID NO: 278446 - DNA, 15018 bp, Artificial Sequence
  derived and/or modified sequence
atggaccagagaaagaacgagtctatagtgccaagcattactcagctggaggacttccttacggaacataacagcaacgtcgtgtggctactcgtggccactattttgagttgtggctggattatctatctgacctactataattcacgaaacgttggtctcatcttaactttggtactaaatcgcttgtataagcatgggtacatacacataggatcctttagcttcagcgtactctctggcaaggtgatggttagggagatctactacatcacggaggacatgtcaattcggattcaggacggatttattatttttcgctggtggaagatgtacaaccccaaacagaagcagcacgacccaaaggctgaaactaggctgtatattacagtgaatgactttgagtttcatgtttacaatagatctgatctgtacggccgcttacaggaactttttggcctggagccaactattattccccccaagaaagacgatgataaaacaagggaaatcggtaggaccaggactcagtctaagattgaaagagtgaaggtgaagacagaatctcaagatcccacctcctcatggaggagtcttatccccgtcattaaagtcaacgtgagcacaggtagactggcatttggaaatcattaccagcctcaaactttatgcataaacttcgatgatgcgttcctcacttacaccacaaagccccccagttctcatttagaccagttcatgcacatagtgaagggaaagctcgaaaacgtccgggtaatgttggtgccttccccacgttacgtgggcttacaaaatgatgaacctcccaggctgatgggtgaagggtttgttgttatgcaatcaaatgatgtggacatatattactatatggacgagcccggcctagtgcccgaagagaccgaggagaacatcgagggagagatgagctccgaggactgtaagctgcaagacctacccccatgctggggcctcgatattgtgtgtggtaagggaaccgacttcaactacggcccatgggccgatagacagcgtgattgcctgtggaaattctttttcccacctgactatcaagttctgaaggtcagtgagatagcacagcccgggaggcccaggcagattctcgccttcgaactgaggatgaacattatagcagatgctacaatagatctcttatttactaagaatagagagactaacgccgtgcacgtgaacgtgggggcaggctcatacctggaaatcaatattcccatgaccgtggaggagaacggttatactccagctattaaaggtcagctgcttcacgtggatgctaccacatcaatgcagtacaggacattactcgaggccgagatgctggcattccacatcaatgcgagctaccccagaatctggaatatgcctcagacttggcagtgcgagctagaggtttacaaagctacataccactttatatttgcacagaaaaatttcttcaccgacctgatacaggattggtcctctgattctccgcctgacattttttcctttgtgccttacacctggaatttcaagatcatgttccaccagtttgagatgatttgggccgccaaccagcacaattggatcgattgcagcactaaacagcaagagaacgtttacctggctgcttgcggcgaaaccctaaacatcgacttttccctcccctttacggacttcgtgcccgccacgtgcaacaccaagtttagcctgcggggcgaggacgtcgatctgcacttgttcctgccagattgccacccttccaaatacagtctgttcatgctcgttaaaaactgtcaccccaataaaatgatccacgatacagggatccctgctgaatgccagagtggacagaagaccgttaaaccaaaatggcgcaatgtcactcaggaaaaatccggttgggtggaatgctggacggttccaagcgtgatgctgactatcgactacacctggcatccaatctatccccagaaggccgacgagcagctcaaacaatctttgtcagaaatggaggagacaatgctaagcgttctgaggccatcacaaaagacgagtgatcgggtcgtgtcttcccctagcacaagctcccgtcccccgatcgatccttctgaactcccccccgataagctgcatgtggagatggaactgagccctgattctcagattacattatacggtcccctgcttaatgcctttctttgcattaaagagaattatttcggggaagatgacatgtacatggattttgaggaagtcatctcaagccctgtgcttagcctcagcacatcatcatcatccgggtggaccgccgtgggaatggagaacgataaaaaggaaaacgaaggcagtgccaaatcaattcacccactggccctacggccctgggacatcaccgtactggtgaacttgtacaaggtgcatgggcgactgcctgtccatggcacaacagacgggcccgagtgtcccactgctttcctggaacgcctgtgcttcgagatgaagaagggatttagagaaactatgctgcagctgattctgagtcccttaaacgtgtttgtgtccgacaattaccagcagcgacctcctgttgatgaggtgctcagagaaggccatataaatctgagtggactccagctgagggctcacgcaatgtttagcgcggagggactccccctcggctctgactccctggagtatgcttggctcattgacgtacaagctggatccttaacagccaaggtaacagccccacaactcgcatgtttacttgagtggggtcagactttcgtgtttcatgtggtttgtagggagtatgaactggaaagaccaaaatccgtgatcatctgtcaacatgggatcgatcgcaggttttgcgagagcaagctgtcctgcatccccggtccctgtcccacctccgatgatctcaagtataccatgattagactcgcagttgatggggcagacatttacatagttgagcacggctgcgctacgaacatcaagatgggcgctatccgcgtcgccaattgcaacctgcacaaccagtcagtgggggaggggatctcggccgcaattcaggactttcaagtgagacagtacatcgagcagttaaataactgtaggatcgggttacagcccgccgtgctgcgacgagcgtactggctggaagccgggagcgcgaacctggggttgataaccgtcgatatagctctggctgcagaccaccactcaaagcacgaagctcagaggcacttccttgaaacccatgatgcccgtacaaagcgtctgtggttcctgtggcccgacgatatcctgaaaaacaagcggtgcaggaataaatgcggatgcctgggcgggtgtagattcttcgggggaaccgtgactggactggatttcttcaagctcgaggagttgactccgtccagcagcagtgcgttttctagcactagcgccgagagtgacatgtactatggccagagtttattacaaccgggagaatggataatcacgaaagagatccctaaaattatcgacggcaacgtcaatggcatgaagagaaaagagtgggaaaacaaatctgtcggcatcgaggtggaacggaagactcagcacctctctctgcaggtgccactgcgtagccattcttcatccagcagttccgaagaaaacagctccagttccgcagcccaacctctgctggcaggtgagaaggaatcacctagttcagtcgccgatgaccatctcgtgcagaaagagttcttgcacgggaccaagagggacgacggacaggcttctatccctacggaaatctccgggaactctcccgtgagccctaatacacaggataagtcagtgggccagtcacccctaaggtcacccctaaagcggcaggcttccgtgtgttctaccagactaggctcaacaaaatccctcacagcagccttctatggcgataagcaacccgttacggtgggggtgcaattctcgtcagatgtgtcacgcagtgatgagaacgtactggactcccccaagcaaagacgctcctttggtagctttccatacaccccgtctgccgattccaactcttttcaccagtataggagtatggactcatccatgagtatggctgactccgaagcctacttttccgcggctgaggaattcgagccaatcagctcagacgaaggcccaggcacctacccaggacgcaagaaaaaaaagaaacagactcagcagatcgactactcccggggctccatttaccacagcgtggagggcccgttgacaggacatggagagtccatccaagacagccgtaccttgcccttcaagacgcaccccagtcaagcttcctttgtcagcgctctcggtggggaagacgatgtgatcgagcacctctacatcgttgagggggaaaagactgtggaaagcgaacagattacaccccagcaacctgtgatgaactgttatcagacgtatctcactcagtttcaagttatcaattggtccgtcaagcaccccacgaataagcggacatcaaagtcgagccttcatcgccctctggacctggatacgccgacctctgaggaaagctccagtagctttgaacagctctccgtgcctacgttcaaggtgatcaagcaaggtctgacagctaacagtctgctagatcggggcatgcaactgtccgggagcacaagtaataccccatatacacctttagaaaaaaagttggccgataacaccgatgacgaaaccttgacggaggaatggactttggaccagccggttagccaaactagaacgactgcgatagtcgaagttaaaggtaccgtggacatagtgctgacgcctctggttgccgaagctctggaccggtacatcgaggccatggtgcactgtgcgtctacgaggcaccctgccgcaatcgtcgacgatttacacgccaaggtgctgcgggaggccgtgcagaattccaagacaaccttctcggaaaacttgtccagtaagcaggacattaggggtactaagacggaacagtctaccattggcactaccaaccagggccaggctcagaccaatctgacaatgaagcaggataacgtcaccatcaaaggcctccagacaaatgtgagtatccctaaagttaatctgtgcctgctgcaggcaagtgtcgaggaatccccaaccaccgccccttcacgatctgtcacccatgtgagcctggttgcactgtgctttgaccgaattgcaactcaagtccgaatgaacagaggtgtggtggaagaaacatctaataatgctgaacctggtagaacatcaaatttcgatcgatacgtccatgccacaaaaatgcagccacagagcagtggaagcttgcgaagcaatgcgggagccgagaagggaaaggagatcgcagcaaagctaaacatacatcgtgttcacggtcaactccgcgggctggatacaacagatatcggcacttgtgcgattaccgccattccctttgagaaatctaaggtcctgtttacgctcgaagaattagacgaattcaccttcgtcgatgagaccgaccagcaagctgtgcctgacgtaacccgcatcggcccttctcaggaaaagtgggggtggattatgtttgagtgtggactcgaaaatctgaccatcaagggaggaagacaatccggagctgtgctctacaattcatttggcattatgggtaaagctagcgatacggaaaggggaggagtcttaactagcaacaattcatctgattcccccaccggttcaggctataacacagacgtctcagacgataacctgccttgtgatcggacgagccccagcagtgacctgaatggcaactccgtctccgatgaacaagatgaaggtgtagaatcggacgatctaaaaaaagacctgcccctgatgccgcctccgcctgactcttgcagcatgaagttaaccatcaaggaaatctggttttccttcgctgcgcctactaacgtgagatctcacacccacgcattttcacggcagcttaacctgttaagcacagcaacaccagccgtgggtgcctggctggtgcccatagatcagctgaagagttccctgaataaactggaaactgagggcacactgagaatttgcgcggtgatggggtgtatcatgaccgaggcactagagaataaatccgtccattttcctctgagatccaagtataatcgcctcactaaggttgctaggtttttacaggaaaatccatcttgcttgctgtgcaatattctgcatcactaccttcatcaggcgaactattccatcatcgatgatgccacgatgtccgatggattgccggccctggtgactcttaaaaaggggctagtcgctttagctcgtcaatggatgaaatttatcgtggtcaccccagccttcaagggggtctccctgcataggccagcccaacccctgaagccacagatcgccatggaccatgaacacgaagacggcctagggctcgataatgggggtgggcttcaaagtgacacctcagccgacggagcagagttcgaattcgacgccgctaccgtctcggagcacacaatgctgctggaaggaaccgccaatagacctcctcctggcagttcagggccagttacaggagctgagatcatgagaaaattgtcaaaaactcatacacatagtgatagcgccctaaaaatcaaagggatccatccgtatcactccctgagttacacctctggtgacactgctactgattctcctgttcacgtcgggagggccggcatgcctgtaaaggattctcctcgaaaggagagcttactgtcttatctgactgggagcttcccatccctccataacctccttgaaggcactccgcagcggagttctgccgccgtcaagtcttcttcactcaccagaaccggcaacaccgtcgctacagacatgctgtctgaacatcccctactgagtgagccatcctcagtgtctttttataattggatgtccaatgccgtgggcaacagaggcagtgtccttcaggaatctcctgtcacgaaaagcggccacaatagcctgcccactggtgtggcacccaatctccccactatccccagcgccagcgactttaacactgtgctcagtagtgatcagaacaccttagacgggactcactcccagcattctacctcacaggacgacgtggccggagtggaagaggcgaatcaaggcttccccgccgttcagctggctgacgcccaggtcgtgttcaagcccctcctctctcataccggcattcaaagccaagatacaatgccattctgctacagaatgtacttcggagagcatcttagcttttcggggactctggattgtctccgcgccgacatagtggatagcgatactgcaaaggaaagaaaggggaagcgcgccagacgacagggccacgtaaacttacctccccttgaatttaagccggccctgatgctggggacattctctatctccgccgtcgtaatggaaaagagcgtctgtacgccgcaaaattcaactagcgcgttgagttttcacgacctgtcaaagagatactacaatactttccactgcaactttactatttcctgtcagtctatttcacagcacgttgacatggcgttggtcaggctaatccaccagtttagcaccatgatagacgatataaaagcaacccagacagacattaagctgtcccggtacaccgcaggcagtgcctctcctacccccacattcaagaccagaaaacacagggactttaggagctctgatttctcccgctcatcgcggggaagtctaaatggtggcaaccgggtgaataacgctaaaaacaagcgcaccaacaatgagaataataagaaggagtcacgcaacaaaaactcgctcggtcgcagcgaacgaagaactagtaaagtgtccaggaaaggttctaaggacgtggtggaccatatgaccattcacatggacgatagcgatagcatcactgtgagtgagcagagtgaaccttcagccgaatgttggcagaacatgtacaaactgctaaacttctatagcttaatcagcgatcccactggcatcttggagaaatccagtgagacctttggacccgctggagtgaggtcacctacagaacccacttgtaaggtagtcttcgagaacgaacaggataactcttcgctgaccaagacccagcggaaacggagcctggtgacctctgagccacaacacgtgactctgattgtgttcggtataggaatggtgaatcgcacacatcttgaggccgacataggcgggctgaccatggagtctgagttgaaacggattcatggctcatttacgctaaaggagaaaatgaaagatgtcctgcaccagaagatgaccgaaacctgtgccaccgctcacatcggcggagtgaatatcgtgctgctagaaggcattacccctaatatccagttggaagattttcctacctctcctacctctacagccaaacaggagtttttgacggtcgtgaagtgcagtatcgccaagtctcaagccttatattcagcccaaaggggactcaagactaataacgccgcagttttcaaagtgggtgccatatcaatcaatatccctcaacatcctgcaaccctgcatagtatgatggtgagatcgtctcatcagttgtccaaacagatatcagacctaattagacagccaagtaccgcccctcaacctgtgaaagaggatatcgctacccctctccctagcgagaaaacgcctacttcagtgaatcagacacctgtggagactaacgaatttccacagctccctgagggcctggagaaaaagcctatagtccttaaattctctgccatgctagatggcatcgcaattggcgccgcgctgctgccatcgctaaaggcagagtacaagatgggacggatgcgaagtcatggaatgaccggagcacagactcggtttaccttcgaactgcctaatcatcggctgaggttcacgtcaaaggtttcagccaccgacatgtccacaatcccgccaagcgcttccctgaacttacctccggtgacaatgtcaggcaagtatatcatggaagagcatgacagttactctgatcaggtgtggtcaattgacgagcttcctagcaaacagggctactatctgcaggggaattatctgcggtgtgtagcagaggtgggctccttcgaacataacttaaccactgaccttctcaaccacttggtgtttgttcagaaagtgtttatgaaggaggtgaacgaagtgatccagaaagtcagcgggggtgagcagcccattccactgtggaatgaacacgacggcactgcagatggcgacaagcctaaaatcttactatatagcctgaatctgcagttcaaagggattcaggtgacagctaccacaccgtccatgcgggccgtgcgattcgagacgggattaattgagttagagctgagtaaccggctgcagactaaggcaagccccgggagctcttcctacctgaagttgtttggcaaatgtcaggtggacctgaacttggccctcggccagatcgtgaagcaccaagtatacgaagaggctggaagtgattttcaccaggtcgcctacttcaagacacgcatagggctccgaaatgcactgcgcgaggaaatctccggctcaagcgatagggaggctgttctgatcacactaaataggccaattgtgtacgcacagccagtcgcctttgacagggccgttctgttttggcttaattataaggcagcatacgataattggaatgaacagcggatggccctgcataaggacatccacatggctactaaggaagttgtggacatgctgcctggtatccagcagacatcagcacaagcttttgggacgctgtttctccaattgaccgtcaatgatttagggatctgtttgccaattactaacactgcgcagagcaaccacaccggcgaccttgacaccggttcagctttggtcctcacgatcgagtcaacattgatcaccgcatgtagttccgaaagcttagtttctaaaggacacttcaagaacttctgcattcggtttgcagacggtttcgaaacctcctgggatgactggaagcccgagattcacggagatctcgtcatgaacgcctgcgtagtgcccgatggaacgtacgaggtgtgtagccgaacaacaggtcaggccgccgctgagtcgtcttccgctggcacctggacattgaatgtgttgtggaaaatgtgtggcattgacgtgcacatggatccaaatattgggaagcggctgaacgcccttgggaacacccttaccaccctgactggtgaggaagatattgacgacattgccgacctgaattcagttaacatcgctgatttgagcgacgaggatgaggtggacactatgtccccgacaatccacaccgaggctaccgattatcggagacaggcagcctctgcatctcaacccggggaactgagaggacgcaaaatcatgaagagaatagtagacatccgggaactgaatgagcaagcaaaagtgattgacgacctcaagaaacttggcgcctccgagggaaccatcaaccaggaaattcagagataccaacagctggaatctgttgctgtgaacgacataagacgcgacgtgagaaaaaagctgcgtcgctcgagcatgcgggctgcatccctgaaagataagtgggggctatcttataagccgagctacagtaggtccaagagcattagcgcatctggccgaccccctctgaaacgaatggaaagggcctcgagtagggtaggagagacagaggaacttccagaaatccgtgtcgacgccgctagtcctggccctcgtgtgacctttaacatacaggatacctttccagaggagacggagctagatttgctctcagtgaccatagagggtcctagtcattacagttcaaacagcgaaggttcatgctcggttttttcttctccaaaaacaccaggaggcttctctccaggcattccctttcagacggaggaaggccgacgcgatgactctctgtccagcacttccgaggacagcgagaaagacgagaaggacgaagatcacgagagggagcggttttatatctacaggaaaccttcacacacctctaggaagaaggcaactggattcgccgcagttcatcagctcttcacagagcgctggcctactacccctgtgaaccgctcattgtctggtacagccaccgagcggaacatagactttgagcttgatattcgggttgaaattgatagcggaaaatgtgtcctgcaccccactacactgctgcaggaacatgacgacatctctctgagaagatcatatgaccgaagtagtcgaagtttggatcaagattctccttctaagaagaaaaagtttcagaccaattacgcctccaccactcatcttatgaccgggaagaaggttccaagtagcctgcagacgaagccgagcgacctggagacaacagtgttttacatcccaggagttgacgtgaaactgcactacaacagcaaaaccctgaaaaccgagagccccaacgcatctagaggatcctcgctgcctagaactttgtcaaaggagagcaaactttacggtatgaaagactccgccacctctcccccatcccctccccttccaagtacagtccaatctaaaacaaataccctgctgccccctcaaccacctccgatcccagcagcaaaggggaaggggtctgggggggtcaaaacagctaagctgtatgcctgggttgctttacaatctctgcctgaagagatggtgatttctccctgtcttcttgattttctagaaaaagcccttgaaactatcccaataacgccggttgagcggaactatacggccgtcagttctcaggatgaggacatggggcattttgagatacctgaccccatggaggaatccacgacctccctcgtttcttccagcacatccgcttatagtagcttccccgtggacgtggttgtgtacgtgcgtgttcagcctagccagattaaattctcctgtttgcctgtctcaagagtagagtgcatgttaaaattacctagtctcgacttggtcttttcatccaacaggggtgagctcgagacgctgggaaccacttatcctgctgagaccctgtcccctgggggcaacgcaacacagagtgggaccaaaacgtcggccagcaagaccggtataccagggtcaagcggtctcggcagcccactgggcagatctcggcatagcagcagccagtccgatttgacgtcatcatcctcatctagctcggggctcagctttaccgcctgcatgtcagacttctctctctatgtttttcatccctacggtgcaggcaaacagaagactgcagtaagtggactcaccccaggttctggaggtttgggtaatgtcgatgaggaaccgacaagcgtgaccggacgtaaggattctttatcgatcaatttggagttcgtgaaagtctcacttagtaggattcggcgatcggggggggcctcctttttcgaatctcaatcagtctctaaatctgcaagcaagatggataccactctgatcaacattagcgctgtgtgtgacattgggtcagcaagcttcaagtacgatatgagaagactgagcgaaatactcgccttccctcgcgcctggtaccgcagatctatcgcccggagactatttctgggcgaccagacaataaatctccctacgtccggtcctggaaccccagattcgatcgagggcgtgtcccaacatctgtcccccgaatccagtaggaaggcttattgtaagacttgggagcagccttcccagagtgcctcatttacacatatgcctcaatcgcccaatgtgtttaatgagcatatgactaacagtactatgtcaccagggacagtcggacagtccctgaagagccccgccagtatccgcagcagaagtgtgtccgatagttctgtacctcggcgcgactctctttcaaagacaagtactccatttaataagtccaacaaggctgccagccaacagggcacgccttgggagactctagtcgtgtttgccatcaacctgaaacagttaaacgtccagatgaacatgtctaacgttatgggcaacaccacttggaccacatctggactcaagtctcagggaaggttgagcgtgggctcaaaccgggatagagagatctctatgtcagtcggtttgggtcggagccagcttgattcgaagggtggcgttgtcggtggcacaattgacgtgaacgccttggagatggtggctcatatctccgagcacccaaatcagcagccttcacacaagatccagatcactatggggtcgacggaagctcgggtggactacatggggagctccattctcatggggatattctccaacgcggacctgaaactgcaggacgagtggaaggtgaatttgtataacactctggattcttctattaccgataagagtgaaatttttgttcatggcgatctgaagtgggacatattccaggtaatgatctctcggtctacaaccccagatctgattaaaattgggatgaagctgcaggagttttttacccagcagttcgacacttcaaaacgggcactgtcaacatggggacctgtcccatatctccctccaaagactatgacttcaaatctcgagaaatcgagccaggagcagcttctcgacgccgcccatcaccgccattggccgggggttctcaaagttgtctccggctgccacattagtctctttcagatcccccttcccgaggacggtatgcagttcgggggaagcatgtcattgcatgggaatcacatgacattggcatgctttcacggacctaattttaggtccaagagctgggcacttttccacctggaagaaccgaacatcgccttttggacggaggcacaaaaaatatgggaggacgggtctagcgatcattcaacctatattgtacaaacactggatttccacttaggacacaacacaatggttaccaaaccctgcggcgcactcgagtcccctatggccacgattactaagatcacgaggcgcaggcatgagaatccgcctcatggggtcgcctctgtaaaagaatggttcaactacgtgaccgccactaggaacgaagaacttaacctgctgcggaacgtggatgcgaataataccgagaactcgacaaccgtgaagaacagttctctgctgtccggcttccgaggaggctcctcatataaccatgaaactgaaacgatcttcgctcttccacgcatgcagctagattttaagtcaatccacgtccaggaaccccaggagcccagcctccaagatgccagcctgaaacccaaggtggaatgctcagtcgtcaccgaattcacagaccacatctgtgttactatggacgccgagttgataatgttcctgcacgacctcgtatccgcttacctgaaagaaaaggagaaagccatattccctcccaggatccttagcacaaggccaggtcagaaaagtcctatcataatccacgatgacaactcctcagacaaggaccgggaagacagtataacttacacaacagtggactggcgggattttatgtgtaatacctggcatctcgagccaacattgagattaatctcttggaccggccgcaagatcgatcctgttggggtcgattacatccttcagaagttgggcttccaccatgccagaacaactattccaaaatggctccagcggggggtgatggatcctctggacaaggtcctgagtgtcttaattaaaaaactgggaaccgcacttcaagatgagaaagagaagaaagggaaggataaggaagagcactag

SEQ ID NO: 278447 - DNA, 15018 bp, Artificial Sequence
  derived and/or modified sequence
atggaccagaggaagaatgaaagcatcgtgcccagcatcacccagctggaggacttcctgacagagcacaacagcaatgtggtgtggctgctggtggccaccatcctgagctgtggctggatcatctacctgacctactacaacagcagaaatgtgggcctcatcctgaccctggtgctgaacagactctacaagcacggctacatccacatcggcagcttctccttctctgtgctgagcggcaaggtgatggtgcgggagatctactacatcacagaggacatgagcatccgcatccaggacggcttcatcatcttccgctggtggaagatgtacaaccccaagcagaagcagcacgaccccaaggccgagacccggctgtacatcaccgtgaatgactttgagttccacgtgtacaacagaagtgacctgtatggccgcctgcaggagctgtttggcctggagcccaccatcatcccccccaagaaggatgatgacaagacccgggagattggaagaaccaggacccagagcaagattgaaagagtgaaggtgaagacagagagccaggaccccaccagctcctggaggagcctcatccctgtgatcaaggtgaatgtgtccacaggccgcctggccttcggcaaccactaccagccccagaccctgtgcatcaactttgatgatgccttcctgacctacaccaccaagccacccagcagccacctggaccagttcatgcacatcgtgaagggcaagctggagaatgtgcgggtgatgctggtgcccagccccaggtatgtgggcctgcagaatgatgagcccccccggctgatgggagagggctttgtggtgatgcagagcaatgatgtggacatctactactacatggatgagcccggcctggtgcctgaggagacagaagaaaatattgaaggagagatgagcagcgaggactgcaagctgcaggacctgcccccctgctggggcctggacatcgtgtgtgggaaaggaacagacttcaactacggcccctgggccgaccggcagagggactgcctgtggaagttcttcttccccccagactaccaggtgctgaaggtgtctgaaattgcccagcccggccggccccggcagatcctggcctttgagctgaggatgaacatcatcgcagatgccaccatcgacctgctcttcaccaagaaccgggagaccaatgctgtgcacgtgaatgtgggcgccggcagctacctggagatcaacatccccatgacagtggaggagaatggctacaccccagccatcaagggccagctgctgcacgtggatgccaccacctccatgcagtaccgcaccctgctggaggccgagatgctggccttccacatcaatgccagctacccccgcatctggaacatgccccagacctggcagtgtgagctggaggtgtacaaggccacctaccacttcatctttgcccagaagaacttcttcacagacctgatccaggactggagcagtgacagccccccagacatcttctcctttgtgccctacacctggaacttcaagatcatgttccaccagtttgagatgatctgggccgccaaccagcacaactggattgactgcagcaccaagcagcaggagaatgtgtacctggccgcctgtggggagaccctgaacatcgacttcagcctgcccttcacagactttgtgcctgccacctgcaacaccaagttcagcctgcggggggaggatgtggacctgcacctgttcctgcctgactgccaccccagcaagtacagcctcttcatgctggtgaagaactgccaccccaacaagatgattcatgacaccggcatcccagctgagtgccagagcggccagaagacagtgaagcccaagtggagaaatgtgacccaggagaagagcggctgggtggagtgctggacagtgcccagcgtgatgctgaccatcgactacacctggcaccccatctacccccagaaggcagatgagcagctgaagcagagcctgtctgagatggaggagaccatgctgtctgtgctgcggcccagccagaagaccagtgacagagtggtgagcagccccagcaccagcagcaggcctcccatcgaccccagcgagctgcccccagacaagctgcacgtggagatggagctgagcccagacagccagatcaccctgtatggccccctgctgaatgccttcctgtgcatcaaggagaactactttggagaagatgacatgtacatggactttgaggaggtgatcagcagccctgtgctgagcctgagcaccagcagcagcagcggctggacagctgtgggcatggagaatgacaagaaggaaaatgaaggcagcgccaagagcatccaccccctggccctgcggccctgggacatcaccgtgctggtgaacctgtacaaggtgcacggccgcctgcctgtgcacggcaccacagatggcccagaatgtcccacagccttcctggagcggctgtgctttgagatgaagaagggcttccgggagaccatgctgcagctgatcctgagccccctgaatgtgtttgtgtctgacaactaccagcagaggcctcctgtggatgaggtgctgcgggagggccacatcaacctgagcggcctgcagctgcgggcccacgccatgttttctgctgagggcctgcccctgggcagtgacagcctggagtatgcctggctgattgatgtgcaggccggcagcctgacagccaaggtgacagccccccagctggcctgcctgctggagtggggccagacctttgtgttccacgtggtgtgccgggagtatgagctggagcggcccaagagcgtcatcatctgccagcacggcatcgaccggcgcttctgtgagagcaagctgagctgcatccctggcccctgccccaccagtgatgacctgaagtacaccatgatccggctggccgtggatggagctgacatctacatcgtggagcacggctgtgccaccaacatcaagatgggcgccatccgggtggccaactgcaacctgcacaaccagagcgtgggggagggcatctctgctgccatccaggacttccaggtgcggcagtacatcgagcagctgaacaactgcagaattggcctgcagcctgctgtgctgcggcgggcctactggctggaggccggcagcgccaacctgggcctcatcaccgtggacatcgccctggccgctgaccaccacagcaagcatgaggcccagaggcacttcctggagacccatgatgcccggaccaagaggctgtggttcctgtggccagatgacatcctgaagaacaagcgctgcaggaacaagtgtggctgcctgggcggctgccgcttcttcggcggcaccgtgacaggcctggacttcttcaagctggaggagctgacccccagcagcagcagcgccttcagcagcaccagcgctgagagtgacatgtactacggccagagcctgctgcagcctggagagtggatcatcaccaaggagatccccaagatcattgatggaaatgtgaatggcatgaagaggaaggagtgggagaacaagtctgtgggcatcgaggtggagaggaagacccagcacctgagcctgcaggtgcccctgcggagccacagcagcagcagcagcagcgaggagaacagcagcagcagcgctgcccagcccctgctggccggggagaaggagagccccagctctgtggctgatgaccacctggtgcagaaggagttcctgcacggcaccaagagagatgatggccaggccagcatccccacagagatcagcggcaacagccctgtgagccccaacacccaggacaagtctgtgggccagagccccctgcggagccccctgaagaggcaggcctctgtgtgcagcacccggctgggcagcaccaagagcctgacagctgccttctatggagacaagcagcctgtgacagtgggcgtgcagttcagcagtgatgtgtccagaagtgatgaaaatgtgctggacagccccaagcagaggaggagctttggcagcttcccctacacccccagcgctgacagcaacagcttccaccagtaccgctccatggacagctccatgtccatggctgacagcgaggcctacttctctgctgctgaggagtttgagcccatcagcagtgatgagggccctggcacctacccaggcaggaagaagaagaagaagcagacccagcagattgactacagccggggcagcatctaccacagcgtggagggccccctgaccggccacggggagagcatccaggacagcaggaccctgcccttcaagacccaccccagccaggccagctttgtgtctgccctgggcggggaggatgatgtgattgagcacctgtacatcgtggagggggagaagacagtggagagcgagcagatcaccccccagcagcctgtgatgaactgctaccagacctacctgacccagttccaggtgatcaactggagcgtgaagcaccccaccaacaagaggaccagcaagagcagcctgcaccggcccctggacctggacacccccaccagcgaggagagcagcagcagctttgagcagctgtctgtgcccaccttcaaggtgatcaagcagggcctgacagccaacagcctgctggaccggggcatgcagctgagcggcagcaccagcaacaccccctacacccccctggagaagaagctggccgacaacacagatgatgagaccctgacagaggagtggaccctggaccagcctgtgtcccagaccaggaccacagccatcgtggaggtgaagggcaccgtggacatcgtgctgacccccctggtggccgaggccctggaccgctacatcgaggccatggtgcactgtgccagcaccaggcaccctgctgccatcgtggatgacctgcacgccaaggtgctgcgggaggccgtgcagaacagcaagaccaccttcagcgagaacctgagcagcaagcaggacatccggggcaccaagacagagcagagcaccatcggcaccaccaaccagggccaggcccagaccaacctgaccatgaagcaggacaacgtgaccatcaagggcctgcagaccaacgtgtccatccccaaggtgaacctgtgcctgctgcaggcctctgtggaggagagccccaccacagcccccagccgctctgtgacccacgtgtccctggtggccctgtgctttgacagaattgccacccaggtgaggatgaacagaggagtggtggaggagaccagcaacaatgctgagcccggccgcaccagcaactttgaccgctacgtgcacgccaccaagatgcagccccagagcagcggcagcctgcggagcaatgctggagctgagaagggcaaggagattgctgccaagctgaacatccaccgggtgcacggccagctgcggggcctggacaccacagacatcggcacctgtgccatcacagccatcccctttgagaagagcaaggtgctcttcaccctggaggagctggatgagttcacctttgtggatgaaacagaccagcaggccgtgcctgatgtgaccagaattggccccagccaggagaagtggggctggatcatgtttgaatgtggcctggagaacctgaccatcaagggcggccggcagagcggggctgtgctgtacaacagctttggcatcatgggcaaggccagtgacacagagcggggcggcgtgctgaccagcaacaacagcagtgacagccccactggaagtggctacaacacagatgtgtctgatgacaacctgccctgtgacaggaccagccccagcagtgacctgaatggaaattctgtgtctgatgagcaggatgaaggagtggagagtgatgacctgaagaaggacctgcccctgatgcctcctcctccagacagctgcagcatgaagctgaccatcaaggagatctggttctcctttgctgcccccaccaacgtgcgcagccacacccacgccttcagccggcagctgaacctgctgagcacagccaccccagctgtgggcgcctggctggtgcccatcgaccagctgaagagcagcctgaacaagctggagacagagggcaccctgcgcatctgtgctgtgatgggctgcatcatgacagaggccctggagaacaagtctgtgcacttccccctgcggagcaagtacaaccggctgaccaaggtggcccgcttcctgcaggagaaccccagctgcctgctgtgcaacatcctgcaccactacctgcaccaggccaactacagcatcattgatgatgccaccatgtctgatggcctgcctgccctggtgaccctgaagaagggcctggtggccctggcccggcagtggatgaagttcatcgtggtgaccccagccttcaagggcgtgtccctgcacaggcctgcccagcccctgaagccccagatcgccatggaccatgaacatgaagatggcctgggcctggacaatggaggcggcctgcagagcgacaccagcgcagatggagctgagtttgaatttgatgctgccaccgtgtctgagcacaccatgctgctggagggcacagccaacagacctcctcctggcagcagcggccctgtgactggagctgagatcatgaggaagctgagcaagacccacacccacagcgacagcgccctgaagatcaagggcatccacccctaccacagcctgagctacaccagcggggacacagccacagacagccctgtgcacgtgggccgggccggcatgcctgtgaaggacagccccaggaaggagagcctgctgagctacctgaccggcagcttccccagcctgcacaacctgctggagggcaccccccagaggagcagcgctgctgtgaagagcagcagcctgaccaggactggaaacacagtggccacagacatgctgtctgagcaccccctgctgtctgagcccagctctgtgtccttctacaactggatgagcaatgctgtgggcaacagaggctctgtgctgcaggagagccctgtgaccaagagcggccacaacagcctgcccaccggggtggcccccaacctgcccaccatccccagcgccagtgacttcaacacagtgctgagcagtgaccagaacaccctggatggcacccacagccagcacagcaccagccaggatgatgtggccggcgtggaggaggccaaccagggcttccctgctgtgcagctggctgatgcccaggtggtgttcaagcccctgctgagccacacaggcatccagagccaggacaccatgcccttctgctacaggatgtactttggagagcacctgtccttcagcggcaccctggactgcctgcgggctgacatcgtggacagcgacacagccaaggagaggaagggcaagagggcccggcggcagggccacgtgaacctgccccccctggagttcaagccagccctgatgctgggcaccttcagcatctctgctgtggtgatggagaagtctgtgtgcaccccccagaacagcaccagcgccctgtccttccatgacctgagcaagcgctactacaacaccttccactgcaacttcaccatcagctgccagagcatcagccagcacgtggacatggccctggtgcggctcatccaccagttcagcaccatgattgatgacatcaaggccacccagacagacatcaagctgagccgctacacagctggcagcgccagccccacccccaccttcaagaccaggaagcaccgggacttccgcagcagtgacttcagccgcagcagccggggcagcctgaatggaggcaacagagtgaacaatgccaagaacaagaggaccaacaatgaaaacaacaagaaggagagcaggaacaagaacagcctgggccgctcagaaagaaggaccagcaaggtgtccaggaagggcagcaaggatgtggtggaccacatgaccatccacatggatgacagcgacagcatcaccgtgtctgagcagagcgagcccagcgctgagtgctggcagaacatgtacaagctgctgaacttctacagcctcatcagtgaccccaccggcatcctggagaagagcagcgagaccttcggccctgctggggtgcgcagccccacagagcccacctgcaaggtggtgtttgaaaatgagcaggacaacagcagcctgaccaagacccagaggaagaggagcctggtgaccagcgagccccagcacgtgaccctcatcgtgtttggcatcggcatggtgaacagaacccacctggaggccgacatcggcggcctgaccatggagagcgagctgaagagaattcatggcagcttcaccctgaaggagaagatgaaggatgtgctgcaccagaagatgacagagacctgtgccacagcccacatcggcggcgtgaacatcgtgctgctggagggcatcacccccaacatccagctggaggacttccccaccagccccaccagcacagccaagcaggagttcctgactgtggtgaagtgcagcatcgccaagagccaggccctgtacagcgcccagaggggcctgaagaccaacaatgctgctgtgttcaaggtgggcgccatcagcatcaacatcccccagcacccagccaccctgcacagcatgatggtgcgcagcagccaccagctgagcaagcagatcagtgacctgatccggcagcccagcacagccccccagcctgtgaaggaggacatcgccacccccctgcccagcgagaagacccccacctctgtgaaccagacccctgtggagaccaatgagttcccccagctgcctgagggcctggagaagaagcccatcgtgctgaagttcagcgccatgctggatggcatcgccatcggggccgccctgctgcccagcctgaaggccgagtacaagatgggccgcatgaggagccacggcatgaccggggcccagacccgcttcacctttgagctgcccaaccaccggctgcgcttcaccagcaaggtgtctgccacagacatgagcaccatcccccccagcgccagcctgaacctgccccctgtgaccatgtctgggaagtacatcatggaggagcatgacagctacagcgaccaggtgtggagcattgatgagctgcccagcaagcagggctactacctgcagggcaactacctgcgctgtgtggccgaggtgggcagctttgagcacaacctgaccacagacctgctgaaccacctggtgtttgtgcagaaggtgttcatgaaggaggtgaatgaggtgatccagaaggtgtctggaggagagcagcccatccccctgtggaatgaacatgatggaacagcagatggagacaagcccaagatcctgctgtacagcctgaacctgcagttcaagggcatccaggtgacagccaccacccccagcatgagagctgtgcgctttgagaccggcctgattgagctggagctgagcaaccggctgcagaccaaggccagccctggcagcagcagctacctgaagctgtttgggaagtgccaggtggacctgaacctggccctgggccagatcgtgaagcaccaggtgtatgaggaggccggcagtgacttccaccaggtggcctacttcaagaccagaattggcctgagaaatgccctgcgggaggagatcagcggcagcagtgaccgggaggccgtgctgatcaccctgaaccggcccatcgtgtatgcccagcctgtggcctttgacagagctgtgctcttctggctgaactacaaggccgcctatgacaactggaatgagcagaggatggccctgcacaaggacatccacatggccaccaaggaggtggtggacatgctgcccggcatccagcagaccagcgcccaggccttcggcaccctcttcctgcagctgactgtgaatgacctgggcatctgcctgcccatcaccaacacagcccagagcaaccacactggagacctggacaccggcagcgccctggtgctgaccatcgagagcaccctcatcacagcctgcagcagcgagagcctggtgtccaagggccacttcaagaacttctgcatccgctttgctgatggctttgagacctcctgggatgactggaagccagagatccacggggacctggtgatgaatgcctgtgtggtgcctgatggcacctatgaggtgtgcagcaggaccaccggccaggccgctgctgagagcagcagcgctggcacctggaccctgaatgtgctgtggaagatgtgtggcattgatgtgcacatggaccccaacatcggcaagaggctgaatgccctgggcaacaccctgaccaccctgactggagaggaggacattgatgacattgctgacctgaacagcgtgaacattgctgacctgagtgatgaagatgaggtggacaccatgagccccaccatccacacagaggccacagactaccgccggcaggccgccagcgccagccagcccggggagctgcggggcaggaagatcatgaagagaattgtggacatccgggagctgaatgagcaggccaaggtgattgatgacctgaagaagctgggcgccagcgagggcaccatcaaccaggagatccagcgctaccagcagctggagagcgtggccgtgaatgacatcagaagagatgtgaggaagaagctgcggcgcagctccatgagagctgccagcctgaaggacaagtggggcctgagctacaagcccagctacagccgcagcaagagcatcagcgccagcggccggccccccctgaagaggatggagcgggccagcagccgggtgggggagacagaggagctgcctgagatccgggtggatgctgccagccctggcccccgggtgaccttcaacatccaggacaccttccctgaggagacagagctggacctgctgtctgtgaccatcgagggccccagccactacagcagcaacagcgagggcagctgcagcgtcttcagcagccccaagacccctgggggcttcagccctggcatccccttccagacagaggagggcagaagagatgacagcctgagcagcaccagtgaagattctgagaaggatgagaaggatgaggaccacgagcgggagcgcttctacatctacaggaagcccagccacaccagcaggaagaaggccaccggctttgctgctgtgcaccagctgttcacagagcgctggcccaccacccctgtgaacagaagcctgtctggaacagccacagaaagaaatattgactttgagctggacatccgggtggagattgattctggaaaatgtgtgctgcaccccaccaccctgctgcaggagcatgatgacatcagcctgcggcgctcctatgacaggagcagccgcagcctggaccaggacagccccagcaagaagaagaagttccagaccaactatgccagcaccacccacctgatgaccgggaagaaggtgcccagcagcctgcagaccaagcccagcgacctggagaccaccgtcttctacatccctggggtggatgtgaagctgcactacaacagcaagaccctgaagacagagagccccaatgccagccggggcagcagcctgcccaggaccctgagcaaggagagcaagctgtatggcatgaaggacagcgccaccagcccccccagcccccccctgcccagcacagtgcagagcaagaccaacaccctgctgcccccccagcccccacccatcccagctgccaagggcaaaggaagtggaggagtgaagacagccaagctgtatgcctgggtggccctgcagagcctgcctgaggagatggtgatcagcccctgcctgctggacttcctggagaaggccctggagaccatccccatcacccctgtggagaggaactacacagctgtgagcagccaggatgaggacatgggccactttgagatcccagaccccatggaggagagcaccaccagcctggtgagcagcagcaccagcgcctacagcagcttccctgtggatgtggtggtgtatgtgcgggtgcagcccagccagatcaagttcagctgcctgcctgtgtcccgggtggagtgcatgctgaagctgcccagcctggacctggtgttcagcagcaacagaggagagctggagaccctgggcaccacctacccagctgagaccctgagccctggaggaaatgccacccagagcggcaccaagaccagcgccagcaagacaggcatccctggcagcagcggcctgggcagccccctgggccgcagccgccacagcagcagccagagcgacctgaccagcagcagcagcagcagcagcggcctgtccttcaccgcctgcatgtctgacttcagcctgtatgtgttccacccctatggagctgggaagcagaagacagctgtgtctggcctgaccccaggcagcggcggcctgggcaatgtggatgaggagcccacctctgtgactggaaggaaggacagcctgagcatcaacctggagtttgtgaaggtgtccctgagccgcatccgccgcagcggcggggccagcttctttgagagccagagcgtgtccaagagcgccagcaagatggacaccaccctcatcaacatctctgctgtgtgtgacatcggcagcgccagcttcaagtatgacatgaggcggctgtctgagatcctggccttcccccgggcctggtacagaagaagcatcgcccggcggctcttcctgggggaccagaccatcaacctgcccaccagcggccctggcaccccagacagcattgagggcgtgtcccagcacctgagccctgagagcagcaggaaggcctactgcaagacctgggagcagcccagccagagcgccagcttcacccacatgccccagagccccaacgtgttcaatgagcacatgaccaacagcaccatgagccctggcaccgtgggccagagcctgaagagccctgccagcatccgcagccgctctgtgtctgacagctctgtgccccggcgggacagcctgagcaagaccagcacccccttcaacaagagcaacaaggccgccagccagcagggcaccccctgggagaccctggtggtgtttgccatcaacctgaagcagctgaatgtgcagatgaacatgagcaatgtgatgggcaacaccacctggaccaccagcggcctgaagagccagggccgcctgtctgtgggcagcaacagagaccgggagatctccatgtctgtgggcctgggccgcagccagctggacagcaaaggaggagtggtgggcggcaccattgatgtgaatgccctggagatggtggcccacatcagcgagcaccccaaccagcagcccagccacaagatccagatcaccatgggcagcacagaggcccgggtggactacatgggcagcagcatcctgatgggcatcttcagcaatgctgacctgaagctgcaggatgagtggaaggtgaacctgtacaacaccctggacagcagcatcacagacaagtctgagatctttgtgcatggagacctgaagtgggacatcttccaggtgatgatcagccgcagcaccaccccagacctgatcaagattggcatgaagctgcaggagttcttcacccagcagtttgacaccagcaagagggccctgagcacctggggccctgtgccctacctgccccccaagaccatgaccagcaacctggagaagagcagccaggagcagctgctggatgctgcccaccaccgccactggccaggagtgctgaaggtggtgtctggctgccacatcagcctcttccagatccccctgcctgaagatggcatgcagtttggaggctccatgagcctgcacggcaaccacatgaccctggcctgcttccacggccccaacttccgcagcaagtcctgggccctcttccacctggaggagcccaacatcgccttctggacagaggcccagaagatctgggaggatggcagcagtgaccacagcacctacatcgtgcagaccctggacttccacctgggccacaacaccatggtgaccaagccctgtggggccctggagagccccatggccaccatcaccaagatcaccaggagaagacatgagaaccccccccacggcgtggcctctgtgaaggagtggttcaactacgtgacagccaccagaaatgaggagctgaacctgctgagaaatgtggatgccaacaacacagagaacagcaccaccgtgaagaacagcagcctgctgagcggcttccggggcggcagcagctacaaccacgagacagagaccatctttgccctgcccaggatgcagctggacttcaagagcatccacgtgcaggagccccaggagcccagcctgcaggatgccagcctgaagcccaaggtggagtgcagcgtggtgacagagttcacagaccacatctgtgtgaccatggatgctgagctgatcatgttcctgcatgacctggtgtctgcctacctgaaggagaaggagaaggccatcttccccccacgcatcctgagcacccggcccggccagaagagccccatcatcatccatgatgacaacagcagtgacaaggacagagaagattccatcacctacaccaccgtggactggagggacttcatgtgcaacacctggcacctggagcccaccctgcggctcatctcctggacaggcaggaagattgatcctgtgggcgtggactacatcctgcagaagctgggcttccaccacgcccggaccaccatccccaagtggctgcagaggggcgtgatggaccccctggacaaggtgctgtctgtgctgatcaagaagctgggcacagccctgcaggatgagaaggagaagaagggcaaggacaaggaggagcactag

SEQ ID NO: 278448 - DNA, 15018 bp, Artificial Sequence
  derived and/or modified sequence
atggaccagcggaagaacgagagcatcgtgcccagcatcacccagctcgaagattttctgactgaacataattccaacgtggtttggttacttgtagctacaattctttcttgcggctggatcatttatcttacctattataattcccgcaatgtgggtctgatactaaccctggtcctcaaccggctgtacaaacacgggtacattcatatcggatcattttccttctcagtgttgtccggaaaggttatggttagggagatttactacatcactgaagatatgtcgatacggattcaggacgggttcataatttttcgctggtggaagatgtacaatccaaagcaaaagcaacacgacccgaaagccgagacccgcctgtacatcacagtgaacgacttcgagttccacgtgtacaaccgaagcgatctgtacggaaggctgcaggagctgtttgggctcgagccaacaattattccacccaaaaaagatgatgacaagactcgcgaaatagggagaacacgtacccagtctaaaattgaaagagtaaaagtgaagacagagtcacaggatccaactagcagttggcggagtctaatcccagtcatcaaagtcaacgttagcactggccgcttggctttcggaaatcattaccaaccccaaacattatgtatcaatttcgacgatgccttcctaacgtacactacaaagcctccctcgagccacctcgaccaattcatgcacatcgtgaagggcaagcttgagaatgtgcgggttatgttagtgcctagcccacgttatgttggattgcagaatgacgagcccccacgccttatgggagaaggcttcgtcgtgatgcagtctaatgatgtagacatttattattacatggatgaacccggcctcgtacctgaggagacagaggaaaatatagagggtgagatgtcatctgaggattgtaaactgcaagatctcccgccgtgttggggactggatatcgtatgtgggaagggcaccgattttaattacggtccgtgggccgaccgacagagagactgtctttggaaattcttttttcctcctgattaccaggtgttaaaagtgagcgagatcgctcaacctggacggccacggcagattttagccttcgagcttaggatgaatatcatagcagacgccacaattgacctcctgttcactaaaaaccgcgagactaatgcagtgcacgtgaacgtcggcgccggctcatacctcgaaattaacatccccatgactgtcgaagagaacgggtacacgcctgccatcaagggccaattgctgcacgtggacgctacaacctctatgcagtatagaaccctactggaagctgagatgctggcatttcacataaacgctagctacccacgaatatggaacatgccacagacctggcagtgcgagttagaggtctacaaggcgacctaccattttattttcgcacagaaaaacttttttactgacctcattcaggattggtccagcgacagtcctccagacatttttagcttcgttccatatacgtggaacttcaagattatgtttcatcagttcgagatgatctgggcggcgaatcagcataattggattgattgctcgactaagcaacaggagaacgtctacctcgcggcttgtggggagaccctcaatatcgatttttccctgcccttcaccgattttgtgcctgccacatgcaatacaaagttcagcctgcgcggagaggacgttgatctgcatttgttccttccagactgtcaccccagtaaatatagtctgtttatgctagtgaagaactgccatcccaacaaaatgatccacgataccgggattcccgccgaatgtcaatccggccaaaaaaccgtaaagcctaaatggcgcaatgtcacccaggaaaaatccgggtgggtggagtgctggacagtgcccagtgtgatgctcacaatcgattacacgtggcacccaatttatcctcagaaggctgatgaacagctgaagcagtctcttagcgagatggaagaaactatgctgagcgtcctgcgaccctcccagaagacatccgatagggtggtgagcagtcctagtaccagctctcgtcccccaatcgacccttccgagctaccccccgacaaactgcacgtcgagatggagctcagtcctgactctcaaattaccctctacggtccactgctcaatgcttttctctgtatcaaggaaaactacttcggtgaggacgatatgtacatggactttgaggaggtcattagcagccctgtgctgtcactgagcactagctcatccagcggctggactgccgtaggaatggagaacgacaaaaaggagaatgaaggttctgctaagagcatccatccgttagccttacgaccctgggacatcactgtccttgtaaacctttacaaggtccacggaagacttccggtgcatgggacaacggacggtccagagtgtcccacagccttcctcgagaggctttgcttcgaaatgaagaagggttttcgcgaaacaatgctgcagctgatcctcagtccgttgaacgtgtttgtatcagacaactaccagcagcgtccgcctgttgatgaggttctgcgggagggacacatcaacctatctgggctgcagctgcgcgctcacgccatgttctcagctgagggcttaccactgggctccgactcccttgaatatgcctggttgatagacgtgcaggccggtagtctgactgctaaagttaccgctccacagctggcctgcctactcgaatgggggcagaccttcgtgttccatgtggtgtgtcgcgagtacgagctggagcgccccaagtcagtgatcatttgccaacacggaatagacaggagattttgcgagagcaagctctcctgcattccaggcccgtgcccaacctctgacgacctgaagtacactatgataagactggcagtcgacggggcggatatttatatcgttgagcacggttgcgcaacaaacatcaagatgggggcaatccgagtggcaaactgtaacctacataatcagtctgtaggggaggggatcagtgccgccatccaggacttccaggtgaggcagtatattgagcagctgaataattgtaggatcgggctacagcccgccgtccttcgcagggcttactggttggaggctggaagcgccaatctcggtctaatcacagtcgacatagccctggctgccgatcaccactcaaagcacgaagcacagagacatttcttggagactcacgacgcacgcacaaagcggctttggttcctgtggcctgatgacatccttaagaataagcgatgtcgcaacaagtgcggctgtttgggcgggtgcagatttttcggaggtacagtaactggcctcgattttttcaagctggaagagctgacaccctcaagctcttcagccttctcttccacttccgccgaatcagatatgtattatggacagagcctcctccagccaggagaatggatcattactaaggaaatcccaaagattatcgacggcaacgttaacggaatgaaaaggaaggaatgggagaacaagtctgttggtattgaggtcgagcggaaaacacagcacttgagtctgcaagtgccacttcgctcacacagcagttcctcgtccagtgaggaaaatagtagctccagcgccgcacagccactgctggccggagagaaagaatccccttcttctgtggcggacgaccacttggtccagaaagaattcctgcacggtactaaaagggacgacggccaggcatctataccgactgagatttctggcaactccccagtgtcacccaacacccaggataaaagtgtcggccagtcacctttacgcagccctctgaagaggcaggcttccgtctgctctacccgattgggatccaccaaatccttgactgctgcgttctacggggacaagcagccagtgactgtgggcgttcaatttagttctgatgtatcacgcagcgacgagaatgtcctagacagccccaaacaaaggcggagtttcgggagttttccttacacacccagcgccgacagcaacagtttccaccagtataggagcatggattcgtccatgagcatggccgattcagaggcatattttagcgccgcagaagagttcgagccgatttcatcagatgagggcccagggacataccccggtcggaagaagaaaaaaaagcaaacgcagcagatagactatagcagaggttctatctatcactctgtcgaaggcccattgacggggcacggggagagtatccaggattcgcgtactctgcccttcaagacccatccatctcaggcttccttcgtgtcagcactcgggggcgaggacgatgtcatcgagcatctgtacatcgtggaaggagagaaaaccgtcgaatccgagcagattacacctcaacagcctgtgatgaactgctatcaaacgtatctaactcagttccaggtcataaattggtccgtcaaacaccccacgaataaacgaacttccaaatcttccctgcatcggcccctggacctggacacccccacaagcgaggaatcaagctcttcatttgaacagctttccgtcccaacattcaaagtcattaaacaaggcctgactgctaattcccttctcgacagggggatgcagctgtctggcagcaccagtaatacgccatatacaccactcgaaaagaagctagcggataatactgacgacgagaccctcaccgaggagtggacactggaccagcctgtgagtcagactagaaccaccgccattgtggaagtcaaagggaccgtcgatatagtcctcacccccctggtcgcggaagcgctggataggtatatcgaggctatggtgcactgcgcctctacaaggcatcccgctgccattgttgacgacctccatgccaaagttctgcgggaggccgtgcagaacagcaagacaacatttagtgaaaatctatctagtaaacaggacatccgaggaacgaagacagaacaatctacgatcggaaccacaaaccaaggacaggctcagactaacttaactatgaaacaggacaatgtcaccatcaagggtctgcagactaacgtgtctatacccaaggtgaacctgtgtttactccaagcctccgtggaagagtcaccgaccacagccccgtctcggtcagtcactcatgtgtccttggtggctctgtgttttgaccgcatagcaactcaggtcagaatgaaccggggcgtcgtcgaggaaacctccaataatgctgagcccggacgcacaagcaactttgacaggtacgtgcacgcgaccaaaatgcagccccagtccagcgggtccttgaggtccaacgctggcgctgaaaaaggaaaggagattgcagcgaagcttaacatccacagagtccacgggcaactaagaggccttgacaccaccgacattggcacttgcgccattaccgctattccattcgaaaaatcaaaggtcctgtttactctggaggagctggacgaattcactttcgtcgatgaaaccgaccaacaggctgtgcctgacgtcactagaattgggcctagccaggagaaatgggggtggattatgtttgagtgcgggctagagaacttaaccatcaaaggtggacgtcagtcaggcgcagtgctctataattcattcggcattatgggcaaggcctccgataccgaaagaggaggcgtattgaccagcaataatagtagcgactctccaactggctcaggctacaacacggacgtgtctgacgacaacctgccatgcgacaggaccagccccagttccgaccttaatgggaactcagttagcgacgaacaggatgagggagtcgaatccgatgatttaaaaaaggacctgccactgatgcctccacctccagatagttgcagcatgaaactcaccatcaaagagatttggtttagcttcgctgcgcctacaaacgtgaggtcccacactcatgccttctcaaggcaactcaacctactaagcacggcgactccggctgtcggcgcttggttggtcccaattgaccagctgaagagcagtttgaataagctggagacagagggcacactgaggatctgcgcagttatggggtgcattatgacagaggccctagagaataagagtgtgcactttcctctgcgcagcaaatacaaccgcctcacaaaagtcgctcgctttctgcaagagaatccctcttgtttactttgtaacatcctgcatcactatctgcatcaagcgaattattcgatcatcgatgatgccacgatgtcagacggtcttccagccctggtcactctaaaaaagggcctcgtagcactagctaggcagtggatgaagttcatcgtggtgactcccgccttcaagggtgtgtcattgcatcggcccgcccaacctctcaagccccagatcgctatggatcatgaacacgaggatggcctcggactggacaatgggggggggctgcagtctgatacatcggctgatggcgccgaattcgagttcgacgcagcaacagtgtctgagcacacaatgctgctggagggcacagcaaaccgcccccctcctggaagctctggtccagtcacaggtgccgagattatgaggaagctcagtaagacgcatactcactcagactctgcccttaaaatcaagggcattcacccctatcactcactgagctatacgtccggagataccgccactgacagccccgtccacgtcggaagagcaggtatgcccgtgaaggatagcccacgaaaggaaagcctgttaagctacctgaccgggtcttttccctccctccacaacttgctggaaggaactccccagcggagtagtgcggccgtgaagtcatcttccctgacccggacaggaaacactgtcgctactgatatgctatccgagcatcctctcctgagcgagccctccagcgtgtcattctataactggatgtctaacgcagtaggcaacagaggtagtgttctacaagagtctccagtcacaaagtcaggtcataactctctgccaacgggagtagcccccaatttgccaacaatacccagtgccagcgatttcaacacggtgctaagttcagatcagaacactctggacggaactcattcacagcactcgaccagccaggacgacgtggctggggtcgaggaggcaaaccagggtttccccgccgtccagctcgcagatgcacaggtcgtatttaagccattgcttagccatacaggcattcagtcgcaggacaccatgcctttctgctaccggatgtacttcggggagcacttatctttttcagggaccctggactgtcttagagcagatatcgtggactcagacaccgccaaagagcgaaaagggaagcgcgcccggcgacagggccatgtgaatttacctccactcgaattcaagccagcccttatgctgggtactttttctatcagcgccgtcgtgatggagaaatccgtttgcacaccgcaaaactccacttccgctttgagcttccacgacctatccaaaagatattacaatacgttccactgtaatttcacaatcagttgtcaaagcatttcgcagcatgtggacatggcactggtgcgacttattcaccaattctcaactatgatcgatgatattaaggcaacccagactgatatcaaactgagccgctacaccgccggtagtgctagtcccactcccacatttaagacacgaaaacatcgggattttaggagctcggatttttcacggagcagcaggggctccctgaacggtgggaaccgcgtgaataatgctaagaacaagcgaaccaataacgagaacaacaaaaaggaatcccgaaacaagaatagcttggggagatcagagaggcggacatctaaggtctccagaaagggaagcaaagacgttgtggaccatatgacaatccacatggacgactctgacagcatcacagtttctgagcaaagcgagccctccgctgagtgctggcagaatatgtataagctcttaaacttctacagcttgattagcgatcctaccggcatcttggaaaaatctagcgagaccttcggcccagccggggtgaggagccccactgagcctacatgcaaagtggtattcgaaaacgaacaggataatagttccttaactaagacacagcgaaagagatcactggtaaccagcgaaccacagcacgttaccctaattgtgtttgggatcggcatggtaaaccgcacacacctggaggcagacattggcggcctaaccatggagtctgagctgaaacgaattcatggctcattcaccctgaaagagaagatgaaagacgtgctgcatcagaaaatgacagagacctgcgccaccgcacacatcggtggggtgaacattgttctcttggagggcatcactcccaatattcagctcgaggacttccctacttctccgacgagcaccgccaagcaggagttccttacagtggtgaagtgctccatcgccaaatcccaagcactatactctgctcaaaggggactcaagactaacaacgccgccgtgttcaaggtgggggcgatatcaataaacattcctcagcacccagctactttgcattctatgatggtcaggagttcccatcagttatccaagcagatttccgatttgattaggcaacccagtaccgccccacagccagtgaaagaggatatcgcaacccctctaccctccgaaaagacacctacaagtgtgaaccagacgcctgttgagactaatgagttcccccagctccctgaggggctcgaaaaaaagcctatcgttttgaagttttcagcaatgctggatgggatcgccatcggtgctgctcttctcccatcactgaaagctgaatataagatgggacgcatgcgctcccacggcatgacaggggcccagactaggttcacctttgaactcccaaaccaccggctgaggttcacaagtaaagtgtcggcgacggacatgtctacaatccctccctccgcctcgctcaatctgcccccagtcaccatgtcaggtaagtacattatggaagaacatgactcctattctgaccaggtgtggtcaatcgacgaactccctagcaaacagggctactatctccagggaaattacctgaggtgtgtcgcggaggtcggatccttcgagcataaccttactaccgacctgctgaaccaccttgtatttgtgcaaaaggtgttcatgaaagaagtcaacgaagttatccagaaagtgtctggcggcgagcaaccgatccccctgtggaacgagcacgatggcactgcagatggagacaagccaaagatcctgctgtactccctaaatctccagttcaagggaatccaggttacagccaccacaccgtccatgcgcgccgtgcgtttcgaaactggcctcattgagctcgagctgagcaacaggcttcagactaaagccagtccaggatcctctagctatcttaaattgttcggcaagtgccaggttgacctcaatttggccctgggccagatcgtgaaacatcaagtgtacgaagaagctgggtccgacttccaccaggtcgcctacttcaaaactagaatcggacttcggaacgccctgagagaggaaattagtgggtcctcagatagggaggcggtgctgatcaccctcaataggcccatcgtttacgcccagcctgttgcatttgaccgggccgtgctcttctggttaaactacaaggctgcatacgataattggaatgagcagcgcatggccctgcacaaggatatccatatggccaccaaggaagtggtagacatgctgcctgggattcagcagacgtccgcacaggcttttggaacattgtttttgcagctcactgtcaacgacctgggcatttgtttgccgatcaccaatacggcccaaagcaaccacactggggacctagatacaggcagcgccctcgtgctgaccatagagagcaccctgatcacagcatgttcctccgaatctttggtgagcaaaggccattttaaaaatttttgtatcaggtttgcagacgggttcgaaacctcctgggacgactggaaacccgaaattcacggagacctggtcatgaacgcgtgcgtagtgccagacgggacttacgaggtgtgttcaaggacaacagggcaggccgctgccgaatcttctagtgctggtacatggaccctcaatgtgctgtggaagatgtgcggtattgatgtccatatggatccaaacatcggaaagagattgaacgcgctcgggaacaccctcacaactctgacaggagaggaggacatcgacgacattgctgaccttaacagcgttaatatagctgacttgtcagacgaggacgaggtcgatacaatgagcccaacgatccacactgaagccaccgattatcgcagacaggccgcgtccgcttcccagcccggagaacttcgtgggagaaaaattatgaaacgtatcgtcgatatcagagagctgaacgaacaggccaaagtgattgacgatctgaagaagctcggggcgtccgaaggaacaatcaaccaggaaattcagcgctaccaacagctggaatctgtagccgtgaatgacattcgccgcgacgtcagaaaaaaactcaggaggagctccatgagggcagctagcctcaaagacaagtggggactatcctacaagccatcctacagccgcagtaagtcaattagcgcgtctgggagaccaccccttaagcggatggaacgggcctcatcccgggtgggcgaaactgaagaactgcctgagatcagggtggacgcggccagtccaggaccaagagtgaccttcaatattcaggatacatttcctgaggagactgagcttgaccttctgtccgttaccatcgagggacctagccactacagctccaactctgagggaagctgttcagtgttcagctcgcccaagacgcctggaggcttcagccctggtatcccgtttcagacagaggagggccgtcgagacgactccctatctagcacgtccgaggattctgagaaagacgaaaaagatgaggatcatgagcgagaacggttttacatttaccggaaaccttcgcacacaagccggaagaaggccacaggttttgccgcagtccatcagctgtttactgaaagatggcccaccacacctgtgaatcgctctctgtcaggaacggctacagaacggaatattgacttcgaactagatatccgcgtcgaaattgattccgggaagtgtgtgttgcaccctactactttgctgcaggagcacgatgacatcagtctcagaaggagctacgataggtccagtaggagcctggatcaagattctcccagtaaaaaaaagaagttccagacaaattatgcttcaactacacacctgatgactggtaaaaaagtgccttctagtctacaaacgaaaccatccgatctggagaccacggtgttctacatcccaggcgtagatgttaagctgcactacaatagcaaaactctcaagactgaatctcctaacgccagccgcggtagcagcctgcccaggactttatcaaaagagagcaaactgtacggaatgaaagacagcgctacatcgccccccagtccccctcttcccagcacggtgcaatctaagactaataccctgctgcctccccagcctcccccgatcccagcagctaagggtaaagggtcgggcggggttaaaaccgccaagctctatgcctgggttgcccttcagtcccttcccgaagaaatggtgattagtccttgtctgctcgatttcctggagaaagctctggagacaattcccatcacacctgttgagagaaattacacagccgtgtctagccaggatgaggatatgggccattttgaaatcccagatcctatggaagagagtacgacttcgttggtgtccagttccacttcggcctacagtagctttcccgtggacgtcgtggtatatgtgcgggtgcagccgagtcagattaaattcagttgtctgcccgtctcccgggtcgaatgtatgctcaagctgccttctctcgatctcgtgttctctagtaacaggggcgagttagaaacactgggcacaacttaccctgccgagacactgagcccaggcggcaacgctacacagtccggtactaagacgtctgcctccaagactggtattccaggctcctcagggctcgggtcccctctggggcgatcacggcactcaagctctcaatctgatctgacttcttcctcctctagcagctcagggctcagttttaccgcctgcatgtctgacttctccctctatgtatttcacccttacggggccggcaaacaaaaaacagccgtgagcggcctcacccccggatccggcggacttggtaacgttgacgaggaacctacaagcgtcacagggaggaaagacagcttatctattaacctggagttcgtgaaggtgtcacttagccggatccggcggtctgggggggcttctttcttcgagagccagtctgtgtcgaagtcagcctctaagatggatactacacttatcaatattagtgccgtatgtgacatcggaagcgcttcctttaagtacgacatgcgtaggttgagtgaaatactggcattccctcgggcttggtatcggaggagcattgcccgcagactgtttttgggagatcagacgattaacctgcccactagtggcccagggacaccagacagcatcgaaggagtgagccagcacctgtcgcctgagtctagcaggaaggcatactgtaagacatgggaacaacccagtcagagcgcatcattcacccacatgccacagagccccaacgtatttaatgagcatatgactaactcaacaatgtccccgggcaccgtggggcagtccctgaaaagcccggcctcgattcggagccgtagtgtttctgatagtagtgtcccacgccgggattccctctctaagacctccacgccatttaacaagtccaataaagccgcctcccagcaagggacaccctgggagacattggtggtatttgccattaacctcaagcaactgaacgtgcaaatgaacatgagtaacgtaatgggcaataccacctggactactagtggccttaagtcccaggggagacttagcgtagggtctaatcgcgaccgggagattagtatgagcgttgggcttgggcggtcccagctggactcgaagggtggggtggtcggtgggacgatagacgtgaatgccctggagatggttgcacatatcagcgaacatcccaaccaacaaccaagtcataagatccagattacaatggggtctacagaagcccgcgtggactacatgggaagttcaattttaatgggcatcttcagcaacgcagatttgaagctgcaggatgagtggaaggtgaacctgtacaacaccctggattccagcataactgacaagagcgaaatttttgttcatggtgacctgaagtgggatatttttcaggttatgattagcagaagtacaactccggacctgattaagatagggatgaagcttcaggagttctttacccagcagttcgacacgtctaaaagagcactcagtacctggggaccagtgccctatctaccacctaaaacaatgacgagtaatttagagaaatccagccaggagcagctgctggatgcagcacatcaccgccactggcccggcgtcttgaaggtcgtgtctgggtgccacatctcattgttccagattcctttgcctgaagatgggatgcagttcggcggaagcatgtcactccacggaaatcatatgaccttggcctgtttccatggccctaattttcgaagcaaatcatgggcactcttccacttagaggagcctaatatcgccttttggaccgaggcacagaaaatctgggaggacggatcttccgatcactcaacttatatcgttcagactttagactttcatctgggacacaatactatggtcacaaaaccttgcggcgcactcgagtctcctatggctaccattaccaagattacacggagaagacacgagaaccccccccacggggttgcaagcgtgaaggagtggttcaactacgttaccgctacgaggaacgaagaacttaatctgctgagaaacgttgacgctaacaacacagaaaactctacaaccgttaaaaatagcagcctactcagtgggttccggggaggctcctcttataaccacgagactgaaacaatttttgccctgccgagaatgcagctcgattttaagtccattcatgtgcaggagccgcaggagccaagcctacaggacgccagccttaagcccaaagtggaatgttcagtggtcaccgaattcaccgaccatatttgtgttacaatggacgcagaattgattatgtttctgcacgacctggtatcagcttacttgaaggaaaaagagaaggccatctttcctcctagaatcctcagtactcgccctggccagaagagtccaatcataatacacgatgataacagctcagacaaagaccgggaggatagcattacttacacaactgtggattggcgcgacttcatgtgcaatacctggcatctggagcccactctgcggctaatttcctggactggccgcaagatagaccccgtgggagtcgactatatcttgcagaaacttggctttcaccacgctcgcacaaccatcccaaaatggctgcaacggggtgtgatggatcctctggacaaggtattaagtgtcctgattaaaaagctgggtacagccttgcaggacgagaaagagaaaaaagggaaggacaaggaagaacattag

SEQ ID NO: 278449 - DNA, 15018 bp, Artificial Sequence
  derived and/or modified sequence
atggaccagcggaagaacgagagcatcgtgcccagcatcacccagctcgaagactttcttacagaacacaactcaaacgtagtttggctgctggtggcgacaattcttagctgtggatggattatatacctgacctattataacagcaggaacgtggggcttatcctcactctcgttctcaacaggctctacaagcacggatatatacacattggatccttttcattcagtgtccttagcgggaaggtaatggtccgggagatatactacatcacagaagacatgagcatccggatccaggacggatttatcatttttagatggtggaaaatgtacaatcctaagcaaaagcagcacgatcccaaggcagagacaagattgtatataacagttaacgactttgaatttcatgtatacaacagaagcgatttatacggaaggctccaggaattgtttggccttgagcctaccataatccctcctaaaaaggacgacgacaaaacccgggagataggtcgtacacgaacgcagtccaaaattgagcgggtcaaggtgaagacggagtctcaggacccaacctcctcttggcgtagcttaattccagttattaaggtgaatgtcagtaccgggaggttagcatttggaaatcattaccagccccagactctgtgcattaacttcgacgatgcattcctcacttacaccacaaagccaccctcctcacatctggatcagttcatgcatattgtcaagggcaagctcgagaacgttagggtcatgctagtcccaagcccaagatacgtgggactccaaaatgatgagcccccgagactgatgggcgagggcttcgtggtgatgcagtcaaatgacgtggatatttactattatatggacgagcctgggctagttcccgaggagacagaggagaacatagagggcgaaatgagctctgaggactgcaagctgcaagatctccctccatgctgggggttggacatagtatgtggtaagggcaccgacttcaactacggtccatgggccgatagacagagagactgcctgtggaagttctttttcccccctgactatcaggtgctgaaggtcagtgagattgcccagcctggccgtccgagacagatcctcgccttcgaactgaggatgaacattatcgccgacgctacaattgacttgttattcacaaagaacagagaaactaacgcagttcacgtgaatgttggagctgggtcatatcttgaaatcaatatcccaatgacagtagaagagaacggctacaccccagccattaaagggcaactactgcatgttgacgcaacaacctccatgcaataccgaactcttctggaagcggaaatgttggcctttcatatcaacgcctcctatccgaggatttggaatatgcctcagacatggcagtgtgagctcgaagtttacaaagcaacgtaccacttcatctttgcccagaaaaatttcttcactgacctaatccaggattggtcctctgattctcctcctgacattttctcatttgtgccttatacctggaactttaagattatgtttcaccagtttgagatgatatgggcagctaaccagcacaattggatcgattgttccaccaagcagcaggaaaacgtctaccttgctgcctgtggcgagactttgaacatagatttctcactcccttttaccgattttgtgcctgcaacatgcaacacaaagtttagcttgagaggagaggacgtggacttgcaccttttcctgcccgattgtcacccgtccaagtactccctgtttatgttggtgaaaaactgtcatccgaataaaatgattcacgatactggcatccccgctgaatgtcagagcggacagaagaccgtgaaacccaagtggcgcaatgttactcaagagaaatctggctgggttgaatgctggacagtaccaagtgtaatgttaactatcgattacacatggcaccccatatatcctcagaaagctgacgagcaactgaaacagtcgctgagcgagatggaggagacgatgctgagtgtgttaaggccatcccagaagaccagcgacagggtcgtgtcctctccctctactagtagtcgcccacctattgaccccagcgaactcccccctgacaagctccacgtggagatggagctgtcacccgattcacaaatcactctctatggacccttactgaatgcctttctctgtatcaaggagaactattttggcgaagatgatatgtatatggattttgaggaggttatctcctcacccgtcctgtctttatctaccagctcgagctccggctggactgcggtgggtatggaaaatgataagaaagagaacgagggtagcgcaaagtcaatacacccactggctcttaggccctgggatattaccgtcctagttaatctgtataaagtgcacggcaggctccctgtgcacggtaccacagatgggccggaatgcccaacggccttcctagagcgcctgtgctttgagatgaagaaaggctttagggagactatgttgcagctgattttgtcacccctcaatgtatttgtgtcagataattaccagcagaggccgcctgtggatgaggtcttgcgagaaggacatattaatctaagcggtttgcagctacgcgcacacgccatgttctccgctgagggacttccactgggttctgactccctcgagtatgcctggctgatagatgtgcaggcagggtcgctgactgcaaaggtcaccgcaccacagttagcctgcctgttagaatgggggcaaaccttcgtgtttcacgttgtatgtcgcgagtatgagctggaacgccctaagagcgtaattatctgccagcatggcatagatcgccgcttttgcgaatctaaattaagttgcattcccggtccttgccccaccagtgacgatctgaagtatactatgatcaggcttgccgtcgatggcgctgatatttatattgtggaacatggatgtgccactaacattaaaatgggggctattcgtgtggcaaattgtaatctgcataaccagtccgtgggtgaaggaattagcgctgccatccaggactttcaagtacgccagtacatcgaacagttgaacaactgtagaatcggtctccagccagccgtgttacgccgagcctactggttagaggccggaagtgccaatttgggactcataacagtcgacatagctctcgcagccgatcaccatagtaagcatgaagcccagcgccattttctggagactcacgatgctcgcaccaaaagactatggtttctgtggccagacgacattctgaagaacaaacgttgtcggaacaagtgcgggtgcctgggcggctgccgcttttttggaggtacggtgactggccttgatttctttaagctcgaagagttgaccccgtcaagcagtagcgccttcagctctacttcagccgaatctgacatgtattatggccagagtctgctgcagccaggcgaatggattattaccaaggagattcccaagatcatagatgggaacgtcaatggcatgaagagaaaagagtgggagaacaagagcgtaggtatcgaggtcgagcgaaagacgcaacatttaagtttacaggtgcccctccgttcacacagttccagttccagttcagaagaaaattctagcagctcagcagctcagccgctgctggccggagaaaaggagagtccctcttcagtggctgatgaccacctggtgcaaaaggagtttctgcacggaaccaagagagacgacggccaggcaagcattcccaccgagatatccgggaactctcctgtgtcaccaaacacacaagacaagagcgtcggacagagtccactccggagccctctcaagaggcaggcatccgtctgttccacccgcttaggcagtactaagagccttaccgctgcgttctacggtgataagcagcccgtgactgtgggagtccaatttagctctgatgtgagtaggtctgacgaaaacgtcttggatagccccaagcagcgccggtctttcggtagctttccttacacgccatcggccgattctaacagctttcaccagtaccgatcaatggatagctccatgagcatggctgatagtgaagcctatttcagtgcagcagaagagtttgaacccatcagttccgatgagggacccggcacatatcccgggaggaaaaagaaaaaaaagcagacccaacagatcgactattcaagaggttcaatctatcacagtgtcgagggccccctgaccgggcacggcgaaagcatacaggactcacgaactcttccatttaaaacacatccatcacaagccagtttcgtctccgcgctgggcggtgaagatgacgtgatcgagcacctatatatcgtggaaggagaaaaaactgtcgaaagtgaacagatcactccccagcagcccgtaatgaactgttatcagacctacttgactcagtttcaagtcataaactggtctgtgaaacatcccacgaacaaaagaacctccaaaagtagcctccacaggcccttagaccttgatactccaacatcagaagagtccagctcaagctttgaacagctgtcagttcctacattcaaggtgatcaagcagggcctaacagcgaattcattgctggaccgggggatgcaactgtcgggttctacatccaacaccccatatacacccttggaaaaaaaactggcggataacactgacgacgagactctcaccgaggagtggacgctggaccagccagtttcacagacaaggacaactgccatcgttgaagtgaagggaaccgtggacattgtgctgacgccactggtcgctgaagctctggatagatacattgaggccatggtgcactgcgccagcacaagacaccccgccgctattgtcgatgacctgcacgccaaggtgcttcgagaggctgtgcagaatagtaaaactactttctccgagaatctcagctctaagcaggatattcgtggtacgaaaaccgaacagagcaccatcggcacgaccaaccagggccaggctcagacgaacttgaccatgaaacaggacaacgtgactatcaagggcctgcaaaccaatgttagcattccaaaagtcaacttgtgcttactgcaggccagtgtggaagagagtcccacaacagcacctagccgttcagtcacccatgttagcctggttgcactatgctttgacagaatcgccactcaggtcaggatgaataggggcgtcgtcgaagagaccagtaataacgcggagccggggcgtacttcaaatttcgaccgttacgtacatgctaccaaaatgcaacctcaatctagtggcagcttgcggtctaacgcaggggccgagaaggggaaagagattgccgctaaactcaatatccatcgtgtgcatggtcagctcagagggttagataccaccgacattggcacctgcgccatcactgccataccttttgaaaaatctaaggtactgtttaccctagaggagctggacgaatttacattcgtagacgaaactgaccagcaggccgtacccgatgtgacaagaatcggtccttcacaggaaaagtggggctggatcatgttcgagtgcggcctggaaaacctgacaatcaaaggaggccgccaatcgggcgcggtcctgtacaattctttcggcatcatgggaaaggcctcggacactgaaagaggcggcgtcctgacatctaacaatagctctgattctcctaccggctcagggtataatacagatgtgagcgacgataaccttccatgtgatcgcactagtccatcaagtgaccttaacggcaactcagtcagtgatgagcaggatgaaggagtcgagtctgatgacttgaagaaggacctgccactgatgcccccaccacccgatagctgctctatgaaactgactattaaagagatatggttttcctttgcggcacctacaaacgtacggtcacacacacatgccttttccaggcagctgaatttgctgtctacagcgactccagcggtgggggcgtggctcgttccgattgaccagctgaaatctagcctgaacaaattagagaccgaaggaaccctgcgaatatgtgccgtcatggggtgcattatgaccgaggccctcgagaacaaaagcgttcactttcctcttaggtccaagtacaacaggctcaccaaagtagcccggtttctccaggaaaacccgtcttgcctgttgtgcaacattctccaccattacctgcatcaggcaaattacagcatcatcgatgacgcaactatgagcgacggattgcccgcccttgtgacacttaaaaagggcctggtggctctcgcccggcagtggatgaagtttatcgtagttacgcccgcgtttaaaggagttagtttgcaccgccctgcccagccccttaagccccagattgctatggaccatgagcatgaagacgggctcggtctggataacggcgggggcctccagagcgacacatcagccgatggcgccgaattcgagtttgatgctgcaaccgtcagtgaacacactatgttgctcgagggaactgctaaccgtccccctccgggatctagtggtccagtgaccggagcggagatcatgcggaaattaagcaaaactcatacacactccgattccgccctgaaaattaaaggtattcatccctatcacagtctcagttatacttctggagacaccgcaactgactcccccgtgcatgtcgggcgagccgggatgcctgtcaaagactcacccaggaaggagtcactgctgtcctatctgactgggagctttcccagcctgcacaatttacttgaggggacccctcagaggtcgtcagccgctgtgaagagctccagccttactaggactggcaacaccgtggctacggacatgctaagcgagcaccccctattatccgaacccagcagcgtaagcttctacaactggatgagcaatgcagtgggcaaccggggaagcgttctgcaggaatcgcccgtcactaagtctgggcataactccctgcctactggcgttgctccgaacttgccaacgatcccttctgcctcagatttcaacaccgtgctgagttcagatcagaacactctggacggcacgcactcccaacactctacctcccaggatgatgtggccggagttgaggaggccaaccaggggtttcccgcagtccaactggccgacgcgcaggttgtgttcaagcccctactgtcacacacaggcattcaatcacaggacacgatgcctttctgttatcggatgtacttcggcgaacatctgtccttctccgggaccctggattgtctacgcgctgacatcgtcgatagtgatactgccaaggaaagaaaaggaaagagagccagaaggcagggacacgtgaatctccccccattggaattcaagccggcactgatgttaggtacattctctatctcggctgtggtcatggaaaagagcgtgtgtactccgcagaatagcacttcagccctcagttttcacgacctgagtaaacggtattacaataccttccactgtaactttacaatcagctgtcagtcgatctctcagcacgtcgatatggcattggtcaggctgatccatcagttttccacgatgatcgacgatatcaaggccacacagaccgacatcaagttgtcccggtacaccgccggctccgcgtctccgacccctactttcaaaactagaaaacatagagattttaggtctagtgactttagtaggagctctcggggctcactgaatggagggaacagggtgaataacgccaaaaacaagagaaccaacaacgagaacaacaagaaggaaagtcgcaataaaaactccctcggacgaagcgaaagaagaactagcaaggttagtcggaaggggtccaaagatgtagtcgatcatatgactatacacatggacgactccgactcaataactgtatccgagcagagtgaaccctccgccgagtgttggcaaaacatgtacaagctgctcaacttctacagtctgattagcgacccaaccgggatcctggaaaaatcttcagaaaccttcggtcctgccggggtgcggtcccctacagagccaacttgcaaggtcgttttcgagaacgagcaggataattctagtctgacaaaaacgcagagaaagaggtcccttgtgacatccgagccccagcacgtgaccttgatcgtattcggtattggcatggtgaatagaactcaccttgaagccgacatcggcggccttacaatggaatctgagttgaagagaatacatggaagctttacactgaaagaaaaaatgaaagatgtactgcaccaaaaaatgaccgaaacatgtgcgaccgctcacatcgggggcgtcaatatcgtcttgctggaaggcatcactcccaacatccagctggaggacttccccacttcgccgacatcaacagccaaacaggaatttctgacggtggttaagtgcagcattgctaagtcgcaggccctgtacagcgctcaaaggggcctgaagaccaataacgctgccgtgttcaaagtcggcgctatcagtataaacataccacagcacccagccacccttcactccatgatggtcagaagcagccatcagctctctaagcaaataagtgatctaatccgacagccaagtaccgcacctcaaccggttaaagaggacatcgcgaccccactgccgtcagagaaaactcccacttcagtgaatcagacacccgtggaaacgaatgagtttccacagctcccagagggactggaaaagaagccgatagtgttgaaattttccgcgatgctggacggaatagcgattggcgccgccctgctcccctccttaaaagccgaatacaaaatgggccgaatgagatcccacggcatgaccggcgcccagacccgcttcacttttgagctgccaaaccatcgcctgcgcttcacatctaaggtgtccgccacagacatgagcactatccccccatcagcgtcgcttaacctgcccccagtaacgatgtctggtaagtatatcatggaggagcacgactcctatagtgaccaagtgtggtccatcgatgagcttccttccaaacaagggtattaccttcaggggaactatctccggtgcgtagccgaggtcggatcctttgaacataacctcacaaccgatcttctaaatcatctcgtgtttgtgcagaaagtgtttatgaaggaggttaacgaggtaatccaaaaggtctctggtggagagcagcccattccactttggaacgagcacgatggcaccgccgatggagacaagcctaaaatcctgctgtattctctgaatctgcagtttaaagggatccaggttaccgctaccacaccttccatgagagctgtgcggtttgaaaccggccttatcgagctcgaactgtccaaccggctgcagaccaaggcctctccgggatcctcctcatatctgaaactgttcggcaagtgtcaggtagacctgaatttggccctcgggcagattgtgaaacaccaggtatacgaggaggctggctccgatttccaccaggtggcctattttaagacacgaatcggattacggaatgctctgcgggaagagatttcaggttcctccgaccgggaagccgtgttaatcacactgaacagacccatcgtgtatgcgcaaccagtagcattcgaccgggctgttctgttctggctaaactacaaggctgcgtacgataactggaacgaacagcgaatggcactgcacaaggatattcatatggccaccaaagaggtggttgacatgctccctgggattcagcaaacttctgctcaggctttcggaaccttgtttctgcagctaacagtgaacgacctgggtatctgtctgccaataacaaacaccgcccagagcaatcacacaggtgatttggatactggctcagccctagtgctcaccattgagagtactctgattactgcctgtagttccgaatccttggtatccaaggggcactttaagaatttttgcatcagattcgcagatgggttcgagacttcctgggatgactggaagccagagattcacggcgacctggttatgaatgcctgcgttgtgcccgacggtacgtatgaggtctgctcccgtacaactggtcaggctgctgccgaaagctcgagtgctggaacatggacgctgaatgtgttatggaagatgtgtggaatcgacgtgcacatggatcccaatattggaaagcgcttgaacgccctgggaaacaccctcaccaccttaaccggggaagaggatatcgacgatatcgcggacctgaactcggtcaatatagccgatcttagcgatgaggatgaggtcgatacaatgtctcctaccatacatactgaagcaacagactaccgtcgccaagcagccagtgcaagtcaaccgggggaactcagaggtcggaagattatgaagaggatcgtggacatcagagagcttaacgagcaggcgaaggtaattgacgacctgaagaagctgggtgcgagtgaggggacgattaatcaggaaatccagcggtatcagcagcttgaatctgtggctgttaacgacatccggcgggacgttcgaaaaaagctgagacggtcctccatgcgggcagccagcctcaaagacaagtgggggctttcttataaaccgtcgtattcccgctccaagtctatctctgcttctgggcgcccacccttaaagcggatggagagggccagctctagggtcggtgagaccgaagagttacctgaaatccgagtcgatgccgccagtccagggccccgggtgacgtttaatattcaggatacttttcctgaggagacagaattggacctgttgagcgtaacaattgaggggcccagtcattatagttccaactcagagggctcctgttccgtgttctctagccccaagacacccggaggctttagtccagggatcccatttcagaccgaggaaggtcggcgggacgattccttgtctagcacctccgaagactcagaaaaggacgaaaaggatgaagatcacgaaagggaaaggttttatatctatagaaagccctcgcacacatccagaaaaaaggctaccggttttgccgcggtgcaccagctgtttactgagaggtggccgacgacaccggtgaacaggtccttgagcggcaccgctacagagagaaatatcgacttcgagctcgacatccgggttgagattgacagcggcaaatgcgtcctgcatccaacgaccctgctgcaagagcacgatgatatatcacttaggcggagctatgaccggtcttcccgcagtctcgaccaagacagcccctcgaagaaaaagaagttccagactaactacgcgtctaccacccacctgatgaccggtaagaaagtcccctccagtttgcagacaaaaccatcagacttggagactacggtgttctacatcccaggcgtggacgtgaagctccactataactccaaaactctgaagaccgaatcccctaacgcttccaggggatcctcacttccacgcactctatcaaaggagtctaaactgtacggaatgaaggactctgccacgtccccaccctccccccctctgccgagcacagtgcagtctaaaaccaataccctgctacctccccagcccccccctattcccgctgctaaggggaagggttctggtggcgtaaagaccgcaaaactttacgcctgggtggccctccaatctttacccgaggaaatggttatctcaccttgcctccttgattttttggagaaggccctagaaaccatacctattacgcccgttgaacggaactacaccgccgtgagtagtcaggacgaagatatgggccacttcgaaattcctgacccaatggaggagagtaccacgagtctggtctcatcctccacgagcgcgtatagctcttttccagtcgacgtggtcgtgtacgtgcgggttcagccatcacagattaaattctcatgccttcccgtgtcccgtgttgagtgtatgctaaagttacctagtctggacctggtattctcttctaatcgtggggaactcgagacactgggcacaacttacccagctgagaccttgagcccgggaggcaacgctacacagagcgggaccaagacatctgcatccaagaccggcataccagggtcaagtggactcggatccccattaggtagatcacggcactccagctcacagtctgacctgacatcctccagttccagcagcagcgggttgtcattcaccgcctgcatgagtgacttttctctgtatgtatttcatccctatggggcgggtaagcagaagactgctgtgtctggactaaccccgggctctgggggtctcggaaacgttgatgaggagccgacctcggtgacaggacggaaggactctctcagcattaacctggagttcgtcaaagtctctctcagccggatcaggcgctcgggcggcgcctcatttttcgagagccaatctgtctccaaaagtgcatccaagatggacactacactaatcaacatttccgcagtgtgtgatatcgggagtgcaagcttcaagtatgacatgcgtaggctgtccgagatactggcctttcctcgagcatggtaccgccgaagtattgccaggcggctgtttttgggagatcaaacgataaaccttcccacaagcggcccgggtacccctgattcaattgagggggtctcccagcatctgtccccagaatcaagtagaaaagcttactgtaaaacatgggaacaacctagccaatctgcctcttttacacacatgccacagtcaccaaacgtgtttaacgagcatatgacaaatagtactatgagccccgggaccgttggacagtcactaaagagccccgcctcaattcggtcccggagcgtaagcgattcctccgtacctcggagggacagtctgtcaaaaacttcaactccatttaataaaagtaacaaggccgctagccagcagggtacaccatgggagacactggtggtgtttgctatcaatctcaagcagcttaatgtgcagatgaatatgtccaacgtcatgggcaacacaacctggacaacatccggattaaagtctcaaggccgactgtcagtgggaagcaaccgggacagggagattagcatgagcgtcgggctgggccgtagccagttggattctaaaggcggagtggtgggcggcaccatcgatgtcaatgccttggagatggtggcccacatatccgaacatccaaaccagcagccttcacacaaaattcagataacaatgggctccacagaggctcgggtggattatatgggatcctctatcctgatgggcatcttttccaatgcggacttgaagttgcaggatgagtggaaagtcaacctgtacaataccttagattcctctatcaccgacaaatccgagatcttcgtccacggcgatctgaagtgggacatctttcaggtgatgatcagtagaagtactacccctgatcttataaaaatcggaatgaaattgcaggagttcttcacccaacagtttgacacctccaagagggcgcttagcacctggggaccagtgccttatttacctcccaaaactatgaccagcaaccttgagaagagctctcaggagcagttactcgatgcagcccaccatcgacactggcccggcgtcctgaaggttgtgtctggctgccatataagcctttttcaaatcccccttcccgaagatgggatgcagttcggtggatcaatgtcactgcatggcaaccacatgactctagcgtgtttccacgggccaaactttcggagcaagagctgggcactgttccacctggaagagcctaacattgcgttttggacagaagcccagaaaatctgggaggatggcagttccgatcacagcacctatatagtgcaaacattggatttccacctgggacataacaccatggtgaccaagccttgcggggccctggaatccccaatggccactataaccaagatcacgcggcgacggcatgaaaaccccccccacggcgtggcgtccgtcaaggagtggttcaactatgtcaccgcaactcgaaacgaggagctgaacctcctgaggaatgtggacgccaacaataccgagaactccaccactgtgaagaattcttctctgctgagtggctttaggggcggtagctcatataaccatgagacagagacaatctttgctcttcccaggatgcaactggatttcaagtcgatccacgttcaagaaccccaggaaccttctcttcaggatgcttcactaaagcctaaagtggaatgctccgtggtcaccgagtttaccgatcatatctgcgtgacgatggacgcagagctaatcatgtttctgcatgatctggtgtccgcatatctaaaggaaaaggagaaggcaatatttcccccccggatcctgagcacccgccctgggcaaaaatctcctatcattattcatgacgacaatagttccgataaagacagagaggacagcataacgtacactactgtcgactggagggacttcatgtgcaacacctggcacctggagccaaccctgcgcctgattagctggactgggcgcaaaattgatcccgtaggcgttgactacatactccaaaaattgggattccaccacgctagaaccaccatccccaaatggctccagcgtggggtcatggatcccctcgataaagtcctgagtgtgctgatcaagaagctgggcacagctttgcaggacgagaaggagaaaaaaggaaaggataaagaagagcactag

SEQ ID NO: 278450 - DNA, 15018 bp, Artificial Sequence
  derived and/or modified sequence
atggaccagcgaaaaaacgaatcaatagtgccttctattacacagctcgaggatttcctcacagaacacaacagcaatgtcgtatggctgctcgttgccacaatcctgagttgcggatggattatttacctcacctactacaattcccgtaatgtcggtctgattctgacactggtgctcaacagactctataagcatggctatatccatattggcagtttctccttctctgttctgagcgggaaggtcatggtgagagagatctattacatcaccgaagacatgagcatccgcattcaggatggcttcattatcttcaggtggtggaagatgtacaacccaaagcaaaaacagcatgaccctaaggcagaaacccgactctacattactgtgaatgactttgaatttcacgtgtataatcgatctgacctatacggtaggcttcaggagctgttcggtctggagcctactattatccccccaaagaaggacgacgataaaactcgcgagatcggacgcactagaactcagtctaagattgaaagggtgaaagtgaagaccgagtcgcaagatccgactagttcatggagatctctgatcccggttatcaaggtgaacgtcagtaccggtaggcttgcattcgggaaccactaccagccacagactctttgcatcaatttcgatgacgcatttctgacttacacaaccaaaccaccaagctcgcatcttgatcagtttatgcacattgtcaaaggaaagctcgaaaatgtgagagtgatgctcgtgcctagtccccgttacgtagggctgcagaacgatgagccacccaggctgatgggggaaggattcgtggtgatgcagagcaacgacgtggatatctactattatatggatgagccaggactggtgcccgaagagactgaggaaaacattgagggggagatgtctagcgaagactgcaagctacaggacctgcccccatgctggggcttagatatcgtctgcggcaaagggactgattttaattatggaccctgggccgaccgccagcgtgattgcctgtggaaattcttcttcccgccagattaccaggtcctgaaagtctctgaaatagcccaaccaggcaggccacgccagattctggcattcgagctcagaatgaacattatcgccgatgccacaattgacttgctgttcacaaagaatcgagaaaccaatgcggtacacgttaatgtcggggctggctcttacctggaaatcaatattccaatgactgttgaggagaatggatacacgcccgcaatcaagggccagttattgcacgtagacgcgaccacgagcatgcagtaccgcacactactggaggcggagatgttggccttccacatcaatgcctcatacccgagaatctggaacatgccacaaacctggcagtgcgagctggaggtgtataaagcgacatatcacttcatcttcgcccagaagaatttttttaccgacttaatacaggactggtcttcagattcacccccagacatcttctcattcgttccatatacatggaatttcaagatcatgttccatcagtttgaaatgatctgggcagctaatcagcataattggatcgattgctctactaagcagcaggagaatgtgtacctggccgcttgtggagagaccctgaatatcgacttttccctgccatttacagacttcgtgcctgccacttgtaacaccaaattctcattaaggggcgaggatgttgatctacacttgtttcttcccgactgtcatccatccaagtacagtctttttatgctcgtgaagaattgtcatccaaataagatgatccacgacacaggtatccccgctgaatgccagtccgggcaaaaaaccgtcaaaccaaaatggcggaatgttacccaggaaaagagcggatgggtggaatgttggaccgtgccttccgtcatgctgacaattgactacacatggcaccccatctatccgcagaaggcagatgagcaactcaaacaaagtctgagcgagatggaggaaactatgctatccgtcctgagacctagccagaaaacaagcgatagagtggtgagttcaccatccacaagcagtcggcctcccattgatccaagtgagctaccgccagacaagctccatgtggaaatggagctttcccctgatagtcaaattaccctgtacggcccactgcttaacgcctttttgtgcattaaggaaaactatttcggagaagacgatatgtacatggacttcgaggaggtgataagcagccctgtcctgtccctcagcacctcttcttcaagcggatggaccgccgtgggaatggagaacgacaagaaagagaacgaaggctctgccaagagcatacatccgctggctctgagaccatgggatattaccgtcctggtcaacttgtacaaagttcatggcagactcccagtccacgggaccaccgacggacctgaatgtccaactgccttcctggagagactgtgctttgaaatgaaaaagggctttagagagacaatgttacaacttatcctgtcacccctaaatgtattcgttagcgacaattaccagcagcgtcctccagtggatgaggtgttacgtgaagggcatattaacctgtccggattacaactccgggcacacgcaatgttttcagctgagggcttacctttaggatcagacagtttggagtatgcctggctgattgacgttcaggcaggaagcctgactgctaaggtgacggcaccccaattagcctgcttactggagtggggtcaaacttttgtgttccatgttgtgtgtcgagaatatgaactggagagacctaaatctgtgatcatttgtcagcacggtattgaccggcgtttttgtgagtctaagttatcctgtatcccaggtccctgccccacatcagatgatctgaaatacacaatgatccgactggccgtcgatggcgcagatatctacatcgtggaacatggctgcgctaccaacattaaaatgggagcaatcagagtcgcgaattgcaacttacataatcagtccgttggagagggaatctccgccgcaatccaggacttccaggtcagacagtacattgagcaattgaataactgcaggatcggattacagcccgctgtactgaggagggcgtattggctggaagccggatcagcgaatctgggcctgatcaccgttgacatcgccttggctgctgaccaccattctaagcatgaagctcagcgacactttctggagactcacgatgcgagaaccaagaggctgtggttcctctggcccgacgacatcctgaagaataaacgctgtcgaaataagtgtggatgcttagggggatgccgcttcttcggcggtaccgtgaccggtttagactttttcaagctggaagaactgactccgagctcctctagtgcctttagtagcacatctgcagagtctgatatgtactacggacagtcccttcttcagcctggggagtggattattaccaaagagattccaaagataattgacgggaatgtgaacgggatgaagagaaaagagtgggagaataagtctgtaggcattgaagtggaacgcaaaacacagcacctgagcctgcaggtgcctcttcggtctcactcatctagcagcagttccgaggaaaatagtagtagctcagcagcccagcctttgttggcgggagagaaagaaagcccgtcgagtgttgcggatgatcacctcgtccagaaggaattcctgcacggcaccaagagggatgacgggcaagcctctatcccaaccgagatttcaggcaactcacctgtatcacccaacacccaagacaagtcagtgggacagagcccacttagatctcccctgaaacgtcaggcgtcagtttgctcaaccaggcttggtagtactaagtctcttacggcagctttttatggcgacaaacagccagtgaccgtgggagtgcaattcagtagcgacgtttctcggagtgacgagaacgtgttggattcccccaaacagaggagatcatttggctcatttccttataccccaagtgccgacagcaattcattccatcagtaccggagtatggacagctccatgtcgatggcagatagcgaggcatacttttccgccgcagaagaatttgagccaataagttccgatgagggcccaggaacttatccgggtagaaagaaaaaaaaaaaacagactcaacagatcgattattctaggggctccatataccactctgtcgaaggcccactcactgggcacggggaatcaatccaggattctaggacactgcctttcaaaacacatccctcccaggctagtttcgtgagtgcactgggaggagaggacgacgtgatcgagcacttgtatattgtggagggagaaaagacagtcgagagcgagcagatcacgccacagcagccagtgatgaattgctatcagacttatctgacacaatttcaggtaataaactggagcgtgaaacaccccaccaacaagaggaccagcaaaagtagcctgcatcgaccgttggacttggatacaccaacctcagaggaatcctcttcttcctttgaacaacttagtgtgcctacctttaaggtcatcaagcagggcctcacagctaattctttattggaccgcggaatgcagttatctggatcaacttccaatacgccctatactccactcgagaagaaactcgccgacaatacggacgatgaaaccctcaccgaggagtggacactggaccagccggtttcccagaccagaaccaccgcaattgtggaggtcaaaggcaccgtggatatcgttcttacaccactcgtcgctgaagcattggacagatatattgaggctatggtccactgcgcatccacccggcacccggctgctatcgtagacgacctgcatgctaaggtcctccgggaggccgtgcaaaactctaagaccaccttcagtgaaaacctatcctctaagcaggacatacgcggaacaaagactgaacagtctacaatcggaacgacgaatcaagggcaggctcagacaaatctcacaatgaaacaggataatgtcaccatcaagggactgcagacaaacgtgagcatcccaaaagtcaacctatgcctcctccaggcaagcgttgaggaaagccctacaacagctcctagtagaagcgtcacccatgtgtcactggtggctctgtgtttcgaccggattgctacacaggttcgtatgaacaggggcgtcgtggaagagactagcaataatgcggaaccaggaagaacctctaacttcgatcggtacgtgcacgccacgaaaatgcagccccagtcaagtgggtcccttcggtccaacgccggtgcagaaaagggaaaggaaattgcggctaagctgaatatccatcgtgtccacggtcagcttcgaggattggataccacggatatcggtacctgcgccatcacggccatcccatttgaaaaaagcaaggtgctgttcacattagaagagctggacgaattcacattcgtcgacgagacagaccaacaggccgtccctgatgtgacccggattgggccttcccaggagaaatggggttggattatgtttgaatgtggcctggagaatctgacaatcaagggcggtcggcagtcgggggctgtcttgtataactcatttggaattatgggcaaagctagcgatacggagcgcggaggagtgctcaccagcaacaatagctcagactctcctactggttctggttacaacaccgatgtgtcagatgacaaccttccttgtgatcggacctcccccagctcagacctcaatggaaattcagtctcagacgaacaggatgagggcgtcgagtctgatgacctcaagaaggatctgccactgatgccccctccccctgacagttgttctatgaagttgacaattaaggaaatatggttttccttcgcggctcccaccaatgtacgtagccatacacatgcctttagccgccaactgaatctgctgtctactgccactccggcagtgggcgcatggctagtcccaatagatcagcttaaaagtagcttaaacaagctggagaccgaaggtaccctgcggatttgtgcggtcatggggtgtatcatgaccgaagcgctggaaaataaatccgttcatttcccgctccgctctaagtataatcggctcaccaaagtcgctcggttcctgcaagagaatccctcttgtttgctgtgtaatatccttcaccactacctgcaccaggccaattacagcatcattgatgacgccacgatgtccgatggactgccagccctggttaccctgaaaaagggactggtggcactcgcaaggcagtggatgaagttcatcgtggttacgccagcttttaagggggtgtccctccatcggcctgcacagccacttaagccacagattgcgatggaccatgaacacgaggacgggcttgggttagataatggcggagggctgcaaagcgatacatcagccgatggtgctgaatttgaatttgacgccgctacagtatcagagcacaccatgcttctcgagggcaccgctaaccgccctccgcctggcagtagcgggccagtgacaggcgcagagattatgcgcaagctgtcgaaaacccatacccactccgattcagcattgaagatcaaaggcatccacccctatcattctttaagctatacctccggcgacactgccactgacagccccgtccacgtggggcgagcaggcatgcctgtcaaggatagccctaggaaggagtccctgctttcctacctgacaggatcattcccctccttacataatctgctggagggcactccacagaggtcttctgctgccgtgaaaagctctagtctgacccgcaccggcaacaccgtggcgaccgacatgctgtcagaacacccattactttcagaaccctcaagcgtgagcttctacaactggatgtcaaacgccgtgggcaatagaggtagtgtgcttcaggagtctccggtcacaaaatcggggcacaactccctgcctacaggtgtcgcccctaatctacccacaattccaagtgcttccgacttcaacaccgtcctgtcttccgaccagaatacactggacggcacccattctcagcactccacgtcacaggatgatgtcgctggtgtggaagaagcaaaccaaggtttccctgctgtgcagctcgctgatgcccaagtggtgtttaaacccctgctgtcacacaccggcattcagtcccaggacactatgccattctgctatcgcatgtacttcggagagcacctgagtttctcaggcaccctggattgcctgagggcagacatagttgactcggatactgctaaagaaaggaagggtaaacgagctcggaggcagggacacgtcaacttacccccactggaatttaaaccggctttgatgctggggacattttcgatctccgcggtggttatggagaagtctgtgtgcacaccgcagaattccaccagcgcgctttctttccatgacttgtccaaacggtactacaatacatttcactgtaactttaccataagctgtcagagcatcagccagcatgtagacatggcattggtcagactcatccaccagtttagcaccatgatagacgacatcaaagcaacccagactgatattaaactgtcccgttacactgcgggttctgcatcccctaccccaacattcaagacccggaaacaccgggactttagatcatcggatttctcaagatctagccggggttctctgaacggcggaaaccgtgtgaacaatgctaaaaacaaacggacaaacaacgagaacaataaaaaagaatcacggaataagaactccctaggcaggtcggagcgtaggacctcgaaagtgtccagaaagggatctaaggacgtagtcgatcacatgaccatccatatggacgatagcgacagcattacagttagcgagcagagtgagccatccgccgagtgttggcagaacatgtataagctcctcaatttctactcccttattagtgaccccactggaatactggagaaaagctcagaaacattcgggcctgccggagtccgctccccaactgaaccgacttgcaaggtggtgtttgaaaacgagcaggacaactccagtctgactaaaactcagcgaaaacgatcgcttgtgacctctgagccacagcacgtcaccctcattgtgttcgggattgggatggtgaatcgcacccacctggaagccgacatcggaggtctgaccatggagtccgaattaaaacggatccacggatctttcacactcaaagagaagatgaaggacgttctacaccagaagatgactgagacttgcgccaccgcccacattggtggcgttaacattgtgctcctagaggggatcacacccaacattcagttagaagactttcccaccagccccaccagcacggcaaagcaggagtttctgacagttgtaaaatgttccatcgcaaagtcacaggccctgtattctgcccagagagggctgaaaacgaacaatgcggctgtctttaaagtcggcgcaatttcgatcaacatccctcaacacccagccaccctgcattcaatgatggtcagatctagtcatcagctcagtaaacagatctcagatctgatcagacagccctctaccgctccacagcccgtcaaggaggatatcgccacccctttacctagcgaaaagacccccaccagcgtcaatcagaccccagtcgagacgaatgaatttccccagctgccagagggcctggaaaagaaaccaatcgtgctgaagtttagcgctatgctcgacggaatcgctattggtgctgccctcctgccctctcttaaagctgaatacaaaatgggtcgcatgcgaagccacggcatgaccggtgcacagacacggttcaccttcgaactgcccaaccatcggctgagattcacgtctaaggtatccgccaccgatatgtctacaatccccccaagcgctagtcttaacttgccgcctgtgaccatgagcgggaaatacataatggaagagcacgacagctattccgaccaagtgtggtcgatcgacgaacttccctctaagcagggctattatctgcagggtaactacttgcgctgcgtagccgaggtgggatcgtttgagcataacctcactaccgatctgctgaaccatctggtgtttgtgcagaaagtatttatgaaggaggtgaatgaagtcatccagaaagtgtctggcggagaacagcctatcccactttggaacgagcacgacggaacagcagatggcgataagccgaaaatactgctttactccttaaacctgcaattcaagggcattcaggtcaccgcaactacaccaagcatgagagcagtaaggttcgagaccggcctcatcgaactggaactgtcgaatcgtcttcagactaaggctagtcctggaagctcctcttatctgaagctctttggcaagtgccaggtagacctaaacctagctttagggcagatcgtgaagcaccaggtatatgaggaggcaggctctgactttcatcaagtggcatacttcaaaactagaattggcttgcgcaacgccctcagggaggagatatcaggatcttccgatcgagaggccgttttgataactttgaatcggcctatcgtgtacgcacaacctgttgcctttgacagggctgttctcttttggctgaactacaaagccgcttatgataactggaacgaacagcggatggcgctgcataaggatatacacatggctaccaaagaagtggtggacatgctgccagggatccagcagacaagtgctcaagcctttggcacactcttcctccagctcacagtaaatgatcttggaatctgtctaccaatcaccaatacagctcagtcaaaccatactggagatttggatactgggagtgctttggtgctaacaatcgaatcaacattgattactgcatgttcttcggaatcattggtcagtaaggggcatttcaagaatttttgcattagatttgccgacgggttcgagacatcatgggatgactggaaaccagagatccacggagacctcgttatgaacgcttgcgtcgtccccgacggcacctacgaggtgtgcagcaggacaacgggtcaagccgcagccgaaagcagctccgctgggacatggacactgaacgtgctctggaaaatgtgtggtatcgatgtccatatggacccaaatattggcaagcgactgaacgctctcggtaataccttgaccactctgactggagaagaggacattgatgacatcgccgacctcaacagcgtgaacattgcggacctctcagacgaagatgaagtcgacacaatgtccccaactattcacacagaggcaacagactatcgcagacaggccgcttctgcctcacagccaggagagcttcggggtcgcaaaatcatgaaacgcattgttgacatacgcgagcttaacgagcaggcgaaggtgattgacgacctgaagaagctgggcgcttccgaggggactatcaaccaagagatacagcggtaccaacagctggaaagcgtggccgtgaatgacatccgcagagatgtccgcaaaaagttgaggcgctcctccatgagggccgctagtctgaaagacaaatggggcctgagctataaacccagctatagccgttccaagtcaatatcagccagtggtcggcctcccctgaagaggatggagcgggctagcagtagggtcggtgaaacagaggagctccctgagataagagtcgacgctgcctccccaggtccgagggtgactttcaacatccaggacacgtttccagaagaaacagaactggatctgctttcggtgaccatcgagggaccatcccattatagctccaattcagagggcagttgctcagtattctctagccctaagactcccggtggcttctcccctggaatccctttccaaaccgaggagggcaggagggatgatagcctgtcttcaacatccgaagattctgaaaaagacgagaaagatgaggaccacgagcgcgagcggttttatatttaccggaagccgtcccacacctcccgcaagaaagccaccgggttcgccgcagtccaccagctgtttaccgaaaggtggcccacgactcctgtgaacaggagtctgagcggcactgctactgagagaaacatcgactttgaactagacatccgagtggagattgactcaggtaagtgcgtgctccacccaaccacgctgctccaggagcacgatgatataagcctgcggagaagttatgaccggagcagcagatcactcgatcaggactccccaagcaagaagaagaaatttcaaaccaattacgccagtactacacacctaatgaccggcaagaaagtgccgtcttccttgcaaactaaaccatcagacctagaaaccacagtgttttacatccctggcgtggacgtcaaattgcactacaatagcaagacgcttaaaacagaatccccaaatgcgtcacggggtagctctttacccaggactctgtctaaggagagcaaattgtacggtatgaaggattccgccacgtccccccctagccctccactgccgtctactgtacagagtaaaaccaataccttactgccaccacagcctccacccatcccggcagcaaaaggaaaggggtcaggcggtgtcaagaccgctaagctctatgcatgggtagcactgcagtctttaccagaagaaatggtgatatctccttgccttctggactttttggagaaggcactcgagacgattcccattactcccgtagaacggaattacactgccgtatcctcccaggacgaagacatgggccattttgagattccggacccgatggaagaatcaacaacatctttagtgtcaagtagcactagtgcttattccagtttcccagtcgacgtagtcgtctatgtacgtgttcagccgagtcagattaaatttagttgccttcctgtctcgcgggtggaatgtatgctcaagctgccctctctggatctagtcttttcctctaacagaggcgaacttgagacgctcgggaccacctatccggcagaaacgctgtctcctggtggaaacgccacccagagtggtaccaaaacatcagcctcaaagactggaatccctggctcaagcgggctggggagtccgctgggaagaagtcgacattccagttcacagtccgaccttacaagctcctcatcctccagttctgggcttagcttcaccgcctgtatgagcgacttttctctatatgttttccacccatacggtgctgggaaacagaagaccgctgtatccgggttgaccccaggctctggcggtctgggtaatgtcgatgaagaacccacctctgtgaccgggagaaaagatagtctctctattaacctggagttcgtgaaggtgtccctgagtaggattagacgcagtggaggagccagcttctttgagagccagagcgtatcaaagagcgcatccaagatggacacaactctcattaatatcagcgccgtctgcgacatcgggtccgcctcgttcaaatatgatatgcgcaggttatccgagatcctcgcctttcctcgcgcttggtaccgccgaagtattgccagacggcttttcttgggggaccagacaatcaatttgcctacatccgggccaggaaccccagactcgattgagggcgtcagtcagcacctctccccagaaagtagccggaaggcgtactgtaaaacctgggagcagccatcccagtccgcctcttttacgcatatgcctcagagcccaaacgtgttcaatgaacatatgaccaattccaccatgagccccggaaccgtgggacagtccctgaaaagcccagccagtattcgctcccgttccgtgtccgattcttcagtgccacgacgtgactcgctgtctaagacttcaacgccatttaacaaaagtaataaagcggctagtcagcagggcacaccatgggagacactggtggtgtttgcaattaacctaaaacaactgaatgtgcagatgaatatgtcaaacgtcatgggcaatacaacctggactacaagcggacttaaaagccagggccgtctgagcgtgggttctaacagagatcgagagatttctatgtccgtcgggcttggcagaagtcagctggatagcaaggggggagtcgtcggaggcaccatcgatgtgaatgctctggagatggtggctcacatctccgaacaccctaatcagcagccgtcccacaagattcagatcaccatgggtagtaccgaggctcgcgttgattatatgggaagcagcatcttgatgggcattttttccaatgccgacctcaaacttcaggatgaatggaaggtaaatctgtataataccttggacagcagtattacagataaaagtgagatcttcgtgcatggggacctgaagtgggacatttttcaagtgatgatttctcggtcaaccacaccagatctgatcaaaataggaatgaagttgcaggagttttttactcaacagttcgacaccagcaagcgagcactatcgacttggggaccagtcccctatctgccgcctaagacaatgacatccaatctggagaaaagctcgcaggaacagctgcttgatgcagctcatcatagacactggcccggagtattgaaagtggtgtctggatgccacatttccctgtttcaaatccctcttcctgaggacggaatgcagttcggcggatccatgtcactgcatggcaatcacatgacgctggcttgtttccatggacccaatttccgaagcaagagttgggccctgtttcatttagaagagccaaatatcgcattctggacagaagctcagaagatctgggaggatggatcgtctgaccactccacatacatcgttcagaccctggactttcacctcggacataatacaatggtaaccaaaccctgcggggcactggagtcacccatggctacaattaccaaaatcaccagacgaaggcatgagaaccctcctcatggcgtagcaagtgtgaaggaatggttcaattatgtcaccgccacaaggaatgaggagctgaacctgctgcgtaatgtggacgccaacaataccgaaaacagcacaaccgtgaagaattcttccctgctgtctgggttcagaggtggtagctcttacaatcacgaaacagaaacaatcttcgcattgcctcgcatgcagctcgactttaaaagcattcacgtccaggaaccccaggagcctagtctccaggatgctagccttaagcccaaagttgagtgcagtgtcgtcactgaattcaccgatcacatctgcgttactatggacgctgagctgataatgttcctgcacgacctcgtgagcgcctatctgaaagagaaggaaaaagcaatctttcctccccgtattctttccacccggcctggtcagaagtctcccatcattattcacgatgacaattctagtgataaggacagggaagattccattacctatacgacagtggactggcgcgacttcatgtgcaatacctggcatctcgaacccactttgcgcctcattagctggactggccgaaagatcgaccctgtaggtgtcgactacatccttcaaaagctggggttccatcatgctcgtacaactatcccaaaatggctgcagcgcggtgttatggaccctctcgacaaagtgttaagtgtactcatcaagaaactgggcacagccttgcaggatgagaaagagaaaaaaggcaaggacaaggaagagcactaa

SEQ ID NO: 278451 - DNA, 15018 bp, Artificial Sequence
  derived and/or modified sequence
atggaccagcgtaagaatgaatctattgtcccaagcatcacgcagctggaggacttccttaccgagcacaatagcaacgttgtgtggttgctggtggcgacaatactgtcatgcggttggatcatctatctgacttactacaactcccggaacgtgggcctgattcttaccctggtactcaacagactgtacaaacatggctatatacatatcgggtccttctcattttctgtactgagtgggaaggtcatggtgcgcgagatctactacatcactgaggacatgtctattcgaatccaagatggattcattatcttccgctggtggaagatgtataaccccaagcaaaaacagcacgatccaaaagccgaaacccggttgtacatcacagtgaatgatttcgaattccatgtatacaaccgctcagacttgtacggacggcttcaagagttatttgggctagaacccaccataattcccccaaaaaaggacgacgacaagacgcgggaaattgggagaacgcggacacagagtaaaatcgagcgggtcaaagtcaaaacggagagtcaagacccaacaagctcatggcgatctctcatcccggtgatcaaggtgaatgtctccactggtaggctcgcctttggcaatcattaccagcctcagactctgtgtattaatttcgacgacgcctttctgacctataccaccaagcctcccagcagccacctcgatcaattcatgcacatagtgaagggtaagctcgaaaacgttcgtgtgatgctggtgcctagcccgagatatgtcggactgcaaaatgacgagccccctcggctgatgggcgagggtttcgtggtaatgcaatcaaatgacgtcgacatttactactatatggacgagcccggtctggttcccgaggagaccgaagaaaacatcgagggtgaaatgtcatccgaggattgcaaattacaagatctgcccccatgctggggcctcgatatcgtctgtggaaaagggacagacttcaactacggaccgtgggccgaccgccaacgggattgcctgtggaaattcttcttcccccctgactatcaagtgctgaaggtctccgaaatcgctcagccaggacgcccacggcaaattttggcctttgagctgcgcatgaatataatcgcggatgcaaccatagacttactttttactaaaaaccgcgagacgaacgcggtccatgtgaatgtcggcgcaggcagctaccttgaaatcaatatcccaatgacggtggaggaaaacgggtacacacctgcaatcaagggccaactcttacacgtagatgcaactaccagcatgcaatacaggacactgctggaggccgaaatgctggcctttcacatcaacgcctcataccctaggatttggaatatgcctcaaacatggcaatgcgaactggaggtgtataaagcaacgtaccatttcatcttcgcacaaaagaacttctttacggacctcattcaagactggagtagtgactcccctccggacatcttttccttcgtaccttacacctggaactttaagatcatgtttcaccagttcgagatgatttgggctgcaaaccagcataattggatagactgttctacaaaacagcaagagaacgtgtacctggcagcctgtggcgaaaccctcaacattgatttctcacttccgttcaccgacttcgtgcctgctacatgtaataccaagttctcactccgaggagaagacgtggacctacacctgtttttacctgactgccacccctcaaagtattcactgtttatgctggtcaaaaactgccaccctaacaagatgatccatgacaccggcatacccgctgagtgtcaatctgggcagaagactgtcaagcccaaatggagaaacgttactcaggagaaatccggctgggtagagtgctggactgtgcctagtgtgatgttgacgatagattatacatggcatccaatttacccccagaaggcagacgaacagctcaagcagagtctttcggaaatggaagagactatgctgtccgtgctgagacccagccaaaaaacctccgacagagtggtctcatcaccatccacaagctccagacctcccatcgacccctcagagctcccacctgataaacttcacgttgagatggagctttcacctgattcccagattactctatacgggccacttctgaacgctttcctctgcattaaagaaaattactttggggaagacgatatgtatatggattttgaggaagttatttcatcgcccgttctgagcctaagtacatcaagcagctctgggtggacagccgtgggaatggaaaacgacaaaaaggaaaacgaagggtccgcgaagtctattcatcccctggcactgcgcccttgggacatcactgtcctggttaacctgtacaaagtgcacggccgactgccagtgcacggaacaacagacggacccgaatgccctaccgcctttcttgaaaggctctgtttcgagatgaagaagggcttcagggaaactatgctccagctgattttgtctccgctgaatgtgttcgtctcagacaactatcaacagcgcccacctgtggacgaggtattgcgcgaggggcatattaacctaagtggccttcagctccgcgcacatgcaatgttttctgcagagggacttccattgggaagcgacagtctagagtacgcttggctgattgacgtgcaggctggctctctgacggccaaggtaactgctcctcaactggcctgtctgctggaatggggccagacattcgtgtttcacgtcgtatgtagagaatatgagctcgaaaggcccaagtctgtgatcatatgccagcatggaattgatagacggttttgcgagtcaaagctgtcgtgcattccaggcccttgccctaccagtgatgatctgaagtataccatgatacgactggcagtggatggggcagacatatacatagtggagcatgggtgtgcaactaacatcaagatgggcgctatcagggtggctaactgcaacctccataaccagagtgtgggcgagggcatttcagccgctatccaggactttcaggtacgccaatacatcgagcagctcaacaactgtcggataggacttcaaccagccgtcctgaggagagcatactggctggaggctggtagtgcaaatcttggactcatcactgtggacattgccctggctgccgatcatcacagcaagcatgaagcacaaagacatttcctcgagactcacgatgctcgcaccaagaggctttggttcctgtggccagatgatatcctgaaaaacaaaagatgcaggaataaatgcggctgcctgggaggctgccgattcttcggagggacagttacaggcctcgacttctttaagcttgaggagctgacccccagcagtagctctgctttcagctccacaagtgcagaaagcgacatgtactacggtcaaagcttgttgcagccaggcgaatggattattaccaaggagatcccaaagataatagatggcaacgtcaatggaatgaaaagaaaagaatgggagaacaaaagtgtgggtattgaggtggaacggaagacccaacatctctccttacaagtgccactacgatctcatagttcttcctcctcaagcgaggagaattctagctctagcgccgctcagccgctgctggccggtgaaaaggagtcaccatcatcagtcgctgacgatcacttggtgcagaaggaatttctgcacgggacaaaaagagatgatggacaggccagtatccccacagaaattagcggcaatagcccagtgtccccaaatacccaggataaatcggtgggacagagtcctctgcgatctccactcaaaagacaggcctccgtttgtagcacaaggctgggcagtacaaaaagcctcacggccgcattctacggtgataagcaacccgttacagtgggagtacagtttagctctgacgttagcagaagcgacgaaaatgtcctggactcacctaagcaacggagatcatttgggagtttcccttatactcctagcgccgactctaattcgtttcaccagtacaggtctatggacagcagcatgtccatggctgacagtgaggcttatttttcggcagccgaagaatttgaacctatttcctccgacgagggcccagggacttaccctggacgaaaaaaaaagaagaagcagacacagcaaattgactattctagaggcagcatatatcattccgtcgagggaccactcaccgggcatggggagtcaattcaggattcaagaaccctgccttttaagacacatccatctcaggcaagcttcgtgtcagctctcgggggagaagatgacgtgatcgagcacctgtatatcgtcgagggggaaaagactgtcgagtctgaacagattacgccgcaacaaccagtgatgaactgctatcaaacatacctcactcagtttcaggtaatcaattggtccgtgaaacatccaacgaataaacgaacatctaagtcctccctgcaccgccctctcgacctggacacccctacttccgaagaatccagcagctccttcgagcaactgagcgtaccaacctttaaagtcatcaagcagggcctgacagcaaatagtctgctggacagaggaatgcagctgagtggctcaacgtccaataccccatataccccgctcgaaaaaaagctggcagacaacacagacgatgagaccctgaccgaagagtggaccctcgatcagccagtatctcagactcggaccaccgctatcgtggaggtgaaaggaaccgtcgacatcgtgcttacacctcttgtggctgaggcgctggaccgttacattgaggccatggtgcattgcgcatccacgagacaccccgcagccatcgtagacgacctgcacgctaaggtgctgcgggaggctgtgcagaacagcaagacaacatttagcgaaaacctctcatccaaacaggacatcaggggtacaaaaactgagcagtccacaataggcacaaccaaccagggccaagcgcaaactaaccttacaatgaaacaggataacgtgactattaagggcctccaaacgaacgtcagcatccctaaagttaacttgtgccttcttcaggcctctgtggaggaatcaccaaccactgcaccaagccggtcagtcactcatgttagcctggtggctttgtgctttgatcggatagcgactcaggtgaggatgaaccgcggagtggtggaagagactagcaacaacgcagagcctggcagaacatctaacttcgacaggtacgttcatgcaacgaaaatgcagccgcagtcctccggctccctccgctctaacgcaggcgctgagaaggggaaggagatcgcagctaagctcaacatccatcgagtgcatggacaattgcgaggactcgatacaacagatataggaacttgcgcaataacggcaatcccctttgaaaagtcgaaagtgctgtttacacttgaggagcttgatgaattcacgtttgtggacgaaactgatcagcaggccgttccagatgtgacacgcattggtcctagccaggaaaagtggggctggataatgttcgagtgcgggctggagaacctgacgataaagggagggaggcagtcaggagccgttctttataacagcttcgggataatggggaaagcgtccgataccgagagagggggagtgttgacctcgaataattctagtgacagtccaactggaagcggttataatacagacgtatcagatgataatctcccctgtgaccgaactagcccctcttctgacttaaacggcaattctgtctcggatgagcaggatgagggagtggaatctgatgacttaaagaaggacctgcctctaatgccgccaccaccagatagttgctcaatgaagctcacaatcaaagagatatggttctcctttgccgctcccactaatgtcaggtctcatacgcatgcgttcagcaggcagctaaacctgctctccacggcaacccctgctgtgggagcgtggctggtgccgatagatcagttgaagtcttcacttaacaagctggaaacagaggggactctccgaatctgcgcagttatgggctgtatcatgacagaggcactggaaaacaagtcagtgcatttcccgcttcggtcaaaatataaccggctgacaaaggtcgcccgatttcttcaggaaaaccccagctgccttctatgtaatattctgcaccactatttgcatcaggcaaattatagtattatcgatgatgctacaatgtctgacggccttcccgcactcgtaacacttaagaaaggcctcgtggctctcgccagacagtggatgaaatttatcgttgtcacccccgcatttaagggcgtgtcattgcataggcctgctcagccactaaaaccacaaatcgccatggatcatgagcacgaggacggcctgggcttggacaatggaggaggactgcagagcgacacctcagctgatggggcagaatttgagttcgatgcagctactgtatccgagcacaccatgctgctggaggggaccgcaaataggccaccgccaggatcatccggtccagtgaccggagcggagattatgcgtaagctgtcgaaaacacacacacactctgactcagcgctcaaaatcaagggcattcacccttaccatagcctttcctatacgagcggggataccgccacagactctcctgttcatgtggggcgtgctggcatgccagtcaaggacagtccgagaaaggaaagcttattgtcctatctcactggatcctttccaagtctccacaacctgctggaggggacacctcaaaggtcctctgcagcagtcaagagctcctcgctcacaagaactggtaacactgttgccaccgatatgctgtccgagcatcctctgctgagtgaacccagtagcgtttcattctacaactggatgagtaacgccgtgggcaatagaggatctgttctccaggaatctcctgtcaccaagagtggccacaactccctgcccaccggagtggcaccaaacctccccacaatacctagcgcctctgatttcaatactgtcctgagctcagatcagaatacactggatggaacccacagccaacactccacatctcaggacgacgtcgccggtgtcgaggaggccaaccaaggctttcctgcggtacagctggccgacgcacaggtggtgttcaagccattgctgagtcataccggaatacagagccaggacactatgccattctgttaccgcatgtactttggagaacacctatcattttccgggacgttggattgtctcagggcggacatcgtcgactctgacactgccaaagagagaaaagggaagcgggctagaagacagggccacgtgaatctccctcctctcgaatttaaaccagcgctaatgttaggcacattcagcatcagtgccgtggtcatggagaagtcagtttgtacgccacagaactcaacctccgccctcagtttccacgacctgtcaaagagatattacaatacctttcattgcaacttcaccatctcttgtcagtcaatcagccagcatgtggatatggctctcgtgagactgatacaccagtttagcactatgattgacgatattaaggcgacccagaccgatataaaattgtctcgatacacagcaggaagtgctagtccaaccccaaccttcaagacgcgcaagcaccgcgactttcgcagctcggacttctcccgctcttcccgcggtagcctgaacggtggaaaccgggtcaataacgcgaagaataagcggacaaataacgaaaacaacaaaaaagagagtcggaacaaaaactccttggggagaagtgagcgtcggacatccaaagtcagtcggaagggatccaaggacgtggtggaccacatgacaatccatatggatgattccgatagcattacagtgtctgagcaatcggagcctagcgcagagtgttggcaaaacatgtacaaattgctgaatttctacagtctaatttcggacccaacaggcatcctcgagaaatcctcagaaacattcggtccggcaggcgttcgctctccaacagaaccaacctgtaaagtggtttttgaaaacgaacaggacaattcctcacttacaaagactcagcgtaagaggagcttggtgacatctgagcctcagcatgtcactctgattgtgttcggcatcggcatggtgaacaggacgcatcttgaagcggacattggaggcttgactatggaatccgaactgaagcgtattcacggatcatttactctgaaagaaaaaatgaaggacgtcttacaccagaagatgaccgagacctgtgccaccgcccatatcgggggtgtgaatattgtgctgctggagggtattaccccaaacattcagcttgaagattttcccacctctccaacatccactgctaagcaggaatttctgacagtcgtgaagtgctccatcgccaagtcacaagcactctactctgcacagaggggccttaagaccaacaacgctgctgtgttcaaggtgggagctattagtattaatatccctcagcaccccgctaccctgcactccatgatggtccgttcctcccaccagctctccaagcagatttccgatttgatccgtcaaccaagtactgcccctcagcccgtcaaggaggatattgccaccccactgcctagcgagaaaactcccacttccgtcaatcaaactccagttgagacaaacgaatttcctcaattgccggagggactcgaaaaaaagcccatcgtgctgaagttctcagctatgctagacggcatcgccataggcgctgccctcctcccgtcactgaaagcagagtacaaaatggggagaatgcggtctcacggaatgaccggcgcacagacgcgcttcacattcgaacttccaaaccatcgtctccgatttacctccaaagtctccgccaccgacatgtccaccatccccccatcggcatcactgaacttgcctccagtcactatgagtggcaagtatataatggaggagcacgactcctattctgaccaagtctggtcaatcgatgagctacccagtaagcagggatattatctacagggcaactaccttcgatgtgtcgcagaagttggatctttcgagcacaacctcacaacggacctgctgaaccacctggttttcgtgcaaaaagtgtttatgaaggaggtgaatgaggtcattcagaaagtcagcggaggtgaacagcctatcccgctctggaacgaacacgatggaacagcagatggtgacaaacccaaaatcctcttgtacagcctgaatctgcagttcaaaggcattcaggtgactgctacaacaccaagtatgcgcgcagtccgatttgaaacaggcctgattgagctggagctatctaacagacttcagacaaaggctagcccgggaagcagcagctatctcaaacttttcggaaagtgccaggtggacctgaacctagccttgggccagatagtgaagcaccaggtatatgaggaggctggcagcgacttccatcaggtggcttacttcaagacgagaatcggcttacggaacgctcttcgggaggaaatttccgggagcagcgatagagaagcagtactgatcactctgaaccgtccgatcgtatatgcccagcccgtcgcttttgatagagcagtgcttttttggctgaactataaggcagcttatgataattggaacgagcaacggatggcactccataaggacatacacatggcaacgaaagaagtggtggatatgctcccagggatccaacagacgtccgcccaagccttcggcaccttgtttttacaattaaccgtgaacgaccttggtatctgccttcctatcacaaacactgcccagtcaaatcataccggtgacctggacactggatcagcgttggtgctgaccattgagtctactctcattaccgcttgtagctccgagagtctcgtgtccaagggtcactttaaaaatttttgcattcgttttgccgacggattcgagacctcctgggacgactggaagccagagattcacggcgaccttgttatgaacgcatgcgtggtgcccgatgggacatatgaagtgtgtagtcgcaccaccgggcaagctgcagcggaaagctcatccgctggtacttggaccttgaatgtgctgtggaagatgtgcggtatcgatgtccatatggaccccaacatcgggaagcggctgaatgcccttggaaacacactgactaccctcactggtgaggaagacatagatgacattgctgatctgaatagtgtgaacatcgcagacttaagcgatgaggatgaagtggacaccatgagtccaaccatccatacagaggctaccgattaccggagacaggctgctagcgcctcccagccaggagaactgcgaggacgaaagataatgaagagaattgtagacatcagggagttaaacgaacaagctaaagtgatcgacgatctgaaaaagcttggcgcttcggaggggaccatcaaccaagaaattcaacgatatcaacagctagagtctgtcgccgttaatgacattcgcagagatgtacgcaaaaagctccggaggtcatcaatgagagctgccagtttaaaggacaaatggggcctgtcatacaaacctagctattcgcgctccaaaagcatatctgccagcggaagaccgcctttaaaaagaatggagagagcttcctccagggtgggggagaccgaagaattgcctgaaatccgcgtggatgcagcctcaccaggccctagggttacgtttaacattcaggacacttttcctgaggagacagaactcgacttgctttctgttaccatcgagggtcctagccactattcttctaactccgagggtagttgttctgtattctcttcgcctaagactcccggtggcttcagccccggtatcccatttcaaactgaggaggggcgacgcgatgactccctttccagcacctccgaggattctgagaaggacgagaaagatgaggatcacgaacgcgagcgcttctacatttatagaaaacctagccacacaagtagaaaaaaggctacaggcttcgccgcagtccaccagctcttcacagagagatggccaacaactcctgtgaacaggtccctttcaggtacggccaccgagcggaacattgatttcgaactggatatccgagttgagatcgacagcggtaagtgtgttctgcatccgaccaccttgctccaagagcacgacgatatctctcttcgtaggagttatgaccggtcctccagaagtttggaccaagactctccgagtaaaaaaaaaaaatttcagaccaattatgcttccacgacacacttgatgacaggcaaaaaggtgccttcttccctgcagacgaaaccttctgacctcgagacaacagttttctacatacccggagtggatgttaaacttcactataatagcaaaaccctcaagacagaatccccaaacgcttcccgaggctcaagcctccctaggacactcagcaaggagtcaaaactttatggaatgaaagattctgcaaccagccccccatcaccacctctgccctctactgtgcaaagcaaaactaacacattgcttcctccacagccccctcccataccagcagcaaagggtaaggggtcaggcggagttaaaaccgctaagttgtatgcctgggtggccctgcagagccttcccgaagagatggtcatttcaccgtgcctcttagatttcttggagaaggccctggagactatccccattacccccgtcgaacgcaactacacagctgtgagtagtcaggacgaggatatgggccatttcgaaattccggatccaatggaagaaagcactacaagcctcgtgtcttcatctaccagcgcttacagctctttccccgtggatgtggtggtttatgtgcgtgtgcagcctagtcagattaagttctcgtgtctacccgtgagccgggtcgagtgtatgctgaagctgccaagccttgacctggtcttctcttctaacagaggcgaacttgagaccctcggcacaacttaccccgcagagactctgtcccctggaggcaatgcaacacaaagcgggactaagacaagcgcttccaagactggaatcccagggagctcaggtctggggtccccactagggaggtcgcggcactccagctcccaatccgatctgacctccagttctagtagctccagcggactgtcattcaccgcctgcatgtcagatttttcattgtatgtctttcatccctacggcgcagggaagcagaaaactgctgtgagtgggctgacccccggttcaggcggtctgggtaacgttgacgaggagccaacaagtgtgactggacggaaagactccctgtcaatcaatctggaattcgtaaaggtatctctctctcgcataaggcgctcggggggtgcgtctttctttgagagccagagtgtttccaagtcagctagtaaaatggatactacactaatcaacatttctgcagtttgtgacatcggctccgcttcctttaagtacgacatgaggcggctcagcgagatacttgccttcccaagggcgtggtacaggaggtccatcgctcgacgactgtttctgggagatcaaaccataaatttgcccacatccgggcctgggacgcctgattctatcgagggggttagtcagcacctgagtcccgaaagctcaaggaaggcgtattgcaaaacatgggaacagccctctcagagtgcctccttcacacatatgccccagtcccctaatgtgttcaatgaacacatgaccaattctaccatgtcccctgggactgtgggtcagtcactgaagtccccagcctccatccgatcaaggagtgtgagtgactcttccgtgcccaggcgcgacagcctgtcaaagactagcactcctttcaataagtctaataaggccgcaagtcagcaaggcactccctgggaaaccctggtcgtgtttgctatcaatctaaaacagctcaacgtgcagatgaatatgtctaacgtgatgggaaacaccacttggacaaccagtggactgaaaagccaggggcgattgtcagtaggcagcaacagggacagagaaatcagcatgtcagtgggcctgggtcgctcgcagctagatagtaagggaggggtcgtgggcggaactatcgatgtcaacgccctcgagatggtagcccacattagcgagcaccccaatcaacagcctagccacaagatccaaataacaatgggcagtaccgaagccagggttgactacatgggctcctcgattctaatgggaatcttttccaatgctgatcttaagctccaagacgagtggaaggtgaacttgtataatactcttgattcttccattaccgataagtcggaaatctttgtgcacggcgacttgaaatgggacattttccaggtgatgatctcgaggtcaacaacaccggacctgattaagatcgggatgaaattgcaggagttcttcactcagcagtttgacacgtcaaagcgtgctctgagcacctgggggccagtcccttatctgcccccaaagacgatgacctcaaacctcgaaaagagctcacaggaacagttgctcgatgctgcgcatcacaggcactggcctggagtccttaaggtggtcagcggctgtcacatcagcctgttccagatacccctaccagaagacgggatgcagtttgggggatcaatgagcctgcatggcaaccatatgacccttgcctgtttccacggaccaaacttcagatcaaaaagttgggcactgtttcatctagaggagccaaatattgcattttggactgaagcccagaagatctgggaagacgggtcctcagaccattccacttatatcgtgcagactttggattttcacctgggccacaataccatggtcacaaaaccctgcggtgcccttgaatcaccaatggctaccattaccaagattacacgtagacgccacgaaaacccaccccacggcgtggcctcggttaaggagtggtttaattatgttacggccacacgtaacgaggagctcaatctcctccggaacgttgacgccaataatactgagaattcaacgaccgtgaagaactcttccctcctgagtggctttagaggcggtagcagttataatcatgaaaccgagacaatcttcgcattgccaaggatgcagctcgatttcaagtcgatccacgtgcaagaacctcaggagccctcactgcaagacgcttccctcaaacctaaagtggaatgtagtgtcgtcacagaattcacggatcatatttgcgtgaccatggatgccgaactcatcatgtttcttcacgatctggtgtctgcctacctgaaggaaaaggaaaaagcgatcttcccaccacgcatcttgagcaccagacccggacagaaaagccccatcataatacatgatgacaactctagtgataaagacagagaggatagtatcacctacacgactgtcgattggagggattttatgtgcaacacttggcatctcgagcctacgcttcggctcatttcctggacggggagaaaaattgatcccgtcggcgtcgactatatcctgcagaagctcggtttccaccacgcaaggaccacgatccctaagtggctgcagcgaggggtgatggaccccctcgataaggtgctctctgtcttaataaaaaaactcggaaccgctctccaggacgagaaagagaagaagggaaaagataaggaggagcactaa

SEQ ID NO: 278452 - DNA, 15896 bp, Artificial Sequence
  derived and/or modified sequence
agtgccgcccggcctcggttgggacccctcccctcctcctccgcccccttgggtgtcggtggctgcggccagggtctggacctgggcggcggccccgggcggcggggctaaagggtgtgggcaccggcagagcttcgcaggctgcatccggctcggtgctgctgccgtcgccgcccctgccgccgcccaaggccctcggcgttccccggagagaggccagagggatttcgggctgcctcggcactcgcccaggtttgttaagatgaaacactgcagaaaggctatctgaagaaaagtagaaggaaaaacagaacgttgcaaactctggaaaaaaacttgggcctttagatgttgttctggaaaaactttagtaatggatcaaaggaagaatgagagtattgttcctagtataactcaattagaagattttcttacagaacacaattccaatgttgtttggctccttgttgctaccattttgtcctgtggatggattatttacctcacatattataattcccggaatgttggtcttattttaacactagttcttaacagattatacaagcatggctatatccatattggttccttctctttctctgttctttctggaaaagtcatggttcgtgaaatctattacattacagaagacatgtctattaggattcaagatggattcatcatttttcggtggtggaaaatgtataacccaaaacagaagcaacatgatccaaaggcagaaaccaggttatacatcacagtcaatgactttgaatttcatgtctataatcgctcggatctttatggacgccttcaagagttgtttggtttggagccaacaataattccacctaagaaagatgatgataaaacacgggaaattggaagaacaagaacccaatcgaaaattgaaagagttaaagtaaaaacagaatcccaagaccccacatcttcatggagatcacttattccagtcataaaggtcaatgtgagcacaggacgtttggcctttggaaatcactaccagccgcaaactctgtgcatcaactttgatgatgctttcttaacttatactacaaaaccaccttcaagtcatcttgaccaattcatgcatattgtgaaaggaaagcttgaaaatgttcgagtcatgcttgttcctagtccaagatatgttggtcttcaaaatgatgaaccaccgagattaatgggagaaggttttgtggtgatgcagtcaaatgatgttgacatctactactacatggatgagccaggacttgttccggaagaaacagaagaaaatattgaaggagaaatgagcagtgaggattgcaaattacaagacttgcctccatgttggggactggatatagtttgtggtaaaggaacagattttaattatggaccatgggccgataggcagagagattgtttgtggaagtttttctttccacctgactatcaagttctgaaagtttctgaaattgcacagcctgggagaccaagacagatccttgcttttgaattacgaatgaatattattgcagatgctacaattgatttgctgtttaccaaaaatagggaaacaaatgctgtacatgtaaatgtaggagctggctcatatttagaaattaatattccaatgacagttgaagaaaatggttacactcctgctattaagggacaactcttacatgtggatgccactaccagcatgcaatatcggacccttttagaagcagaaatgttagcattccacatcaatgccagctacccccgaatatggaacatgccgcagacatggcagtgtgaattagaggtttataaagccacttaccacttcatctttgcacagaaaaacttctttacagatttaattcaagactggtctagtgacagtcctccagacattttttcatttgttccatatacgtggaattttaaaatcatgtttcatcagtttgaaatgatttgggctgctaatcaacacaattggatcgactgttctactaaacaacaggaaaatgtgtatctggcagcctgtggagaaacactaaacattgatttttctttgccttttacggactttgttccagctacatgtaataccaagttctctttaagaggagaagatgttgatcttcatttgtttctaccagactgccaccctagtaaatattctttatttatgctggtaaaaaattgccatccaaataagatgattcatgatactggtattcctgctgagtgtcaaagtggccagaaaacagttaaaccaaaatggcgcaacgttactcaggaaaagtctggttgggttgaatgctggactgtcccaagtgtcatgcttacaattgattatacatggcatccaatttatccacaaaaagcagatgaacagctgaaacaatcattatcagaaatggaagagacaatgctatctgtattaaggccatcccagaagacatcagacagagttgtttcttctccctctacttcttcacgcccacctattgatccctcagaacttccacctgataaacttcatgtagaaatggaactttctccagattctcagataactctctatggacctctactaaatgcctttttgtgtataaaggaaaactactttggggaagatgacatgtatatggattttgaagaggttatctcaagtcctgttttgtcactgtcaacatcatccagctctgggtggactgctgttggaatggaaaatgacaaaaaggaaaatgaaggttcagccaagtcaattcatccacttgccttgcgtccttgggatattactgtacttgttaatttgtacaaagttcatgggcgtcttcctgttcatggaactactgatggtcctgaatgccctacagctttcttggaaagactatgttttgaaatgaaaaaaggatttagggagaccatgctgcaacttatcctgtcacccctgaatgtgtttgtcagtgataactatcagcagcgaccccctgtggatgaagtactcagggaaggtcacatcaatttgtcaggtctccagctgagagcacacgctatgttctcagcagaaggtcttcctttgggaagcgattccttagaatacgcatggttaattgatgtgcaggctggaagtcttacagctaaggtcacagcaccacagctggcatgcctcttggagtggggacagacatttgtttttcatgtggtatgtcgggagtatgaactggaaagaccgaaatcagttataatatgtcagcatggaattgatcgtcggttctgtgaatccaagttgagttgtattcctgggccttgtccaacttcagatgatttgaaatatactatgattcgtttagcagtagatggagccgatatttacattgttgagcatggttgtgctacaaatataaagatgggtgcaattcgagttgcaaactgtaatctccacaatcaatcggttggggaaggaatcagtgctgcaattcaggattttcaagtgagacagtacattgagcaattaaataattgcagaattggacttcagcctgcagtgctacggagggcctattggcttgaagctgggtcagccaatttaggacttattactgttgatattgctttagctgctgaccatcattctaaacatgaggcacaaagacatttcttagaaactcatgatgccagaactaagaggttgtggtttttatggccagatgatatcctgaagaataagaggtgtagaaacaaatgtggttgtctcggtggctgcagattctttggtggcacagtaactggcctagatttcttcaaacttgaagagttgacaccttccagtagctctgcattttcaagcacaagtgcagagtctgatatgtattatggacagtctctgctacagcctggagaatggataattactaaagaaattcccaaaattatagatggtaatgtgaatggcatgaagaggaaagaatgggaaaacaaatcagtgggaatagaagtagagagaaaaactcagcaccttagtcttcaagtaccattacgatctcatagttcatcctcttcctcagaagagaacagtagttctagtgctgcacagcctttgttggctggtgaaaaggaaagtccttcatctgttgctgatgaccatttggttcaaaaagagttcttgcatgggacaaaaagagatgatggccaagcaagtatccctacagaaatttcaggaaacagccctgtgtctcctaatactcaggataagtcagtaggtcaatctcctcttagatctcccttgaaacgacaagcctctgtctgttccacccgtcttggaagtactaagagtcttactgctgctttctatggggacaagcagcctgtaacagttggagtccagtttagtagtgatgtctctcgaagtgatgagaatgtactagactcaccaaagcagaggagaagttttggttcattcccatatacaccatcagcagactctaattcatttcatcagtatcgatcaatggattccagcatgtcaatggctgatagtgaagcctacttttctgctgctgaggaatttgagcccattagcagtgatgaaggccctggaacttatccgggtagaaaaaagaagaaaaagcaaacccagcagattgactacagtaggggttccatatatcacagtgtagaagggccacttactggacatggagaaagcattcaggattccagaactctgccattcaaaactcatccttctcaggcttcatttgtttctgcgttaggtggagaagatgatgttatagaacatctatatattgtagaaggtgagaaaacagtggagagtgaacagattactccgcaacaacccgtgatgaattgttatcagacttaccttactcagttccaggtaattaattggtcagttaagcacccaaccaacaaaagaacctctaaatcctcattgcatcgtccccttgatctggatacaccaaccagtgaagaaagttcatcgtcatttgaacagctttctgttccaacttttaaggttatcaagcaggggctcacagctaattctttgctagacagaggcatgcaactttcaggatcaacttcaaatacgccgtatactccattggaaaaaaaactcgctgataacacagatgatgaaacattaacagaagagtggaccctggatcaaccagtgtcccagaccaggacaacagccatagttgaagtaaaaggaactgttgatattgttttgactcccctggtggctgaagctttagacagatatattgaagcaatggttcattgtgctagtacccgacatccagctgcaattgtagatgatcttcatgctaaagtcctcagggaagctgtccaaaatagcaagactaccttttcagaaaatttatcttccaaacaagacattagaggaacaaaaactgagcagtctacaataggaacgactaaccaaggacaagcacagacaaatcttacaatgaagcaagataatgtaacaattaaaggtcttcagactaatgttagcataccaaaggtaaacttatgtttgttacaagcctcagtggaagaatctccaactacggctcctagtaggagtgtgactcatgtttccctagtggcattgtgttttgacagaattgctacacaggttcgcatgaacagaggtgtggttgaagagacttcaaacaatgcagaacctggtagaacatcaaattttgataggtatgttcatgccacaaagatgcagcctcagtcatctggatctctcagatcaaatgctggagcagaaaaaggcaaagaaattgcagctaagttaaacattcatcgagttcatgggcaacttaggggtcttgatacaacagacattgggacctgtgcaatcactgctattccttttgagaagtccaaagttttatttactcttgaagagttggatgaatttacttttgtggatgaaactgatcagcaagctgttccagatgtaactcgaataggtcccagccaagaaaaatggggatggataatgtttgaatgtggacttgaaaatttaaccataaaaggaggaagacagtctggtgctgttttatataacagttttggaattatgggtaaagctagtgacacagaaaggggtggagtgctgacatccaataattcttctgattctccaaccggcagtggctataatactgatgtctctgatgataatcttccatgtgaccggacaagcccttcctcagacttaaatggaaattctgtttcagatgaacaggatgaaggagtcgaatctgatgatttgaaaaaagatctacctctgatgcctcctcctccagattcatgtagcatgaagttgaccattaaagaaatttggtttagttttgcagctcccaccaatgtgagatctcacacacatgcattttctaggcagctgaaccttttaagcactgcaacaccagctgttggtgcatggcttgttcccattgaccaactcaagtcatctttaaacaaattggaaactgagggaaccttgagaatttgtgctgttatgggatgcataatgacagaagcattagagaataaaagtgtacattttcccctaagaagtaaatacaacaggcttacaaaagttgctcgctttctccaagaaaatccttcatgtttactatgtaatatactacaccactatctgcaccaggcaaattactccatcattgatgatgctacaatgagcgatggacttcctgctttggtaactttgaagaaaggtttagttgcactggcaaggcagtggatgaagtttattgtggtgacaccagcctttaaaggagttagcttacatagaccagctcagcctctgaaacctcaaatagctatggaccatgaacatgaagatggacttggattggacaatgggggtggtcttcaaagtgataccagtgctgatggagcagaatttgagttcgatgcagccacagtcagtgaacacacaatgctattagaaggaacagctaaccggcctccacctggtagctctggacctgtaactggagctgagataatgaggaaactttctaaaactcatacccatagtgactctgcattaaaaataaagggcattcacccatatcattctctgagctataccagtggagacactgccactgattctccagtgcatgttggacgtgctgggatgccagtaaaggacagtccaaggaaggagagcctactcagctacctgactggaagcttcccaagcctgcacaacctcctggaaggtactcctcagagaagcagtgctgctgtgaaaagtagctccctaacgagaacaggaaatacagtagccactgatatgttatctgaacatcccttgctatctgagccatcatctgtgagtttctataattggatgtcaaatgctgtgggtaatcgaggaagtgtgttacaagaatctcctgttacaaaatcaggacacaatagtcttcccacaggtgttgcacccaatcttccaacaataccctcagcctcagatttcaacactgtcttgtctagtgaccaaaatactttggatgggacacattctcagcatagcaccagtcaggatgatgtggcaggtgtagaagaagcaaaccaagggtttcctgctgttcagcttgctgatgcacaggttgttttcaagcctcttctgagtcatacagggatccagtcacaggatacaatgccattctgctaccgaatgtactttggagaacacctttcattttcagggactttggactgcctcagagcagatattgtggattcagacacagccaaagagagaaaaggcaaaagagcaagaaggcaaggccatgtgaatcttcctccacttgagttcaaaccagcattaatgttgggaacctttagcatcagtgctgttgtaatggaaaagtccgtgtgcacccctcagaactctaccagtgccctttcttttcatgatctcagcaagcggtattataacacctttcactgcaactttactatttcctgtcagtcaataagccagcatgtagatatggctttggttcgtcttattcatcagtttagcacaatgatagatgacatcaaagcaactcagactgatattaaacttagcagatatacagccggatctgcttccccaacacctaccttcaaaaccagaaaacatcgggactttcgttcatctgactttagccgcagttctagaggaagtcttaatggtggcaatagagtaaataatgcaaagaacaaacggaccaacaatgagaataacaaaaaggaatctcgaaacaagaattcattaggaagatctgaaagaagaacatcaaaagtgtctaggaaaggttcaaaagatgtggtggatcacatgactattcatatggatgactctgattcaattacagtgtcagaacaaagtgagccttcagctgagtgctggcagaatatgtataaattgcttaacttctattcacttatctccgatccaacaggaatattggaaaagtcttcagaaacatttggaccagcaggagttcggagccctacagagccaacatgtaaagttgtgtttgagaatgaacaagacaacagcagtttgactaagactcagaggaaacgtagcttggtaacttctgaacctcagcatgttactctaatagtgtttgggattggcatggtgaaccgcacacacctagaggcagatattggtggactaacaatggaatcagaactgaagaggatccatggcagttttactcttaaggaaaaaatgaaagatgttttacatcaaaagatgactgagacttgtgctactgctcatattggtggggttaatattgtgctgcttgaagggattacaccaaatatacaactggaggattttcctacatctcctacaagtacagccaaacaagagtttctaactgtagtgaaatgtagtattgccaagtcccaagccctctacagtgcccaaagagggctgaagacaaacaatgctgctgtgttcaaagtaggagctatcagtatcaacattcctcagcaccctgccaccttacatagcatgatggttcgaagttctcaccaactatctaaacaaatctcagacctaatcagacagccttctacagccccacagcctgtaaaagaagatattgcaaccccactaccttctgaaaaaaccccaacaagtgttaatcaaactcctgttgaaacaaatgaatttcctcagctaccagaaggcttagaaaagaagcctattgttcttaaattcagtgccatgttagatggtatagccattggagcagcacttttaccatctctgaaagcagaatacaagatgggaagaatgagaagtcatggaatgacaggtgcacagacaagatttacatttgagctgccaaatcacagattgcgttttacttcaaaagtttctgccacagatatgtcaaccattcctccttctgccagtcttaaccttccccctgttaccatgtcagggaaatatataatggaagaacatgatagttattcggatcaggtgtggagtatagatgaactgccttctaaacaaggttactatttacagggaaattatctgcgttgtgtggcagaagttggttcctttgaacataatcttacaactgatcttctaaaccacttggtatttgtacagaaagtgttcatgaaggaagttaatgaagtaatacaaaaagtttctggtggggagcagcctattcctctctggaacgaacatgatggaacagcagatggagataaacctaaaattctcctctattccctaaacttgcagttcaagggtattcaagtaacggccactactccatcaatgagagctgtaagatttgaaactggattgattgaactggaactttctaaccgacttcaaaccaaagcttcaccaggaagtagcagctatctgaaactgtttggcaaatgccaggtggatttaaatctggcattaggacaaattgtcaaacatcaggtttatgaggaagctggttctgattttcatcaagttgcctattttaaaaccagaattggattaagaaatgccctccgagaagaaatcagtggttcttcagatagggaagctgtgcttattactttgaatagaccaattgtttatgcacagcctgtggcctttgatagagctgtgctgttttggctgaattataaggccgcctatgacaactggaatgaacaacgaatggctttacataaggatattcatatggctacaaaggaagtagtagatatgctacctggtatccagcaaacatcagcccaggcctttgggactctttttctccagctcactgtcaatgatctgggaatttgcctacctatcacaaatactgcacagtctaatcatactggagaccttgacactggttctgctttggtattaaccattgaaagtactctcatcactgcatgctcttcagagtctctggttagcaaagggcatttcaaaaacttttgtatccgttttgctgatggatttgagacatcatgggatgactggaaaccagaaattcatggggatttagtgatgaatgcctgtgtagttccagatggcacctatgaagtatgttcaagaactacaggacaagcagcagctgaaagcagtagtgctggaacctggacactcaacgtattgtggaaaatgtgtgggattgatgttcacatggatcctaacattggcaaaaggcttaatgctctgggcaatactcttacaacactgacaggagaggaagacatagatgacattgctgacttaaattcagtgaacatagctgacctgtcagatgaggatgaagttgatactatgtctcccactatccatactgaagccacagattatcgaagacaggcagcatctgctagccagccgggagaacttagaggaagaaaaattatgaagcgtatagtggatatcagagaactgaatgaacaggccaaagtaatagatgatctgaaaaaattaggtgcaagtgaaggaaccataaaccaggaaattcaacgttaccaacagttagaatctgtggctgtgaatgacattagaagagatgttcgtaaaaaattacggaggtccagtatgcgggctgcttccctaaaggataagtggggtttgagttacaaaccaagttacagccgatcaaaaagcatttctgcttctggaagaccacctcttaagcgaatggaaagggcaagttctcgagtaggagaaactgaagagctcccagaaatccgtgtggatgcagcatctcctggacctagagtaacttttaatatccaggatacatttccagaggagacagaactggaccttttgtcagtaaccattgaaggtccatcccattattcatcaaatagtgaaggatcatgttctgtgttcagttctcccaaaactccaggaggcttttcaccaggcattcctttccaaactgaagagggccgacgggatgacagtttgtcttctaccagtgaagattccgagaaggatgaaaaagatgaagaccatgagagggaaaggttttatatttacaggaaaccctcacatacgtctcgtaaaaaagcaacaggctttgctgctgttcatcagctatttacagaacgctggccaacaacaccagtcaatagaagtcttagtggcacagctacagagagaaatattgactttgaacttgatatacgggttgaaattgatagtggaaaatgtgtactccacccaaccacccttctacaagaacatgatgatataagtttgagaaggagttatgatcgaagttccaggagcttagatcaagattcaccttcaaaaaagaagaagtttcaaactaattatgcttctaccacccatttaatgaccggcaagaaagtgccatcatctctacagacaaagcctagtgacttagaaacaacagtattttacattcccggagttgatgtaaagttgcattacaattccaagacgctaaagactgaatcacctaatgcctccaggggatcttccttgccaagaacactgtccaaagagtccaagctgtatggtatgaaagatagtgcaacatctcctccttctcctcctttaccttccactgtccagagcaagactaacaccttacttcctccccagcccccacctattcctgcagccaaaggaaaaggaagtggaggagtaaaaacagccaagttatatgcctgggtagcacttcagtcattgccagaagaaatggttattagtccctgcctattagactttctggaaaaagctctggaaactatcccaattacaccagttgaaaggaattatacagctgtcagctcacaagatgaagatatgggacattttgaaataccagatcctatggaagaatcaacaacatcactagtgtcgtcttcaacatctgcttactcttccttccctgtagatgttgtggtttatgtacgagttcagccctcacagatcaaatttagctgtttaccagtatcaagagtagaatgcatgttaaagctgccatccctggatttggtgttttcttcaaaccgaggagaactggagactttagggactacatatcctgcagagactttatcccctggaggtaatgctactcagagtggaacaaagacttctgctagcaaaactggaataccaggttcatcgggattaggcagccctcttggccgaagtcgacatagtagtagtcagtcagacctgaccagttccagcagtagttcatctggcttgagcttcactgcatgcatgtctgacttttccctttatgtatttcatccatatggagcagggaaacaaaaaactgctgtttctggcctcacacctggatcaggaggattagggaatgtggatgaggagcccacttcagtcactggtcgaaaagattcactcagtataaaccttgagtttgtaaaagtgagtttgtcacggatcaggcgttcaggaggtgcctcattttttgaaagtcagtctgtaagcaagtctgcaagcaaaatggatactacgttaataaatatatctgctgtttgtgatatagggtctgcctcctttaaatatgatatgcgccgactcagtgaaattctggcatttccaagagcatggtatagaagaagtattgcaagacgtctattccttggagaccaaactataaatttgccaacatctggcccagggacacctgattccattgaaggggtaagccaacacctttcccctgaatcatcaagaaaagcttactgcaagacctgggagcagccaagtcagtcagcctccttcacccacatgcctcagtcacctaatgtgttcaatgagcatatgacaaacagcaccatgtcaccagggacagtaggacagagcctaaaatccccagcttccataagatcaaggagtgtatctgattcttcagttcctcgaagagattcactttcaaaaacatcaactccttttaacaaatcaaacaaagcagcaagccaacaagggaccccatgggaaacacttgtcgtgtttgctatcaacttgaagcaattaaacgttcaaatgaatatgagtaatgtaatgggaaatacaacttggacaactagtggtttgaagagccagggccgtctgtcagtaggaagtaatcgtgatcgagagatcagcatgtctgttggtctgggaagatcacaattagattctaaaggaggagtagttggagggaccatagatgtcaatgctttggagatggttgctcatatttctgaacatccaaatcagcaacccagtcacaaaattcagattactatgggttctactgaagctcgtgttgattacatgggctcaagtatcctcatgggcatcttcagtaatgctgatcttaagcttcaggatgaatggaaagtaaacttgtataatacattggattcaagcataactgataaaagtgagattttcgtccatggagatttgaagtgggatattttccaagtaatgatatcaaggtcaaccacaccagatctgataaaaataggaatgaagctccaggaatttttcacacaacaatttgataccagcaaacgagctctgtctacctggggaccagttccttaccttccgccaaagacaatgactagcaacctagaaaaaagttcacaagaacaattacttgatgcagcacatcatcgacactggcctggagtattgaaggtggtatcaggatgccacatatccttatttcagattccattaccagaagatggaatgcaatttggaggatcaatgagcttacatggaaatcatatgacactggcatgttttcatggtccaaattttcgttcaaaatcttgggccctttttcatttagaagaaccaaatattgctttttggactgaagctcagaaaatctgggaagatggctccagtgatcattctacatatattgtacaaacactagattttcacctgggtcataatactatggttaccaaaccatgtggtgctttggaaagtcctatggcaacaataaccaagataacaaggcgtcgccatgaaaatccaccccatggagtagcaagtgtgaaagaatggttcaattatgttacagctacaaggaatgaagagctaaatctgcttcgtaatgttgatgctaacaacactgagaatagcactactgtgaagaattctagtttgttgagtggattcagaggaggttctagctacaaccatgaaacagagactatctttgcattaccaaggatgcagcttgactttaaatccattcatgttcaagaaccacaggagccttcattacaggatgccagcctgaagccaaaagtagaatgtagtgtggtgacagagttcactgaccacatttgtgtgactatggatgctgagctcatcatgtttcttcatgatttagtatcagcttatcttaaagaaaaagaaaaagccatctttccacctcggattttatctactcgaccaggacaaaaaagtccaattattatacatgacgacaattcctctgataaagatagagaagatagcatcacttatactactgtggactggagagattttatgtgcaatacatggcatctagaacctactcttagattaatttcttggactggaagaaagattgatccagtaggtgttgattatattcttcaaaaattgggctttcatcatgctaggactactattcctaaatggcttcaaagaggagtcatggatccactggacaaggttctgtcagttcttatcaaaaagctcggtactgcactacaggatgaaaaggaaaagaaaggcaaagacaaagaagaacactaaaaaagtaatttgatctgtgaacaaattatgattgtgtctgttttattacactggagtgtttttttagtataataatttgaaatataactttaaaataattctaaatttgtggctataattaaaagtttgtaagttaacctgttctagttccatcattctgtgtacagtgaagtattgcatgataatgtaaattttgtgaaaaactagattaaaatatataactgcttgttatggtttataattatataatgtgcaatacaattcctgcatctttaaaatgtctgcagaataactgtgaatttttttgttattggattggccgtaacttttagaaaaaaatcttgttgatgataatgtgattttggggaggtcattaattgctttttcttttttaaatgtagacttatataaatacctgtttgtatatagcttgagtaattgtgatatgattgtataccactaaaatattgttaactattataataaagtcacagtaatggtttaa

SEQ ID NO: 278453 - DNA, 15574 bp, Artificial Sequence
  derived and/or modified sequence
gaaatcttttaggcctttagatgttgttctggaaaaactttagtaatggatcaaaggaagaatgagagtattgttcctagtataactcaattagaagattttcttacagaacacaattccaatgttgtttggctccttgttgctaccattttgtcctgtggatggattatttacctcacatattataattcccggaatgttggtcttattttaacactagttcttaacagattatacaagcatggctatatccatattggttccttctctttctctgttctttctggaaaagtcatggttcgtgaaatctattacattacagaagacatgtctattaggattcaagatggattcatcatttttcggtggtggaaaatgtataacccaaaacagaagcaacatgatccaaaggcagaaaccaggttatacatcacagtcaatgactttgaatttcatgtctataatcgctcggatctttatggacgccttcaagagttgtttggtttggagccaacaataattccacctaagaaagatgatgataaaacacgggaaattggaagaacaagaacccaatcgaaaattgaaagagttaaagtaaaaacagaatcccaagaccccacatcttcatggagatcacttattccagtcataaaggtcaatgtgagcacaggacgtttggcctttggaaatcactaccagccgcaaactctgtgcatcaactttgatgatgctttcttaacttatactacaaaaccaccttcaagtcatcttgaccaattcatgcatattgtgaaaggaaagcttgaaaatgttcgagtcatgcttgttcctagtccaagatatgttggtcttcaaaatgatgaaccaccgagattaatgggagaaggttttgtggtgatgcagtcaaatgatgttgacatctactactacatggatgagccaggacttgttccggaagaaacagaagaaaatattgaaggagaaatgagcagtgaggattgcaaattacaagacttgcctccatgttggggactggatatagtttgtggtaaaggaacagattttaattatggaccatgggccgataggcagagagattgtttgtggaagtttttctttccacctgactatcaagttctgaaagtttctgaaattgcacagcctgggagaccaagacagatccttgcttttgaattacgaatgaatattattgcagatgctacaattgatttgctgtttaccaaaaatagggaaacaaatgctgtacatgtaaatgtaggagctggctcatatttagaaattaatattccaatgacagttgaagaaaatggttacactcctgctattaagggacaactcttacatgtggatgccactaccagcatgcaatatcggacccttttagaagcagaaatgttagcattccacatcaatgccagctacccccgaatatggaacatgccgcagacatggcagtgtgaattagaggtttataaagccacttaccacttcatctttgcacagaaaaacttctttacagatttaattcaagactggtctagtgacagtcctccagacattttttcatttgttccatatacgtggaattttaaaatcatgtttcatcagtttgaaatgatttgggctgctaatcaacacaattggatcgactgttctactaaacaacaggaaaatgtgtatctggcagcctgtggagaaacactaaacattgatttttctttgccttttacggactttgttccagctacatgtaataccaagttctctttaagaggagaagatgttgatcttcatttgtttctaccagactgccaccctagtaaatattctttatttatgctggtaaaaaattgccatccaaataagatgattcatgatactggtattcctgctgagtgtcaaagtggccagaaaacagttaaaccaaaatggcgcaacgttactcaggaaaagtctggttgggttgaatgctggactgtcccaagtgtcatgcttacaattgattatacatggcatccaatttatccacaaaaagcagatgaacagctgaaacaatcattatcagaaatggaagagacaatgctatctgtattaaggccatcccagaagacatcagacagagttgtttcttctccctctacttcttcacgcccacctattgatccctcagaacttccacctgataaacttcatgtagaaatggaactttctccagattctcagataactctctatggacctctactaaatgcctttttgtgtataaaggaaaactactttggggaagatgacatgtatatggattttgaagaggttatctcaagtcctgttttgtcactgtcaacatcatccagctctgggtggactgctgttggaatggaaaatgacaaaaaggaaaatgaaggttcagccaagtcaattcatccacttgccttgcgtccttgggatattactgtacttgttaatttgtacaaagttcatgggcgtcttcctgttcatggaactactgatggtcctgaatgccctacagctttcttggaaagactatgttttgaaatgaaaaaaggatttagggagaccatgctgcaacttatcctgtcacccctgaatgtgtttgtcagtgataactatcagcagcgaccccctgtggatgaagtactcagggaaggtcacatcaatttgtcaggtctccagctgagagcacacgctatgttctcagcagaaggtcttcctttgggaagcgattccttagaatacgcatggttaattgatgtgcaggctggaagtcttacagctaaggtcacagcaccacagctggcatgcctcttggagtggggacagacatttgtttttcatgtggtatgtcgggagtatgaactggaaagaccgaaatcagttataatatgtcagcatggaattgatcgtcggttctgtgaatccaagttgagttgtattcctgggccttgtccaacttcagatgatttgaaatatactatgattcgtttagcagtagatggagccgatatttacattgttgagcatggttgtgctacaaatataaagatgggtgcaattcgagttgcaaactgtaatctccacaatcaatcggttggggaaggaatcagtgctgcaattcaggattttcaagtgagacagtacattgagcaattaaataattgcagaattggacttcagcctgcagtgctacggagggcctattggcttgaagctgggtcagccaatttaggacttattactgttgatattgctttagctgctgaccatcattctaaacatgaggcacaaagacatttcttagaaactcatgatgccagaactaagaggttgtggtttttatggccagatgatatcctgaagaataagaggtgtagaaacaaatgtggttgtctcggtggctgcagattctttggtggcacagtaactggcctagatttcttcaaacttgaagagttgacaccttccagtagctctgcattttcaagcacaagtgcagagtctgatatgtattatggacagtctctgctacagcctggagaatggataattactaaagaaattcccaaaattatagatggtaatgtgaatggcatgaagaggaaagaatgggaaaacaaatcagtgggaatagaagtagagagaaaaactcagcaccttagtcttcaagtaccattacgatctcatagttcatcctcttcctcagaagagaacagtagttctagtgctgcacagcctttgttggctggtgaaaaggaaagtccttcatctgttgctgatgaccatttggttcaaaaagagttcttgcatgggacaaaaagagatgatggccaagcaagtatccctacagaaatttcaggaaacagccctgtgtctcctaatactcaggataagtcagtaggtcaatctcctcttagatctcccttgaaacgacaagcctctgtctgttccacccgtcttggaagtactaagagtcttactgctgctttctatggggacaagcagcctgtaacagttggagtccagtttagtagtgatgtctctcgaagtgatgagaatgtactagactcaccaaagcagaggagaagttttggttcattcccatatacaccatcagcagactctaattcatttcatcagtatcgatcaatggattccagcatgtcaatggctgatagtgaagcctacttttctgctgctgaggaatttgagcccattagcagtgatgaaggccctggaacttatccgggtagaaaaaagaagaaaaagcaaacccagcagattgactacagtaggggttccatatatcacagtgtagaagggccacttactggacatggagaaagcattcaggattccagaactctgccattcaaaactcatccttctcaggcttcatttgtttctgcgttaggtggagaagatgatgttatagaacatctatatattgtagaaggtgagaaaacagtggagagtgaacagattactccgcaacaacccgtgatgaattgttatcagacttaccttactcagttccaggtaattaattggtcagttaagcacccaaccaacaaaagaacctctaaatcctcattgcatcgtccccttgatctggatacaccaaccagtgaagaaagttcatcgtcatttgaacagctttctgttccaacttttaaggttatcaagcaggggctcacagctaattctttgctagacagaggcatgcaactttcaggatcaacttcaaatacgccgtatactccattggaaaaaaaactcgctgataacacagatgatgaaacattaacagaagagtggaccctggatcaaccagtgtcccagaccaggacaacagccatagttgaagtaaaaggaactgttgatattgttttgactcccctggtggctgaagctttagacagatatattgaagcaatggttcattgtgctagtacccgacatccagctgcaattgtagatgatcttcatgctaaagtcctcagggaagctgtccaaaatagcaagactaccttttcagaaaatttatcttccaaacaagacattagaggaacaaaaactgagcagtctacaataggaacgactaaccaaggacaagcacagacaaatcttacaatgaagcaagataatgtaacaattaaaggtcttcagactaatgttagcataccaaaggtaaacttatgtttgttacaagcctcagtggaagaatctccaactacggctcctagtaggagtgtgactcatgtttccctagtggcattgtgttttgacagaattgctacacaggttcgcatgaacagaggtgtggttgaagagacttcaaacaatgcagaacctggtagaacatcaaattttgataggtatgttcatgccacaaagatgcagcctcagtcatctggatctctcagatcaaatgctggagcagaaaaaggcaaagaaattgcagctaagttaaacattcatcgagttcatgggcaacttaggggtcttgatacaacagacattgggacctgtgcaatcactgctattccttttgagaagtccaaagttttatttactcttgaagagttggatgaatttacttttgtggatgaaactgatcagcaagctgttccagatgtaactcgaataggtcccagccaagaaaaatggggatggataatgtttgaatgtggacttgaaaatttaaccataaaaggaggaagacagtctggtgctgttttatataacagttttggaattatgggtaaagctagtgacacagaaaggggtggagtgctgacatccaataattcttctgattctccaaccggcagtggctataatactgatgtctctgatgataatcttccatgtgaccggacaagcccttcctcagacttaaatggaaattctgtttcagatgaacaggatgaaggagtcgaatctgatgatttgaaaaaagatctacctctgatgcctcctcctccagattcatgtagcatgaagttgaccattaaagaaatttggtttagttttgcagctcccaccaatgtgagatctcacacacatgcattttctaggcagctgaaccttttaagcactgcaacaccagctgttggtgcatggcttgttcccattgaccaactcaagtcatctttaaacaaattggaaactgagggaaccttgagaatttgtgctgttatgggatgcataatgacagaagcattagagaataaaagtgtacattttcccctaagaagtaaatacaacaggcttacaaaagttgctcgctttctccaagaaaatccttcatgtttactatgtaatatactacaccactatctgcaccaggcaaattactccatcattgatgatgctacaatgagcgatggacttcctgctttggtaactttgaagaaaggtttagttgcactggcaaggcagtggatgaagtttattgtggtgacaccagcctttaaaggagttagcttacatagaccagctcagcctctgaaacctcaaatagctatggaccatgaacatgaagatggacttggattggacaatgggggtggtcttcaaagtgataccagtgctgatggagcagaatttgagttcgatgcagccacagtcagtgaacacacaatgctattagaaggaacagctaaccggcctccacctggtagctctggacctgtaactggagctgagataatgaggaaactttctaaaactcatacccatagtgactctgcattaaaaataaagggcattcacccatatcattctctgagctataccagtggagacactgccactgattctccagtgcatgttggacgtgctgggatgccagtaaaggacagtccaaggaaggagagcctactcagctacctgactggaagcttcccaagcctgcacaacctcctggaaggtactcctcagagaagcagtgctgctgtgaaaagtagctccctaacgagaacaggaaatacagtagccactgatatgttatctgaacatcccttgctatctgagccatcatctgtgagtttctataattggatgtcaaatgctgtgggtaatcgaggaagtgtgttacaagaatctcctgttacaaaatcaggacacaatagtcttcccacaggtgttgcacccaatcttccaacaataccctcagcctcagatttcaacactgtcttgtctagtgaccaaaatactttggatgggacacattctcagcatagcaccagtcaggatgatgtggcaggtgtagaagaagcaaaccaagggtttcctgctgttcagcttgctgatgcacaggttgttttcaagcctcttctgagtcatacagggatccagtcacaggatacaatgccattctgctaccgaatgtactttggagaacacctttcattttcagggactttggactgcctcagagcagatattgtggattcagacacagccaaagagagaaaaggcaaaagagcaagaaggcaaggccatgtgaatcttcctccacttgagttcaaaccagcattaatgttgggaacctttagcatcagtgctgttgtaatggaaaagtccgtgtgcacccctcagaactctaccagtgccctttcttttcatgatctcagcaagcggtattataacacctttcactgcaactttactatttcctgtcagtcaataagccagcatgtagatatggctttggttcgtcttattcatcagtttagcacaatgatagatgacatcaaagcaactcagactgatattaaacttagcagatatacagccggatctgcttccccaacacctaccttcaaaaccagaaaacatcgggactttcgttcatctgactttagccgcagttctagaggaagtcttaatggtggcaatagagtaaataatgcaaagaacaaacggaccaacaatgagaataacaaaaaggaatctcgaaacaagaattcattaggaagatctgaaagaagaacatcaaaagtgtctaggaaaggttcaaaagatgtggtggatcacatgactattcatatggatgactctgattcaattacagtgtcagaacaaagtgagccttcagctgagtgctggcagaatatgtataaattgcttaacttctattcacttatctccgatccaacaggaatattggaaaagtcttcagaaacatttggaccagcaggagttcggagccctacagagccaacatgtaaagttgtgtttgagaatgaacaagacaacagcagtttgactaagactcagaggaaacgtagcttggtaacttctgaacctcagcatgttactctaatagtgtttgggattggcatggtgaaccgcacacacctagaggcagatattggtggactaacaatggaatcagaactgaagaggatccatggcagttttactcttaaggaaaaaatgaaagatgttttacatcaaaagatgactgagacttgtgctactgctcatattggtggggttaatattgtgctgcttgaagggattacaccaaatatacaactggaggattttcctacatctcctacaagtacagccaaacaagagtttctaactgtagtgaaatgtagtattgccaagtcccaagccctctacagtgcccaaagagggctgaagacaaacaatgctgctgtgttcaaagtaggagctatcagtatcaacattcctcagcaccctgccaccttacatagcatgatggttcgaagttctcaccaactatctaaacaaatctcagacctaatcagacagccttctacagccccacagcctgtaaaagaagatattgcaaccccactaccttctgaaaaaaccccaacaagtgttaatcaaactcctgttgaaacaaatgaatttcctcagctaccagaaggcttagaaaagaagcctattgttcttaaattcagtgccatgttagatggtatagccattggagcagcacttttaccatctctgaaagcagaatacaagatgggaagaatgagaagtcatggaatgacaggtgcacagacaagatttacatttgagctgccaaatcacagattgcgttttacttcaaaagtttctgccacagatatgtcaaccattcctccttctgccagtcttaaccttccccctgttaccatgtcagggaaatatataatggaagaacatgatagttattcggatcaggtgtggagtatagatgaactgccttctaaacaaggttactatttacagggaaattatctgcgttgtgtggcagaagttggttcctttgaacataatcttacaactgatcttctaaaccacttggtatttgtacagaaagtgttcatgaaggaagttaatgaagtaatacaaaaagtttctggtggggagcagcctattcctctctggaacgaacatgatggaacagcagatggagataaacctaaaattctcctctattccctaaacttgcagttcaagggtattcaagtaacggccactactccatcaatgagagctgtaagatttgaaactggattgattgaactggaactttctaaccgacttcaaaccaaagcttcaccaggaagtagcagctatctgaaactgtttggcaaatgccaggtggatttaaatctggcattaggacaaattgtcaaacatcaggtttatgaggaagctggttctgattttcatcaagttgcctattttaaaaccagaattggattaagaaatgccctccgagaagaaatcagtggttcttcagatagggaagctgtgcttattactttgaatagaccaattgtttatgcacagcctgtggcctttgatagagctgtgctgttttggctgaattataaggccgcctatgacaactggaatgaacaacgaatggctttacataaggatattcatatggctacaaaggaagtagtagatatgctacctggtatccagcaaacatcagcccaggcctttgggactctttttctccagctcactgtcaatgatctgggaatttgcctacctatcacaaatactgcacagtctaatcatactggagaccttgacactggttctgctttggtattaaccattgaaagtactctcatcactgcatgctcttcagagtctctggttagcaaagggcatttcaaaaacttttgtatccgttttgctgatggatttgagacatcatgggatgactggaaaccagaaattcatggggatttagtgatgaatgcctgtgtagttccagatggcacctatgaagtatgttcaagaactacaggacaagcagcagctgaaagcagtagtgctggaacctggacactcaacgtattgtggaaaatgtgtgggattgatgttcacatggatcctaacattggcaaaaggcttaatgctctgggcaatactcttacaacactgacaggagaggaagacatagatgacattgctgacttaaattcagtgaacatagctgacctgtcagatgaggatgaagttgatactatgtctcccactatccatactgaagccacagattatcgaagacaggcagcatctgctagccagccgggagaacttagaggaagaaaaattatgaagcgtatagtggatatcagagaactgaatgaacaggccaaagtaatagatgatctgaaaaaattaggtgcaagtgaaggaaccataaaccaggaaattcaacgttaccaacagttagaatctgtggctgtgaatgacattagaagagatgttcgtaaaaaattacggaggtccagtatgcgggctgcttccctaaaggataagtggggtttgagttacaaaccaagttacagccgatcaaaaagcatttctgcttctggaagaccacctcttaagcgaatggaaagggcaagttctcgagtaggagaaactgaagagctcccagaaatccgtgtggatgcagcatctcctggacctagagtaacttttaatatccaggatacatttccagaggagacagaactggaccttttgtcagtaaccattgaaggtccatcccattattcatcaaatagtgaaggatcatgttctgtgttcagttctcccaaaactccaggaggcttttcaccaggcattcctttccaaactgaagagggccgacgggatgacagtttgtcttctaccagtgaagattccgagaaggatgaaaaagatgaagaccatgagagggaaaggttttatatttacaggaaaccctcacatacgtctcgtaaaaaagcaacaggctttgctgctgttcatcagctatttacagaacgctggccaacaacaccagtcaatagaagtcttagtggcacagctacagagagaaatattgactttgaacttgatatacgggttgaaattgatagtggaaaatgtgtactccacccaaccacccttctacaagaacatgatgatataagtttgagaaggagttatgatcgaagttccaggagcttagatcaagattcaccttcaaaaaagaagaagtttcaaactaattatgcttctaccacccatttaatgaccggcaagaaagtgccatcatctctacagacaaagcctagtgacttagaaacaacagtattttacattcccggagttgatgtaaagttgcattacaattccaagacgctaaagactgaatcacctaatgcctccaggggatcttccttgccaagaacactgtccaaagagtccaagctgtatggtatgaaagatagtgcaacatctcctccttctcctcctttaccttccactgtccagagcaagactaacaccttacttcctccccagcccccacctattcctgcagccaaaggaaaaggaagtggaggagtaaaaacagccaagttatatgcctgggtagcacttcagtcattgccagaagaaatggttattagtccctgcctattagactttctggaaaaagctctggaaactatcccaattacaccagttgaaaggaattatacagctgtcagctcacaagatgaagatatgggacattttgaaataccagatcctatggaagaatcaacaacatcactagtgtcgtcttcaacatctgcttactcttccttccctgtagatgttgtggtttatgtacgagttcagccctcacagatcaaatttagctgtttaccagtatcaagagtagaatgcatgttaaagctgccatccctggatttggtgttttcttcaaaccgaggagaactggagactttagggactacatatcctgcagagactttatcccctggaggtaatgctactcagagtggaacaaagacttctgctagcaaaactggaataccaggttcatcgggattaggcagccctcttggccgaagtcgacatagtagtagtcagtcagacctgaccagttccagcagtagttcatctggcttgagcttcactgcatgcatgtctgacttttccctttatgtatttcatccatatggagcagggaaacaaaaaactgctgtttctggcctcacacctggatcaggaggattagggaatgtggatgaggagcccacttcagtcactggtcgaaaagattcactcagtataaaccttgagtttgtaaaagtgagtttgtcacggatcaggcgttcaggaggtgcctcattttttgaaagtcagtctgtaagcaagtctgcaagcaaaatggatactacgttaataaatatatctgctgtttgtgatatagggtctgcctcctttaaatatgatatgcgccgactcagtgaaattctggcatttccaagagcatggtatagaagaagtattgcaagacgtctattccttggagaccaaactataaatttgccaacatctggcccagggacacctgattccattgaaggggtaagccaacacctttcccctgaatcatcaagaaaagcttactgcaagacctgggagcagccaagtcagtcagcctccttcacccacatgcctcagtcacctaatgtgttcaatgagcatatgacaaacagcaccatgtcaccagggacagtaggacagagcctaaaatccccagcttccataagatcaaggagtgtatctgattcttcagttcctcgaagagattcactttcaaaaacatcaactccttttaacaaatcaaacaaagcagcaagccaacaagggaccccatgggaaacacttgtcgtgtttgctatcaacttgaagcaattaaacgttcaaatgaatatgagtaatgtaatgggaaatacaacttggacaactagtggtttgaagagccagggccgtctgtcagtaggaagtaatcgtgatcgagagatcagcatgtctgttggtctgggaagatcacaattagattctaaaggaggagtagttggagggaccatagatgtcaatgctttggagatggttgctcatatttctgaacatccaaatcagcaacccagtcacaaaattcagattactatgggttctactgaagctcgtgttgattacatgggctcaagtatcctcatgggcatcttcagtaatgctgatcttaagcttcaggatgaatggaaagtaaacttgtataatacattggattcaagcataactgataaaagtgagattttcgtccatggagatttgaagtgggatattttccaagtaatgatatcaaggtcaaccacaccagatctgataaaaataggaatgaagctccaggaatttttcacacaacaatttgataccagcaaacgagctctgtctacctggggaccagttccttaccttccgccaaagacaatgactagcaacctagaaaaaagttcacaagaacaattacttgatgcagcacatcatcgacactggcctggagtattgaaggtggtatcaggatgccacatatccttatttcagattccattaccagaagatggaatgcaatttggaggatcaatgagcttacatggaaatcatatgacactggcatgttttcatggtccaaattttcgttcaaaatcttgggccctttttcatttagaagaaccaaatattgctttttggactgaagctcagaaaatctgggaagatggctccagtgatcattctacatatattgtacaaacactagattttcacctgggtcataatactatggttaccaaaccatgtggtgctttggaaagtcctatggcaacaataaccaagataacaaggcgtcgccatgaaaatccaccccatggagtagcaagtgtgaaagaatggttcaattatgttacagctacaaggaatgaagagctaaatctgcttcgtaatgttgatgctaacaacactgagaatagcactactgtgaagaattctagtttgttgagtggattcagaggaggttctagctacaaccatgaaacagagactatctttgcattaccaaggatgcagcttgactttaaatccattcatgttcaagaaccacaggagccttcattacaggatgccagcctgaagccaaaagtagaatgtagtgtggtgacagagttcactgaccacatttgtgtgactatggatgctgagctcatcatgtttcttcatgatttagtatcagcttatcttaaagaaaaagaaaaagccatctttccacctcggattttatctactcgaccaggacaaaaaagtccaattattatacatgacgacaattcctctgataaagatagagaagatagcatcacttatactactgtggactggagagattttatgtgcaatacatggcatctagaacctactcttagattaatttcttggactggaagaaagattgatccagtaggtgttgattatattcttcaaaaattgggctttcatcatgctaggactactattcctaaatggcttcaaagaggagtcatggatccactggacaaggttctgtcagttcttatcaaaaagctcggtactgcactacaggatgaaaaggaaaagaaaggcaaagacaaagaagaacactaaaaaagtaatttgatctgtgaacaaattatgattgtgtctgttttattacactggagtgtttttttagtataataatttgaaatataactttaaaataattctaaatttgtggctataattaaaagtttgtaagttaacctgttctagttccatcattctgtgtacagtgaagtattgcatgataatgtaaattttgtgaaaaactagattaaaatatataactgcttgttatggtttataattatataatgtgcaatacaattcctgcatctttaaaatgtctgcagaataactgtgaatttttttgttattggattggccgtaacttttagaaaaaaatcttgttgatgataatgtgattttggggaggtcattaattgctttttcttttttaaatgtagacttatataaatacctgtttgtatatagcttgagtaattgtgatatgattgtataccactaaaatattgttaactattataataaagtcacagtaatggtttaagtctgt

SEQ ID NO: 278454 - DNA, 15018 bp, Artificial Sequence
  derived and/or modified sequence
atggaccagagaaagaacgagagcatcgtgcccagcatcacccagctggaggacttcctgaccgagcacaacagcaacgtggtgtggctgctggtggccaccatcctgagctgcggctggatcatctacctgacctactacaacagcagaaacgtgggcctgatcctgaccctggtgctgaacagactgtacaagcacggctacatccacatcggcagcttcagcttcagcgtgctgagcggcaaggtgatggtgagagagatctactacatcaccgaggacatgagcatcagaatccaggacggcttcatcatcttcagatggtggaagatgtacaaccccaagcagaagcagcacgaccccaaggccgagaccagactgtacatcaccgtgaacgacttcgagttccacgtgtacaacagaagcgacctgtacggcagactgcaggagctgttcggcctggagcccaccatcatcccccccaagaaggacgacgacaagaccagagagatcggcagaaccagaacccagagcaagatcgagagagtgaaggtgaagaccgagagccaggaccccaccagcagctggagaagcctgatccccgtgatcaaggtgaacgtgagcaccggcagactggccttcggcaaccactaccagccccagaccctgtgcatcaacttcgacgacgccttcctgacctacaccaccaagccccccagcagccacctggaccagttcatgcacatcgtgaagggcaagctggagaacgtgagagtgatgctggtgcccagccccagatacgtgggcctgcagaacgacgagccccccagactgatgggcgagggcttcgtggtgatgcagagcaacgacgtggacatctactactacatggacgagcccggcctggtgcccgaggagaccgaggagaacatcgagggcgagatgagcagcgaggactgcaagctgcaggacctgcccccctgctggggcctggacatcgtgtgcggcaagggcaccgacttcaactacggcccctgggccgacagacagagagactgcctgtggaagttcttcttcccccccgactaccaggtgctgaaggtgagcgagatcgcccagcccggcagacccagacagatcctggccttcgagctgagaatgaacatcatcgccgacgccaccatcgacctgctgttcaccaagaacagagagaccaacgccgtgcacgtgaacgtgggcgccggcagctacctggagatcaacatccccatgaccgtggaggagaacggctacacccccgccatcaagggccagctgctgcacgtggacgccaccaccagcatgcagtacagaaccctgctggaggccgagatgctggccttccacatcaacgccagctaccccagaatctggaacatgccccagacctggcagtgcgagctggaggtgtacaaggccacctaccacttcatcttcgcccagaagaacttcttcaccgacctgatccaggactggagcagcgacagcccccccgacatcttcagcttcgtgccctacacctggaacttcaagatcatgttccaccagttcgagatgatctgggccgccaaccagcacaactggatcgactgcagcaccaagcagcaggagaacgtgtacctggccgcctgcggcgagaccctgaacatcgacttcagcctgcccttcaccgacttcgtgcccgccacctgcaacaccaagttcagcctgagaggcgaggacgtggacctgcacctgttcctgcccgactgccaccccagcaagtacagcctgttcatgctggtgaagaactgccaccccaacaagatgatccacgacaccggcatccccgccgagtgccagagcggccagaagaccgtgaagcccaagtggagaaacgtgacccaggagaagagcggctgggtggagtgctggaccgtgcccagcgtgatgctgaccatcgactacacctggcaccccatctacccccagaaggccgacgagcagctgaagcagagcctgagcgagatggaggagaccatgctgagcgtgctgagacccagccagaagaccagcgacagagtggtgagcagccccagcaccagcagcagaccccccatcgaccccagcgagctgccccccgacaagctgcacgtggagatggagctgagccccgacagccagatcaccctgtacggccccctgctgaacgccttcctgtgcatcaaggagaactacttcggcgaggacgacatgtacatggacttcgaggaggtgatcagcagccccgtgctgagcctgagcaccagcagcagcagcggctggaccgccgtgggcatggagaacgacaagaaggagaacgagggcagcgccaagagcatccaccccctggccctgagaccctgggacatcaccgtgctggtgaacctgtacaaggtgcacggcagactgcccgtgcacggcaccaccgacggccccgagtgccccaccgccttcctggagagactgtgcttcgagatgaagaagggcttcagagagaccatgctgcagctgatcctgagccccctgaacgtgttcgtgagcgacaactaccagcagagaccccccgtggacgaggtgctgagagagggccacatcaacctgagcggcctgcagctgagagcccacgccatgttcagcgccgagggcctgcccctgggcagcgacagcctggagtacgcctggctgatcgacgtgcaggccggcagcctgaccgccaaggtgaccgccccccagctggcctgcctgctggagtggggccagaccttcgtgttccacgtggtgtgcagagagtacgagctggagagacccaagagcgtgatcatctgccagcacggcatcgacagaagattctgcgagagcaagctgagctgcatccccggcccctgccccaccagcgacgacctgaagtacaccatgatcagactggccgtggacggcgccgacatctacatcgtggagcacggctgcgccaccaacatcaagatgggcgccatcagagtggccaactgcaacctgcacaaccagagcgtgggcgagggcatcagcgccgccatccaggacttccaggtgagacagtacatcgagcagctgaacaactgcagaatcggcctgcagcccgccgtgctgagaagagcctactggctggaggccggcagcgccaacctgggcctgatcaccgtggacatcgccctggccgccgaccaccacagcaagcacgaggcccagagacacttcctggagacccacgacgccagaaccaagagactgtggttcctgtggcccgacgacatcctgaagaacaagagatgcagaaacaagtgcggctgcctgggcggctgcagattcttcggcggcaccgtgaccggcctggacttcttcaagctggaggagctgacccccagcagcagcagcgccttcagcagcaccagcgccgagagcgacatgtactacggccagagcctgctgcagcccggcgagtggatcatcaccaaggagatccccaagatcatcgacggcaacgtgaacggcatgaagagaaaggagtgggagaacaagagcgtgggcatcgaggtggagagaaagacccagcacctgagcctgcaggtgcccctgagaagccacagcagcagcagcagcagcgaggagaacagcagcagcagcgccgcccagcccctgctggccggcgagaaggagagccccagcagcgtggccgacgaccacctggtgcagaaggagttcctgcacggcaccaagagagacgacggccaggccagcatccccaccgagatcagcggcaacagccccgtgagccccaacacccaggacaagagcgtgggccagagccccctgagaagccccctgaagagacaggccagcgtgtgcagcaccagactgggcagcaccaagagcctgaccgccgccttctacggcgacaagcagcccgtgaccgtgggcgtgcagttcagcagcgacgtgagcagaagcgacgagaacgtgctggacagccccaagcagagaagaagcttcggcagcttcccctacacccccagcgccgacagcaacagcttccaccagtacagaagcatggacagcagcatgagcatggccgacagcgaggcctacttcagcgccgccgaggagttcgagcccatcagcagcgacgagggccccggcacctaccccggcagaaagaagaagaagaagcagacccagcagatcgactacagcagaggcagcatctaccacagcgtggagggccccctgaccggccacggcgagagcatccaggacagcagaaccctgcccttcaagacccaccccagccaggccagcttcgtgagcgccctgggcggcgaggacgacgtgatcgagcacctgtacatcgtggagggcgagaagaccgtggagagcgagcagatcaccccccagcagcccgtgatgaactgctaccagacctacctgacccagttccaggtgatcaactggagcgtgaagcaccccaccaacaagagaaccagcaagagcagcctgcacagacccctggacctggacacccccaccagcgaggagagcagcagcagcttcgagcagctgagcgtgcccaccttcaaggtgatcaagcagggcctgaccgccaacagcctgctggacagaggcatgcagctgagcggcagcaccagcaacaccccctacacccccctggagaagaagctggccgacaacaccgacgacgagaccctgaccgaggagtggaccctggaccagcccgtgagccagaccagaaccaccgccatcgtggaggtgaagggcaccgtggacatcgtgctgacccccctggtggccgaggccctggacagatacatcgaggccatggtgcactgcgccagcaccagacaccccgccgccatcgtggacgacctgcacgccaaggtgctgagagaggccgtgcagaacagcaagaccaccttcagcgagaacctgagcagcaagcaggacatcagaggcaccaagaccgagcagagcaccatcggcaccaccaaccagggccaggcccagaccaacctgaccatgaagcaggacaacgtgaccatcaagggcctgcagaccaacgtgagcatccccaaggtgaacctgtgcctgctgcaggccagcgtggaggagagccccaccaccgcccccagcagaagcgtgacccacgtgagcctggtggccctgtgcttcgacagaatcgccacccaggtgagaatgaacagaggcgtggtggaggagaccagcaacaacgccgagcccggcagaaccagcaacttcgacagatacgtgcacgccaccaagatgcagccccagagcagcggcagcctgagaagcaacgccggcgccgagaagggcaaggagatcgccgccaagctgaacatccacagagtgcacggccagctgagaggcctggacaccaccgacatcggcacctgcgccatcaccgccatccccttcgagaagagcaaggtgctgttcaccctggaggagctggacgagttcaccttcgtggacgagaccgaccagcaggccgtgcccgacgtgaccagaatcggccccagccaggagaagtggggctggatcatgttcgagtgcggcctggagaacctgaccatcaagggcggcagacagagcggcgccgtgctgtacaacagcttcggcatcatgggcaaggccagcgacaccgagagaggcggcgtgctgaccagcaacaacagcagcgacagccccaccggcagcggctacaacaccgacgtgagcgacgacaacctgccctgcgacagaaccagccccagcagcgacctgaacggcaacagcgtgagcgacgagcaggacgagggcgtggagagcgacgacctgaagaaggacctgcccctgatgccccccccccccgacagctgcagcatgaagctgaccatcaaggagatctggttcagcttcgccgcccccaccaacgtgagaagccacacccacgccttcagcagacagctgaacctgctgagcaccgccacccccgccgtgggcgcctggctggtgcccatcgaccagctgaagagcagcctgaacaagctggagaccgagggcaccctgagaatctgcgccgtgatgggctgcatcatgaccgaggccctggagaacaagagcgtgcacttccccctgagaagcaagtacaacagactgaccaaggtggccagattcctgcaggagaaccccagctgcctgctgtgcaacatcctgcaccactacctgcaccaggccaactacagcatcatcgacgacgccaccatgagcgacggcctgcccgccctggtgaccctgaagaagggcctggtggccctggccagacagtggatgaagttcatcgtggtgacccccgccttcaagggcgtgagcctgcacagacccgcccagcccctgaagccccagatcgccatggaccacgagcacgaggacggcctgggcctggacaacggcggcggcctgcagagcgacaccagcgccgacggcgccgagttcgagttcgacgccgccaccgtgagcgagcacaccatgctgctggagggcaccgccaacagacccccccccggcagcagcggccccgtgaccggcgccgagatcatgagaaagctgagcaagacccacacccacagcgacagcgccctgaagatcaagggcatccacccctaccacagcctgagctacaccagcggcgacaccgccaccgacagccccgtgcacgtgggcagagccggcatgcccgtgaaggacagccccagaaaggagagcctgctgagctacctgaccggcagcttccccagcctgcacaacctgctggagggcaccccccagagaagcagcgccgccgtgaagagcagcagcctgaccagaaccggcaacaccgtggccaccgacatgctgagcgagcaccccctgctgagcgagcccagcagcgtgagcttctacaactggatgagcaacgccgtgggcaacagaggcagcgtgctgcaggagagccccgtgaccaagagcggccacaacagcctgcccaccggcgtggcccccaacctgcccaccatccccagcgccagcgacttcaacaccgtgctgagcagcgaccagaacaccctggacggcacccacagccagcacagcaccagccaggacgacgtggccggcgtggaggaggccaaccagggcttccccgccgtgcagctggccgacgcccaggtggtgttcaagcccctgctgagccacaccggcatccagagccaggacaccatgcccttctgctacagaatgtacttcggcgagcacctgagcttcagcggcaccctggactgcctgagagccgacatcgtggacagcgacaccgccaaggagagaaagggcaagagagccagaagacagggccacgtgaacctgccccccctggagttcaagcccgccctgatgctgggcaccttcagcatcagcgccgtggtgatggagaagagcgtgtgcaccccccagaacagcaccagcgccctgagcttccacgacctgagcaagagatactacaacaccttccactgcaacttcaccatcagctgccagagcatcagccagcacgtggacatggccctggtgagactgatccaccagttcagcaccatgatcgacgacatcaaggccacccagaccgacatcaagctgagcagatacaccgccggcagcgccagccccacccccaccttcaagaccagaaagcacagagacttcagaagcagcgacttcagcagaagcagcagaggcagcctgaacggcggcaacagagtgaacaacgccaagaacaagagaaccaacaacgagaacaacaagaaggagagcagaaacaagaacagcctgggcagaagcgagagaagaaccagcaaggtgagcagaaagggcagcaaggacgtggtggaccacatgaccatccacatggacgacagcgacagcatcaccgtgagcgagcagagcgagcccagcgccgagtgctggcagaacatgtacaagctgctgaacttctacagcctgatcagcgaccccaccggcatcctggagaagagcagcgagaccttcggccccgccggcgtgagaagccccaccgagcccacctgcaaggtggtgttcgagaacgagcaggacaacagcagcctgaccaagacccagagaaagagaagcctggtgaccagcgagccccagcacgtgaccctgatcgtgttcggcatcggcatggtgaacagaacccacctggaggccgacatcggcggcctgaccatggagagcgagctgaagagaatccacggcagcttcaccctgaaggagaagatgaaggacgtgctgcaccagaagatgaccgagacctgcgccaccgcccacatcggcggcgtgaacatcgtgctgctggagggcatcacccccaacatccagctggaggacttccccaccagccccaccagcaccgccaagcaggagttcctgaccgtggtgaagtgcagcatcgccaagagccaggccctgtacagcgcccagagaggcctgaagaccaacaacgccgccgtgttcaaggtgggcgccatcagcatcaacatcccccagcaccccgccaccctgcacagcatgatggtgagaagcagccaccagctgagcaagcagatcagcgacctgatcagacagcccagcaccgccccccagcccgtgaaggaggacatcgccacccccctgcccagcgagaagacccccaccagcgtgaaccagacccccgtggagaccaacgagttcccccagctgcccgagggcctggagaagaagcccatcgtgctgaagttcagcgccatgctggacggcatcgccatcggcgccgccctgctgcccagcctgaaggccgagtacaagatgggcagaatgagaagccacggcatgaccggcgcccagaccagattcaccttcgagctgcccaaccacagactgagattcaccagcaaggtgagcgccaccgacatgagcaccatcccccccagcgccagcctgaacctgccccccgtgaccatgagcggcaagtacatcatggaggagcacgacagctacagcgaccaggtgtggagcatcgacgagctgcccagcaagcagggctactacctgcagggcaactacctgagatgcgtggccgaggtgggcagcttcgagcacaacctgaccaccgacctgctgaaccacctggtgttcgtgcagaaggtgttcatgaaggaggtgaacgaggtgatccagaaggtgagcggcggcgagcagcccatccccctgtggaacgagcacgacggcaccgccgacggcgacaagcccaagatcctgctgtacagcctgaacctgcagttcaagggcatccaggtgaccgccaccacccccagcatgagagccgtgagattcgagaccggcctgatcgagctggagctgagcaacagactgcagaccaaggccagccccggcagcagcagctacctgaagctgttcggcaagtgccaggtggacctgaacctggccctgggccagatcgtgaagcaccaggtgtacgaggaggccggcagcgacttccaccaggtggcctacttcaagaccagaatcggcctgagaaacgccctgagagaggagatcagcggcagcagcgacagagaggccgtgctgatcaccctgaacagacccatcgtgtacgcccagcccgtggccttcgacagagccgtgctgttctggctgaactacaaggccgcctacgacaactggaacgagcagagaatggccctgcacaaggacatccacatggccaccaaggaggtggtggacatgctgcccggcatccagcagaccagcgcccaggccttcggcaccctgttcctgcagctgaccgtgaacgacctgggcatctgcctgcccatcaccaacaccgcccagagcaaccacaccggcgacctggacaccggcagcgccctggtgctgaccatcgagagcaccctgatcaccgcctgcagcagcgagagcctggtgagcaagggccacttcaagaacttctgcatcagattcgccgacggcttcgagaccagctgggacgactggaagcccgagatccacggcgacctggtgatgaacgcctgcgtggtgcccgacggcacctacgaggtgtgcagcagaaccaccggccaggccgccgccgagagcagcagcgccggcacctggaccctgaacgtgctgtggaagatgtgcggcatcgacgtgcacatggaccccaacatcggcaagagactgaacgccctgggcaacaccctgaccaccctgaccggcgaggaggacatcgacgacatcgccgacctgaacagcgtgaacatcgccgacctgagcgacgaggacgaggtggacaccatgagccccaccatccacaccgaggccaccgactacagaagacaggccgccagcgccagccagcccggcgagctgagaggcagaaagatcatgaagagaatcgtggacatcagagagctgaacgagcaggccaaggtgatcgacgacctgaagaagctgggcgccagcgagggcaccatcaaccaggagatccagagataccagcagctggagagcgtggccgtgaacgacatcagaagagacgtgagaaagaagctgagaagaagcagcatgagagccgccagcctgaaggacaagtggggcctgagctacaagcccagctacagcagaagcaagagcatcagcgccagcggcagaccccccctgaagagaatggagagagccagcagcagagtgggcgagaccgaggagctgcccgagatcagagtggacgccgccagccccggccccagagtgaccttcaacatccaggacaccttccccgaggagaccgagctggacctgctgagcgtgaccatcgagggccccagccactacagcagcaacagcgagggcagctgcagcgtgttcagcagccccaagacccccggcggcttcagccccggcatccccttccagaccgaggagggcagaagagacgacagcctgagcagcaccagcgaggacagcgagaaggacgagaaggacgaggaccacgagagagagagattctacatctacagaaagcccagccacaccagcagaaagaaggccaccggcttcgccgccgtgcaccagctgttcaccgagagatggcccaccacccccgtgaacagaagcctgagcggcaccgccaccgagagaaacatcgacttcgagctggacatcagagtggagatcgacagcggcaagtgcgtgctgcaccccaccaccctgctgcaggagcacgacgacatcagcctgagaagaagctacgacagaagcagcagaagcctggaccaggacagccccagcaagaagaagaagttccagaccaactacgccagcaccacccacctgatgaccggcaagaaggtgcccagcagcctgcagaccaagcccagcgacctggagaccaccgtgttctacatccccggcgtggacgtgaagctgcactacaacagcaagaccctgaagaccgagagccccaacgccagcagaggcagcagcctgcccagaaccctgagcaaggagagcaagctgtacggcatgaaggacagcgccaccagcccccccagcccccccctgcccagcaccgtgcagagcaagaccaacaccctgctgcccccccagcccccccccatccccgccgccaagggcaagggcagcggcggcgtgaagaccgccaagctgtacgcctgggtggccctgcagagcctgcccgaggagatggtgatcagcccctgcctgctggacttcctggagaaggccctggagaccatccccatcacccccgtggagagaaactacaccgccgtgagcagccaggacgaggacatgggccacttcgagatccccgaccccatggaggagagcaccaccagcctggtgagcagcagcaccagcgcctacagcagcttccccgtggacgtggtggtgtacgtgagagtgcagcccagccagatcaagttcagctgcctgcccgtgagcagagtggagtgcatgctgaagctgcccagcctggacctggtgttcagcagcaacagaggcgagctggagaccctgggcaccacctaccccgccgagaccctgagccccggcggcaacgccacccagagcggcaccaagaccagcgccagcaagaccggcatccccggcagcagcggcctgggcagccccctgggcagaagcagacacagcagcagccagagcgacctgaccagcagcagcagcagcagcagcggcctgagcttcaccgcctgcatgagcgacttcagcctgtacgtgttccacccctacggcgccggcaagcagaagaccgccgtgagcggcctgacccccggcagcggcggcctgggcaacgtggacgaggagcccaccagcgtgaccggcagaaaggacagcctgagcatcaacctggagttcgtgaaggtgagcctgagcagaatcagaagaagcggcggcgccagcttcttcgagagccagagcgtgagcaagagcgccagcaagatggacaccaccctgatcaacatcagcgccgtgtgcgacatcggcagcgccagcttcaagtacgacatgagaagactgagcgagatcctggccttccccagagcctggtacagaagaagcatcgccagaagactgttcctgggcgaccagaccatcaacctgcccaccagcggccccggcacccccgacagcatcgagggcgtgagccagcacctgagccccgagagcagcagaaaggcctactgcaagacctgggagcagcccagccagagcgccagcttcacccacatgccccagagccccaacgtgttcaacgagcacatgaccaacagcaccatgagccccggcaccgtgggccagagcctgaagagccccgccagcatcagaagcagaagcgtgagcgacagcagcgtgcccagaagagacagcctgagcaagaccagcacccccttcaacaagagcaacaaggccgccagccagcagggcaccccctgggagaccctggtggtgttcgccatcaacctgaagcagctgaacgtgcagatgaacatgagcaacgtgatgggcaacaccacctggaccaccagcggcctgaagagccagggcagactgagcgtgggcagcaacagagacagagagatcagcatgagcgtgggcctgggcagaagccagctggacagcaagggcggcgtggtgggcggcaccatcgacgtgaacgccctggagatggtggcccacatcagcgagcaccccaaccagcagcccagccacaagatccagatcaccatgggcagcaccgaggccagagtggactacatgggcagcagcatcctgatgggcatcttcagcaacgccgacctgaagctgcaggacgagtggaaggtgaacctgtacaacaccctggacagcagcatcaccgacaagagcgagatcttcgtgcacggcgacctgaagtgggacatcttccaggtgatgatcagcagaagcaccacccccgacctgatcaagatcggcatgaagctgcaggagttcttcacccagcagttcgacaccagcaagagagccctgagcacctggggccccgtgccctacctgccccccaagaccatgaccagcaacctggagaagagcagccaggagcagctgctggacgccgcccaccacagacactggcccggcgtgctgaaggtggtgagcggctgccacatcagcctgttccagatccccctgcccgaggacggcatgcagttcggcggcagcatgagcctgcacggcaaccacatgaccctggcctgcttccacggccccaacttcagaagcaagagctgggccctgttccacctggaggagcccaacatcgccttctggaccgaggcccagaagatctgggaggacggcagcagcgaccacagcacctacatcgtgcagaccctggacttccacctgggccacaacaccatggtgaccaagccctgcggcgccctggagagccccatggccaccatcaccaagatcaccagaagaagacacgagaaccccccccacggcgtggccagcgtgaaggagtggttcaactacgtgaccgccaccagaaacgaggagctgaacctgctgagaaacgtggacgccaacaacaccgagaacagcaccaccgtgaagaacagcagcctgctgagcggcttcagaggcggcagcagctacaaccacgagaccgagaccatcttcgccctgcccagaatgcagctggacttcaagagcatccacgtgcaggagccccaggagcccagcctgcaggacgccagcctgaagcccaaggtggagtgcagcgtggtgaccgagttcaccgaccacatctgcgtgaccatggacgccgagctgatcatgttcctgcacgacctggtgagcgcctacctgaaggagaaggagaaggccatcttcccccccagaatcctgagcaccagacccggccagaagagccccatcatcatccacgacgacaacagcagcgacaaggacagagaggacagcatcacctacaccaccgtggactggagagacttcatgtgcaacacctggcacctggagcccaccctgagactgatcagctggaccggcagaaagatcgaccccgtgggcgtggactacatcctgcagaagctgggcttccaccacgccagaaccaccatccccaagtggctgcagagaggcgtgatggaccccctggacaaggtgctgagcgtgctgatcaagaagctgggcaccgccctgcaggacgagaaggagaagaagggcaaggacaaggaggagcactag

SEQ ID NO: 278455 - protein, 824 aa, Artificial Sequence
  derived and/or modified sequence
MYSNEDSRQTIVYSEESNTTMSYTQKITNPLPAASSTDPAPFANINTPVLQEDYRQDSQTRRISTLKLTHNQDLGSSSPISTPQFSKSVEVPSFLKRPRSLTPNPVPETHTASLSIQIAPLSGQDLESHKQLPELSPETAKIPLQQERQKSAVAAASQSSDCRVSQITVNGNSGGAVSPMSYYQRPFSPSAYSLPASLNSSIVMQHGTSLDSTDTYPQHAQSLDGTTSSSIPLYRSSEEEKRVTVIKAPHYPGIGPVDESGIPTAIRTTVDRPKDWYKTMFKQIHMVHKPDDDTDMYNTPYTYNAGLYNPPYSAQSHPAAKTQTYRPLSKSHSDNSPNAFKDASSPVPPPHVPPPVPPLRPRDRSSTEKHDWDPPDRKVDTRKFRSEPRSIFEYEPGKSSILQHERPPPLPTTPTPVPREPGRKPLSSSRLGEVTGSPSPPPRSGAPTPSSRAPALSPTRPPKKPLDYVQDHSSGVFNEASLYQSSIDRSLERPMSSASMASDFRKRRKSEPAVGPPRGLGDQSASRTSPGRVDLPGSSTTLTKSFTSSSPSSPSRAKDRESPRSYSSTLTDMGRSAPRERRGTPEKEKLPAKAVYDFKAQTSKELSFKKGDTVYILRKIDQNWYEGEHHGRVGIFPISYVEKLTPPEKAQPARPPPPAQPGEIGEAIAKYNFNADTNVELSLRKGDRVILLKRVDQNWYEGKIPGTNRQGIFPVSYVEVVKKNTKGAEDYPDPPIPHSYSSDRIHSLSSNKPQRPVFTHENIQGGGEPFQALYNYTPRNEDELELRESDVIDVMEKCDDGWFVGTSRRTKFFGTFPGNYVKRL

SEQ ID NO: 278456 - DNA, 3381 bp, Artificial Sequence
  derived and/or modified sequence
agctttcaaaaatagcatagttgatgaaactggaaatttaggtgcgggctcttttaagaaatcatttgtcttcagtcttaagaatagactgacaacagatactgctaccagagggctctcaactatttcttaagaccccctaggaaatatcagaagaaaagcctccttctcaataaagcataagtaggacatctcgttttcagtgaatcagacacttggattggacttaatcttaaacctctggagttcaagaccttttaaaaagggctaaataaacaatctctacatgtaaaaggccactgactcctacttcctctgtatagagcaactgttgaactcagctgcctgtagggcgtgattctcagtcaccagactcagcaaaaggttttagaagcgttcgaccaaacctacaagataaaagatcaccaactcaggcaccccctccaccagaaagaaaagagagctttcatagctctttgataaccagtcacacaaagggtgtcattttagaccagttagtaactaacacacaaattccctccagtacagagtactttgctaacaaaaaacctcttcagggaactatgtattccaatgaagattcgagacagacaattgtatattctgaagaatctaacacaaccatgtcatatacacaaaaaatcactaatccactaccagcagcttccagcacggatcctgcaccattcgctaacatcaacaccccagttctacaagaggactacaggcaagattctcaaactcggaggatttctaccttgaaactaacccataaccaggatctaggaagtagcagccccattagtactccacagttctccaaatctgtcgaagtaccgtcatttctcaaaaggccccgctcactgacccctaatccagtgcctgagacacacacagcatctctttccattcagatagctcccctttcaggacaggatcttgaaagccacaaacagctacctgagctttctccagagactgcaaagatacctcttcagcaagagagacaaaaatctgcagttgcagcggcctctcagtcctcagactgcagagtgagccagataacagtgaatggaaactcaggaggtgccgtgagtcccatgagttactatcagaggccgttttccccctcggcatattctctcccagcctcactcaactccagcattgtcatgcagcacggcacatccctcgattccacagacacatatccccagcatgcgcagtctctggatggcaccaccagcagctctatccccctgtaccgatcctcagaggaagagaagagagtgacagtcatcaaagccccgcattacccagggatcgggcccgtggatgaatccggaatccccacagcaattagaacgacagtcgaccggcccaaggactggtacaagacgatgtttaagcaaattcacatggtgcacaagccggatgatgacacagacatgtataatactccttatacatacaatgcaggtctgtacaacccaccctacagtgctcagtcacaccctgctgcaaagacccaaacctacagacctctttccaaaagccactccgacaacagccccaatgcctttaaggatgcgtcctccccagtgcctcccccacatgttccacctccagtcccgccgcttcgaccaagagatcggtcttcaacagaaaagcatgactgggatcctccagacagaaaagtggacacaagaaaatttcggtctgagccaaggagtatttttgaatatgaacctggcaagtcatcaattcttcagcatgaaagaccaccccctctcccaacaactccgacacctgttccaagggaacctggccggaagcctctttctagctcccgactcggagaagtcactggtagcccctcccctccgccccggagtggcgcccccacaccaagctcgcgcgccccggctctgtctcccacccggcctcctaaaaagcctctggactatgttcaagatcattcttctggtgttttcaatgaggcctccttgtatcagtcctctatagacagaagcctggaaagacccatgagttctgcaagcatggccagtgacttcaggaagcggaggaagagcgagcctgcagtgggtccaccacggggcttgggagatcaaagtgcgagcaggactagcccaggccgagtggacctcccaggatcaagcaccactcttacaaagtctttcactagctcttctccttcttccccatcaagagcaaaagaccgtgagtcccctagaagttactcatccactttgactgacatggggagaagtgcaccaagggaaagaagaggaactccagaaaaagagaaattgcctgcaaaagctgtttatgattttaaggctcagacatctaaggagttgtcatttaagaaaggagatactgtctacatcctcaggaaaattgatcaaaattggtatgagggagaacaccacgggagagtgggcatcttcccgatctcatacgtagagaaactcacacctcctgagaaagcacagcctgcaagaccacctccgccagcccagcccggagaaatcggagaagctatagccaaatacaacttcaacgcagacacaaatgtggagctgtcactgagaaagggagatagagttattcttcttaaaagagttgatcaaaactggtatgaaggtaaaatcccaggaaccaacagacaaggcatcttccctgtttcctatgtggaggtcgtcaagaagaacacaaaaggtgctgaggactaccctgaccctccaataccccacagctattctagtgataggattcacagcttgagctcaaataagccacagcgtcctgtgtttactcatgaaaatattcaaggtgggggggaaccgtttcaggctctgtataactatactcccaggaatgaagatgagctggagctcagagaaagtgatgtcattgatgtcatggaaaagtgtgatgacggctggtttgtggggacctcaagaagaaccaaattctttggtactttccccggaaactacgtcaagaggctgtgaattgcgctccctccttctgtagaggccgcctgccagccatgcacctgcgtcaacgcgcctgaaacaccccgcgggcctcccgttgtcatgccttacggtttccaatgcgccgtcaccatctccacctgccaccaaaccaccagcagagtagccgccgctgctgtgagcctggggacgacatggcaggctggtccccctccgtgaaagtgtggattcctacttcctgctctaagctttgacacgtcaaaatgtgggatcagaaagaaaaaaatcatgatatttaaaaatggtcaaatatttgaggcaaaaaaaaaaaaaaaaa

SEQ ID NO: 278457 - protein, 731 aa, Artificial Sequence
  derived and/or modified sequence
MSVTLTSVKRVQSSPNLLAAGRDSQSPDSAWRSYNDGNQETLNGDATYSSLAAKGFRSVRPNLQDKRSPTQSQITVNGNSGGAVSPMSYYQRPFSPSAYSLPASLNSSIVMQHGTSLDSTDTYPQHAQSLDGTTSSSIPLYRSSEEEKRVTVIKAPHYPGIGPVDESGIPTAIRTTVDRPKDWYKTMFKQIHMVHKPDDDTDMYNTPYTYNAGLYNPPYSAQSHPAAKTQTYRPLSKSHSDNSPNAFKDASSPVPPPHVPPPVPPLRPRDRSSTEKHDWDPPDRKVDTRKFRSEPRSIFEYEPGKSSILQHERPPPLPTTPTPVPREPGRKPLSSSRLGEVTGSPSPPPRSGAPTPSSRAPALSPTRPPKKPLDYVQDHSSGVFNEASLYQSSIDRSLERPMSSASMASDFRKRRKSEPAVGPPRGLGDQSASRTSPGRVDLPGSSTTLTKSFTSSSPSSPSRAKDRESPRSYSSTLTDMGRSAPRERRGTPEKEKLPAKAVYDFKAQTSKELSFKKGDTVYILRKIDQNWYEGEHHGRVGIFPISYVEKLTPPEKAQPARPPPPAQPGEIGEAIAKYNFNADTNVELSLRKGDRVILLKRVDQNWYEGKIPGTNRQGIFPVSYVEVVKKNTKGAEDYPDPPIPHSYSSDRIHSLSSNKPQRPVFTHENIQGGGEPFQALYNYTPRNEDELELRESDVIDVMEKCDDGWFVGTSRRTKFFGTFPGNYVKRL

SEQ ID NO: 278458 - DNA, 2824 bp, Artificial Sequence
  derived and/or modified sequence
cgttcacacctcctttccgagtatctgcatgccttgctggcccagagcacaagacccccattgtgctcccccggctcagaatccaaggaaagaaaggaagcgaagcctctgcattgagttctaggacagctgagacacttggattggacttaatcttaaacctctggagttcaagaccttttaaaaagggctaaataaacaatctctacatgtaaaaggccactgactcctacttcctctgtatagagcaactgttgaactcagctgcctgtagatagcggtgggtgtgctcgcaaacgtgccgccatgtctgttacgctaacatctgtgaagagagtgcaaagttctccaaacctattggctgcagggcgtgattctcagtcaccagactcagcttggagatcttacaatgatggcaatcaggagacactgaacggagatgctacatattcctctcttgcagcaaaaggttttagaagcgttcgaccaaacctacaagataaaagatcaccaactcagagccagataacagtgaatggaaactcaggaggtgccgtgagtcccatgagttactatcagaggccgttttccccctcggcatattctctcccagcctcactcaactccagcattgtcatgcagcacggcacatccctcgattccacagacacatatccccagcatgcgcagtctctggatggcaccaccagcagctctatccccctgtaccgatcctcagaggaagagaagagagtgacagtcatcaaagccccgcattacccagggatcgggcccgtggatgaatccggaatccccacagcaattagaacgacagtcgaccggcccaaggactggtacaagacgatgtttaagcaaattcacatggtgcacaagccggatgatgacacagacatgtataatactccttatacatacaatgcaggtctgtacaacccaccctacagtgctcagtcacaccctgctgcaaagacccaaacctacagacctctttccaaaagccactccgacaacagccccaatgcctttaaggatgcgtcctccccagtgcctcccccacatgttccacctccagtcccgccgcttcgaccaagagatcggtcttcaacagaaaagcatgactgggatcctccagacagaaaagtggacacaagaaaatttcggtctgagccaaggagtatttttgaatatgaacctggcaagtcatcaattcttcagcatgaaagaccaccccctctcccaacaactccgacacctgttccaagggaacctggccggaagcctctttctagctcccgactcggagaagtcactggtagcccctcccctccgccccggagtggcgcccccacaccaagctcgcgcgccccggctctgtctcccacccggcctcctaaaaagcctctggactatgttcaagatcattcttctggtgttttcaatgaggcctccttgtatcagtcctctatagacagaagcctggaaagacccatgagttctgcaagcatggccagtgacttcaggaagcggaggaagagcgagcctgcagtgggtccaccacggggcttgggagatcaaagtgcgagcaggactagcccaggccgagtggacctcccaggatcaagcaccactcttacaaagtctttcactagctcttctccttcttccccatcaagagcaaaagaccgtgagtcccctagaagttactcatccactttgactgacatggggagaagtgcaccaagggaaagaagaggaactccagaaaaagagaaattgcctgcaaaagctgtttatgattttaaggctcagacatctaaggagttgtcatttaagaaaggagatactgtctacatcctcaggaaaattgatcaaaattggtatgagggagaacaccacgggagagtgggcatcttcccgatctcatacgtagagaaactcacacctcctgagaaagcacagcctgcaagaccacctccgccagcccagcccggagaaatcggagaagctatagccaaatacaacttcaacgcagacacaaatgtggagctgtcactgagaaagggagatagagttattcttcttaaaagagttgatcaaaactggtatgaaggtaaaatcccaggaaccaacagacaaggcatcttccctgtttcctatgtggaggtcgtcaagaagaacacaaaaggtgctgaggactaccctgaccctccaataccccacagctattctagtgataggattcacagcttgagctcaaataagccacagcgtcctgtgtttactcatgaaaatattcaaggtgggggggaaccgtttcaggctctgtataactatactcccaggaatgaagatgagctggagctcagagaaagtgatgtcattgatgtcatggaaaagtgtgatgacggctggtttgtggggacctcaagaagaaccaaattctttggtactttccccggaaactacgtcaagaggctgtgaattgcgctccctccttctgtagaggccgcctgccagccatgcacctgcgtcaacgcgcctgaaacaccccgcgggcctcccgttgtcatgccttacggtttccaatgcgccgtcaccatctccacctgccaccaaaccaccagcagagtagccgccgctgctgtgagcctggggacgacatggcaggctggtccccctccgtgaaagtgtggattcctacttcctgctctaagctttgacacgtcaaaatgtgggatcagaaagaaaaaaatcatgatatttaaaaatggtcaaatatttgaggcaaaaaaaaaaaaaaaaa

SEQ ID NO: 278459 - DNA, 842 bp, Artificial Sequence
  derived and/or modified sequence
ggaaaacagtgtggcatattctgctgagcttcgccctggaagaagcctcttttatacatctcttcagggaagagagaagcaatgggcatgttagtatacaatgatcacagccacgcaggcctgcaagctgccttttggacaggctgttgactgccgttccaattagctgattggagaatgtggaatgcagagtgataatgctgcatatctgctatcaggcagcagcaaaggtttttgtcttgggaaggcaagctttccctgcaatattatctcagcagctccctagctgcttaccctgaaaacgagggatccaaacggagggtgttgcactctgctaacgctggtcctgtgcgtggctgtggcatatgagcggcaggtctgaaaaagcaggtgtgtgctgggacgggcactggactggaacgcaggcggacgctctcgggtttacctgcttcctgttaacagattgtgggctcccagggcatatgtctgcacgctgaggccgaggcggagaaggggcttcctgagcgtcccagtacactgacagagacacttggattggacttaatcttaaacctctggagttcaagaccttttaaaaagggctaaataaacaatctctacatgtaaaaggccactgactcctacttcctctgtatagagcaactgttgaactcagctgcctgtagggcgtgattctcagtcaccagactcagcaaaaggttttagaagcgttcgaccaaacctacaagataaaagatcaccaactcagagccagataacagtgaatggaaactcaggaggtgccgtgagtcccatgagttactatcagaggccgttttccc

SEQ ID NO: 278460 - protein, 644 aa, Artificial Sequence
  derived and/or modified sequence
MSVTLTSVKRVQSSPNLLAAGRDSQSPDSAWRSYNDGNQETLNGDATYSSLAAKGFRSVRPNLQDKRSPTQSQITVNGNSGGAVSPMSYYQRPFSPSAYSLPASLNSSIVMQHGTSLDSTDTYPQHAQSLDGTTSSSIPLYRSSEEEKRVTVIKAPHYPGIGPVDESGIPTAIRTTVDRPKDWYKTMFKQIHMVHKPGLYNPPYSAQSHPAAKTQTYRPLSKSHSDNSPNAFKDASSPVPPPHVPPPVPPLRPRDRSSTEKHDWDPPDRKVDTRKFRSEPRSIFEYEPGKSSILQHERPASLYQSSIDRSLERPMSSASMASDFRKRRKSEPAVGPPRGLGDQSASRTSPGRVDLPGSSTTLTKSFTSSSPSSPSRAKDRESPRSYSSTLTDMGRSAPRERRGTPEKEKLPAKAVYDFKAQTSKELSFKKGDTVYILRKIDQNWYEGEHHGRVGIFPISYVEKLTPPEKAQPARPPPPAQPGEIGEAIAKYNFNADTNVELSLRKGDRVILLKRVDQNWYEGKIPGTNRQGIFPVSYVEVVKKNTKGAEDYPDPPIPHSYSSDRIHSLSSNKPQRPVFTHENIQGGGEPFQALYNYTPRNEDELELRESDVIDVMEKCDDGWFVGTSRRTKFFGTFPGNYVKRL

SEQ ID NO: 278461 - DNA, 3049 bp, Artificial Sequence
  derived and/or modified sequence
gagctgagaggaccagccattttacttatggaaaacagtgtggcatattctgctgagcttcgccctggaagaagcctcttttatacatctcttcagggaagagagaagcaatgggcatgttagtatacaatgatcacagccacgcaggcctgcaagctgccttttggacaggctgttgactgccgttccaattagctgattggagaatgtggaatgcagagtgataatgctgcatatctgctatcaggcagcagcaaaggtttttgtcttgggaaggcaagctttccctgcaatattatctcagcagctccctagctgcttaccctgaaaacgagggatccaaacggagggtgttgcactctgctaacgctggtcctgtgcgtggctgtggcatatgagcggcaggtctgaaaaagcaggtgtgtgctgggacgggcactggactggaacgcaggcggacgctctcgggtttacctgcttcctgttaacagattgtgggctcccagggcatatgtctgcacgctgaggccgaggcggagaaggggcttcctgagcgtcccagtacactgacagagacacttggattggacttaatcttaaacctctggagttcaagaccttttaaaaagggctaaataaacaatctctacatgtaaaaggccactgactcctacttcctctgtatagagcaactgttgaactcagctgcctgtaggaaaactgaagactttaataacaaactctccaaggtgaaaatgaacacagcggtgggtgtgctcgcaaacgtgccgccatgtctgttacgctaacatctgtgaagagagtgcaaagttctccaaacctattggctgcagggcgtgattctcagtcaccagactcagcttggagatcttacaatgatggcaatcaggagacactgaacggagatgctacatattcctctcttgcagcaaaaggttttagaagcgttcgaccaaacctacaagataaaagatcaccaactcagagccagataacagtgaatggaaactcaggaggtgccgtgagtcccatgagttactatcagaggccgttttccccctcggcatattctctcccagcctcactcaactccagcattgtcatgcagcacggcacatccctcgattccacagacacatatccccagcatgcgcagtctctggatggcaccaccagcagctctatccccctgtaccgatcctcagaggaagagaagagagtgacagtcatcaaagccccgcattacccagggatcgggcccgtggatgaatccggaatccccacagcaattagaacgacagtcgaccggcccaaggactggtacaagacgatgtttaagcaaattcacatggtgcacaagccgggtctgtacaacccaccctacagtgctcagtcacaccctgctgcaaagacccaaacctacagacctctttccaaaagccactccgacaacagccccaatgcctttaaggatgcgtcctccccagtgcctcccccacatgttccacctccagtcccgccgcttcgaccaagagatcggtcttcaacagaaaagcatgactgggatcctccagacagaaaagtggacacaagaaaatttcggtctgagccaaggagtatttttgaatatgaacctggcaagtcatcaattcttcagcatgaaagaccagcctccttgtatcagtcctctatagacagaagcctggaaagacccatgagttctgcaagcatggccagtgacttcaggaagcggaggaagagcgagcctgcagtgggtccaccacggggcttgggagatcaaagtgcgagcaggactagcccaggccgagtggacctcccaggatcaagcaccactcttacaaagtctttcactagctcttctccttcttccccatcaagagcaaaagaccgtgagtcccctagaagttactcatccactttgactgacatggggagaagtgcaccaagggaaagaagaggaactccagaaaaagagaaattgcctgcaaaagctgtttatgattttaaggctcagacatctaaggagttgtcatttaagaaaggagatactgtctacatcctcaggaaaattgatcaaaattggtatgagggagaacaccacgggagagtgggcatcttcccgatctcatacgtagagaaactcacacctcctgagaaagcacagcctgcaagaccacctccgccagcccagcccggagaaatcggagaagctatagccaaatacaacttcaacgcagacacaaatgtggagctgtcactgagaaagggagatagagttattcttcttaaaagagttgatcaaaactggtatgaaggtaaaatcccaggaaccaacagacaaggcatcttccctgtttcctatgtggaggtcgtcaagaagaacacaaaaggtgctgaggactaccctgaccctccaataccccacagctattctagtgataggattcacagcttgagctcaaataagccacagcgtcctgtgtttactcatgaaaatattcaaggtgggggggaaccgtttcaggctctgtataactatactcccaggaatgaagatgagctggagctcagagaaagtgatgtcattgatgtcatggaaaagtgtgatgacggctggtttgtggggacctcaagaagaaccaaattctttggtactttccccggaaactacgtcaagaggctgtgaattgcgctccctccttctgtagaggccgcctgccagccatgcacctgcgtcaacgcgcctgaaacaccccgcgggcctcccgttgtcatgccttacggtttccaatgcgccgtcaccatctccacctgccaccaaaccaccagcagagtagccgccgctgctgtgagcctggggacgacatggcaggctggtccccctccgtgaaagtgtggattcctacttcctgctctaagctttgacacgtcaaaatgtgggatcagaaagaaaaaaatcatgatatttaaaaatggtcaaatatttgaggcaaaaaaaaaaaaaaaa

SEQ ID NO: 278462 - protein, 686 aa, Artificial Sequence
  derived and/or modified sequence
MIHFHPLILPHERSFLGYASFKVGELLKSKEQLLVLSLRTSDGGKVVGTIEVSVVKMGEIEDGEADHITTDVQGQKCALVCECTAPESVSGKDNLPFLNSVLKNPVCKLYRFPTSDNKWMRIREQMSESILSFHIPKELISLHIKEDLCRNQEIKELGELSPHWDNLRKNVLTHCDQMVNMYQDILTELSKETGSSFKSSSSKGEKTLEFVPINLHLQRMQVHSPHLKDALYDVITVGAPAAHFQGFKNGGLRKLLHRFETERRNTGYQFIYYSPENTAKAKEVLSNINQLQPLIATHADLLLNSASQHSPDSLKNSLKMLSEKTELFVHAFKDQLVRSALLALYTARPGGILKKPPSPKSSTEESSPQDQPPVMRGQDSIPHHSDYDEEEWDRVWANVGKSLNCIIAMVDKLIERDGGSEGSGGNNDGEKEPSLTDAIPSHPREDWYEQLYPLILTLKDCMGEVVNRAKQSLTFVLLQELAYSLPQCLMLTLRRDIVFSQALAGLVCGFIIKLQTSLYDPGFLQQLHTVGLIVQYEGLLSTYSDEIGMLEDMAVGISDLKKVAFKIIEAKSNDVLPVITGRREHYVVEVKLPARMFESLPLQIKEGQLLHVYPVLFNVGINEQQTLAERFGDVSLQESINQENFELLQEYYKIFMEKMPPDYISHFQEQNDLKALLENLLQNIQS

SEQ ID NO: 278463 - DNA, 2061 bp, Artificial Sequence
  derived and/or modified sequence
atgatccacttccaccccctgatcctgccccacgagagaagcttcctgggctacgccagcttcaaggtgggcgagctgctgaagagcaaggagcagctgctggtgctgagcctgagaaccagcgacggcggcaaggtggtgggcaccatcgaggtgagcgtggtgaagatgggcgagatcgaggacggcgaggccgaccacatcaccaccgacgtgcagggccagaagtgcgccctggtgtgcgagtgcaccgcccccgagagcgtgagcggcaaggacaacctgcccttcctgaacagcgtgctgaagaaccccgtgtgcaagctgtacagattccccaccagcgacaacaagtggatgagaatcagagagcagatgagcgagagcatcctgagcttccacatccccaaggagctgatcagcctgcacatcaaggaggacctgtgcagaaaccaggagatcaaggagctgggcgagctgagcccccactgggacaacctgagaaagaacgtgctgacccactgcgaccagatggtgaacatgtaccaggacatcctgaccgagctgagcaaggagaccggcagcagcttcaagagcagcagcagcaagggcgagaagaccctggagttcgtgcccatcaacctgcacctgcagagaatgcaggtgcacagcccccacctgaaggacgccctgtacgacgtgatcaccgtgggcgcccccgccgcccacttccagggcttcaagaacggcggcctgagaaagctgctgcacagattcgagaccgagagaagaaacaccggctaccagttcatctactacagccccgagaacaccgccaaggccaaggaggtgctgagcaacatcaaccagctgcagcccctgatcgccacccacgccgacctgctgctgaacagcgccagccagcacagccccgacagcctgaagaacagcctgaagatgctgagcgagaagaccgagctgttcgtgcacgccttcaaggaccagctggtgagaagcgccctgctggccctgtacaccgccagacccggcggcatcctgaagaagccccccagccccaagagcagcaccgaggagagcagcccccaggaccagccccccgtgatgagaggccaggacagcatcccccaccacagcgactacgacgaggaggagtgggacagagtgtgggccaacgtgggcaagagcctgaactgcatcatcgccatggtggacaagctgatcgagagagacggcggcagcgagggcagcggcggcaacaacgacggcgagaaggagcccagcctgaccgacgccatccccagccaccccagagaggactggtacgagcagctgtaccccctgatcctgaccctgaaggactgcatgggcgaggtggtgaacagagccaagcagagcctgaccttcgtgctgctgcaggagctggcctacagcctgccccagtgcctgatgctgaccctgagaagagacatcgtgttcagccaggccctggccggcctggtgtgcggcttcatcatcaagctgcagaccagcctgtacgaccccggcttcctgcagcagctgcacaccgtgggcctgatcgtgcagtacgagggcctgctgagcacctacagcgacgagatcggcatgctggaggacatggccgtgggcatcagcgacctgaagaaggtggccttcaagatcatcgaggccaagagcaacgacgtgctgcccgtgatcaccggcagaagagagcactacgtggtggaggtgaagctgcccgccagaatgttcgagagcctgcccctgcagatcaaggagggccagctgctgcacgtgtaccccgtgctgttcaacgtgggcatcaacgagcagcagaccctggccgagagattcggcgacgtgagcctgcaggagagcatcaaccaggagaacttcgagctgctgcaggagtactacaagatcttcatggagaagatgccccccgactacatcagccacttccaggagcagaacgacctgaaggccctgctggagaacctgctgcagaacatccagagctag

SEQ ID NO: 278464 - DNA, 2061 bp, Artificial Sequence
  derived and/or modified sequence
atgatccactttcatcctctgatacttcctcacgagcggtcgtttctgggttatgctagtttcaaagtgggggagcttttgaagtcgaaggaacaactcttggtgctttccctgcggacttcagacggcggcaaggttgttggaacaatcgaggtctctgtagttaaaatgggcgaaattgaggacggtgaagccgaccatataactactgacgtccagggacaaaaatgtgcccttgtatgtgaatgtacagctcctgagagtgtaagcggaaaggataatttgcccttcctaaatagcgtgctgaagaatcccgtttgtaaactctacagattccctacttcagacaacaaatggatgcgcatacgcgagcagatgagcgaaagcatccttagcttccacatcccgaaggagttaatatctcttcacataaaggaagacctttgtagaaatcaagaaatcaaagagctcggcgagctctctcctcactgggataatctcagaaaaaacgtgttgactcactgtgaccagatggtaaacatgtaccaagacatcctcacagagttgtctaaggagacagggagttccttcaagagcagttccagcaagggcgagaaaactctggagttcgtcccaatcaacctccatttacaacgaatgcaggtgcacagcccacacctgaaggacgccctttacgatgttatcacagttggggcccctgccgctcacttccagggctttaagaatggaggcctacggaagctgctgcaccggttcgaaaccgaacgacggaacacaggataccagtttatttactactctcccgagaatacagctaaggcaaaagaggtcctgagtaacatcaatcagctacagcctctaatcgcgacacatgctgaccttctattaaacagcgcctcacaacactccccagattccttaaagaactctctgaaaatgctgagtgagaaaacagaactgtttgtccatgccttcaaagaccagctcgtgcgctctgctctgctggctttatacaccgctcggcccggtgggatcttaaaaaaacccccttctccaaaatcatcaacagaagagtcctccccacaggaccagccacccgtcatgcgcggacaagattccattccccaccacagtgactatgacgaagaagagtgggaccgggtgtgggcaaatgtcggaaaatcgctgaactgcataatcgcgatggtggataaactgatcgagagggatggcggttccgagggctccgggggaaataatgacggggagaaagaaccatctttaacagacgccatcccttcccatcctagggaggactggtacgagcagctctaccccctaattctgacactaaaggactgtatgggcgaagttgtgaaccgggccaaacagtccttaaccttcgttcttctacaagagctggcatattcgcttccccaatgcctaatgctcaccctcagaagggacatcgtgttctcccaggcgctggcaggcctcgtgtgtggattcattatcaagttgcagacctctctttacgacccaggcttcctgcagcaactacatacagtaggactcattgtgcaatatgagggcttgttaagcacatacagcgatgagatcggtatgctggaggacatggccgtggggatttctgacctgaagaaagttgcttttaaaatcatcgaagctaaatccaatgacgttctgccagtgatcaccggcagaagagaacattatgtggtcgaagtcaagctaccagctcggatgtttgaaagcttacctctgcagattaaggaggggcagctcctgcacgtgtatcccgtcctgtttaacgtgggcatcaatgaacaacagaccctggcagagaggtttggcgacgtctccctccaggagtccattaaccaggagaactttgagttacttcaggaatactacaagatatttatggagaaaatgcctcccgattacatttcacactttcaggagcagaacgatctcaaagcgttgctcgagaatctattacagaatattcagagctag

SEQ ID NO: 278465 - DNA, 2061 bp, Artificial Sequence
  derived and/or modified sequence
atgatccacttccaccccctcatcctgccccatgagaggagcttcctgggctacgccagcttcaaggtgggggagctgctgaagagcaaggagcagctgctggtgctgagcctgcggaccagtgatggcggcaaggtggtgggcaccatcgaggtgtctgtggtgaagatgggagaaattgaagatggagaggccgaccacatcaccacagatgtgcagggccagaagtgtgccctggtgtgtgagtgcacagcccctgagagcgtgtctgggaaggacaacctgcccttcctgaacagcgtgctgaagaaccctgtgtgcaagctgtaccgcttccccaccagtgacaacaagtggatgaggatccgggagcagatgtctgagagcatcctgtccttccacatccccaaggagctgatcagcctgcacatcaaggaggacctgtgcaggaaccaggagatcaaggagctgggggagctgagcccccactgggacaacctgaggaagaatgtgctgacccactgtgaccagatggtgaacatgtaccaggacatcctgacagagctgagcaaggagaccggcagcagcttcaagagcagcagcagcaaaggagagaagaccctggagtttgtgcccatcaacctgcacctgcagaggatgcaggtgcacagcccccacctgaaggatgccctgtatgatgtgatcaccgtgggcgccccagctgcccacttccagggcttcaagaatggaggcctgaggaagctgctgcacagatttgaaacagaaagaagaaacacaggctaccagttcatctactacagccctgagaacacagccaaggccaaggaggtgctgagcaacatcaaccagctgcagcccctgattgccacccatgctgacctgctgctgaacagcgccagccagcacagcccagacagcctgaagaacagcctgaagatgctgtctgagaagacagagctgtttgtgcacgccttcaaggaccagctggtgcgcagcgccctgctggccctgtacacagcccggcctgggggcatcctgaagaagccacccagccccaagagcagcacagaggagagcagcccccaggaccagccccctgtgatgaggggccaggacagcatcccccaccacagcgactatgatgaggaggagtgggacagagtgtgggccaacgtgggcaagagcctgaactgcatcatcgccatggtggacaagctgattgaaagagatggcggcagcgagggcagcggcggcaacaatgatggagagaaggagcccagcctgacagatgccatccccagccacccccgggaggactggtatgagcagctgtaccccctcatcctgaccctgaaggactgcatgggagaggtggtgaacagagccaagcagagcctgacctttgtgctgctgcaggagctggcctacagcctgccccagtgcctgatgctgaccctgcggcgggacatcgtgttcagccaggccctggccggcctggtgtgtggcttcatcatcaagctgcagaccagcctgtatgaccccggcttcctgcagcagctgcacacagtgggcctgattgtgcagtatgagggcctgctgagcacctacagtgatgaaattggcatgctggaggacatggctgtgggcatcagtgacctgaagaaggtggccttcaagatcatcgaggccaagagcaatgatgtgctgcctgtgatcaccggccggcgggagcactacgtggtggaggtgaagctgcctgccaggatgtttgagagcctgcccctgcagatcaaggagggccagctgctgcacgtgtaccctgtgctcttcaacgtgggcatcaatgagcagcagaccctggccgagagatttggagatgtgtccctgcaggagagcatcaaccaggagaactttgagctgctgcaggagtactacaagatcttcatggagaagatgcccccagactacatcagccacttccaggagcagaatgacctgaaggccctgctggagaacctgctgcagaacatccagagctag

SEQ ID NO: 278466 - DNA, 2061 bp, Artificial Sequence
  derived and/or modified sequence
atgatccacttccaccccctgatcctgccccacgagcggagcttcctgggttatgcttcattcaaggtgggcgagctgttgaaatccaaggaacaactcttagtcttatccttgaggaccagtgacggaggaaaggttgttggaacaatcgaggtttctgtggtcaagatgggggagattgaagatggggaagcggatcatatcaccactgacgtgcagggacagaagtgcgctctggtctgtgagtgcactgccccagaatctgtcagtggcaaggataacctgccattcctgaatagcgttctgaagaatccagtctgtaagctttaccgcttcccgacttcagataacaaatggatgcgtatccgggagcagatgagtgagtctatactttccttccatatccccaaggagctgatcagcttacacatcaaggaagatctttgtaggaatcaggagataaaagaactaggcgagctctccccgcactgggataacctcaggaagaacgtcctgacccactgtgaccagatggtgaatatgtatcaggacatcctaacagaactatctaaggagacagggagtagcttcaaatctagctcgagcaaaggagagaagaccctcgagtttgtgcccatcaatttacacctgcaaaggatgcaggtgcactcgccccaccttaaggatgctctgtacgacgtgatcactgtaggagctcccgccgctcacttccagggatttaaaaacggggggctgaggaagctgctgcatcgcttcgagaccgaaagaagaaatactggctatcagtttatctattactcccccgagaatactgccaaggctaaggaagtgcttagtaatataaaccagctgcaaccactcatagctacacatgccgatctcctcctcaactcagcctctcagcactcccccgattcactgaaaaactcccttaaaatgttgtcagagaagacagagctgtttgtacacgcttttaaggatcaacttgtgcgcagcgctctgctggcactgtacacggcccggcctggcggtattcttaagaagccaccctcccctaagtcctccaccgaagaatcttccccccaggatcagcctcctgtgatgaggggccaggattcaataccccaccattccgactatgacgaggaggagtgggatcgagtgtgggccaacgttggtaaaagcctcaattgcatcatcgctatggtggataagctgatcgaaagagacggtggctcagagggaagcggaggcaacaacgacggagagaaggaaccctccctaacagacgctattcctagtcatccacgagaagactggtatgagcagttataccccctgattttaactctcaaggactgcatgggggaagtggtcaacagggcaaagcagtcactgacttttgtactgctgcaggagctggcttattctctgcctcagtgtctcatgctgacgttgagacgcgatattgtgttctctcaagccctcgccggactcgtttgtggtttcatcataaaactgcaaacttctctgtacgatcctggctttctgcagcagttgcacacggtgggcctgatagtccagtacgagggcctgctgtccacctactctgatgaaattggaatgcttgaggatatggcggttgggatctcagacctgaaaaaggttgcctttaagatcatagaggctaaaagtaatgatgtactgccagtaataacgggccggagggaacactacgtggttgaggtgaagcttcctgccaggatgtttgagagcttaccccttcagatcaaggagggccaactgttgcacgtttatcctgttctgtttaatgtcggcatcaacgagcagcagactctcgccgagaggtttggggatgtgtccctgcaagagtcaatcaatcaggaaaattttgagctgctgcaggagtactataaaatcttcatggaaaaaatgccccctgactatatctcccattttcaagaacagaacgatcttaaggcgctgctcgagaatctgcttcagaacattcaatcctag

SEQ ID NO: 278467 - DNA, 2061 bp, Artificial Sequence
  derived and/or modified sequence
atgatccattttcaccctcttatactgcctcacgagcggtcattccttggctacgcaagcttcaaagttggtgaactcctcaagtctaaagagcagctgctggtactgagtcttcggacgtctgacggcggaaaagttgtgggcactatcgaggtctctgtcgtgaagatgggtgaaatcgaggacggcgaagcagaccatataactactgatgtccaaggccagaaatgtgcactggtatgtgaatgcacagcaccagaatcggtgagcgggaaagataatcttcccttcttaaattcggtgctgaagaatcccgtgtgcaagctgtataggttcccgacgtccgataataagtggatgaggatccgggaacagatgtctgaaagcatcctgtccttccacatccctaaggagctgatctcgctccacatcaaggaggatctgtgtcgtaatcaggagatcaaggagcttggagagctctccccgcactgggacaatttacggaagaacgtgctgactcactgtgaccaaatggtcaatatgtaccaggacattctgaccgaactgtccaaggaaacaggctcttcatttaaaagcagctcttccaagggcgaaaaaaccctagaatttgtgcccattaacctgcacctgcaacgtatgcaggtgcattctcctcacttaaaagacgctttgtatgatgtgatcacggttggggcacctgctgctcactttcaaggatttaaaaacggaggtctgagaaaactgctgcacaggtttgagacagagaggagaaataccggctaccaatttatctattactccccagagaataccgcgaaggccaaggaagtcctgagcaacattaaccagttgcagccactcattgcgactcatgccgaccttctcctgaattctgcttcccagcattctccagatagtctcaagaattccttaaagatgttgtctgagaaaaccgaactcttcgtccacgcgttcaaggatcagctcgttaggtcagcactccttgctctttataccgcccgtccagggggtatcctaaaaaagcccccttcacctaaaagctcaactgaagagtcttccccccaagaccagccccctgtaatgaggggacaggacagtatcccgcaccactccgattatgatgaggaggagtgggatcgcgtttgggccaatgtcggcaagtcattaaattgtattatagctatggtcgacaaactcatagagagagatgggggaagtgaagggtcaggagggaataatgatggtgagaaggaaccaagccttaccgacgccataccgtctcacccccgagaggactggtatgagcagctttatccactgatactgactttgaaggattgcatgggggaagttgtgaatagagccaagcagagccttaccttcgttctgctccaggagctggcctactctctgccccaatgcctcatgttgaccctgaggcgtgacatagtcttttcacaggcactagccggactggtgtgtgggtttataatcaagcttcagacctccctgtacgatcctggattcttacagcagttgcacacagttggcctcatcgtgcaatatgaggggcttttgtcaacgtatagcgatgaaatcggcatgctggaagacatggctgttggaatcagtgatcttaagaaagttgcttttaagatcatcgaggctaagagcaatgatgtcctcccagtcatcactgggagacgcgaacactatgtcgtggaagtcaaactgccagctagaatgttcgagagtctgcccctccagatcaaggaaggccagctcctccacgtgtatcctgtgttatttaatgtcggtatcaacgaacagcagacactcgctgagcgcttcggggatgtgtcactgcaggagtcaatcaatcaggagaattttgagctgctccaggaatattataaaatcttcatggagaaaatgcccccagattacatctctcattttcaggaacagaacgacttaaaagccctgttagagaaccttctgcagaacatccagagctag

SEQ ID NO: 278468 - protein, 94 aa, Artificial Sequence
  derived and/or modified sequence
MLCWGYWSLGQPGISTNLQGIVAEPQVCGFISDRSVKEVACGGNHSVFLLEDGEVYTCGLNTKGQLGHEREGNKPEQIGALADQHIIHVACGES

SEQ ID NO: 278469 - protein, 227 aa, Artificial Sequence
  derived and/or modified sequence
MLCWGYWSLGQPGISTNLQGIVAEPQVCGFISDRSVKEVACGGNHSVFLLEDGEVYTCGLNTKGQLGHEREGNKPEQIGALADQHIIHVACGESHSLALSDRGQLFSWGAGSDGQLGLMTTEDSVAVPRLIQKLNQQTILQVSCGNWHCLALAADGQFFTWGKNSHGQLGLGKEFPSQASPQRVRSLEGIPLAQVAAGGAHSFALSLSGAVFGWGMNNAGQLGLSDE

SEQ ID NO: 278470 - protein, 2852 aa, Artificial Sequence
  derived and/or modified sequence
MASEDNRVPSPPPTGDDGGGGGREETPTEGGALSLKPGLPIRGIRMKFAVLTGLVEVGEVSNRDIVETVFNLLVGGQFDLEMNFIIQEGESINCMVDLLEKCDITCQAEVWSMFTAILKKSIRNLQVCTEVGLVEKVLGKIEKVDNMIADLLVDMLGVLASYNLTVRELKLFFSKLQGDKGRWPPHAGKLLSVLKHMPQKYGPDAFFNFPGKSAAAIALPPIAKWPYQNGFTFHTWLRMDPVNNINVDKDKPYLYCFRTSKGLGYSAHFVGGCLIVTSIKSKGKGFQHCVKFDFKPQKWYMVTIVHIYNRWKNSELRCYVNGELASYGEITWFVNTSDTFDKCFLGSSETADANRVFCGQMTAVYLFSEALNAAQIFAIYQLGLGYKGTFKFKAESDLFLAEHHKLLLYDGKLSSAIAFTYNPRATDAQLCLESSPKDNPSIFVHSPHALMLQDVKAVLTHSIQSAMHSIGGVQVLFPLFAQLDYRQYLSDEIDLTICSTLLAFIMELLKNSIAMQEQMLACKGFLVIGYSLEKSSKSHVSRAVLELCLAFSKYLSNLQNGMPLLKQLCDHVLLNPAIWIHTPAKVQLMLYTYLSTEFIGTVNIYNTIRRVGTVLLIMHTLKYYYWAVNPQDRSGITPKGLDGPRPNQKEMLSLRAFLLMFIKQLVMKDSGVKEDELQAILNYLLTMHEDDNLMDVLQLLVALMSEHPNSMIPAFDQRNGLRVIYKLLASKSEGIRVQALKAMGYFLKHLAPKRKAEVMLGHGLFSLLAERLMLQTNLITMTTYNVLFEILIEQIGTQVIHKQHPDPDSSVKIQNPQILKVIATLLRNSPQCPESMEVRRAFLSDMIKLFNNSRENRRSLLQCSVWQEWMLSLCYFNPKNSDEQKITEMVYAIFRILLYHAVKYEWGGWRVWVDTLSITHSKVTFEIHKENLANIFREQQGKVDEEIGLCSSTSVQAASGIRRDINVSVGSQQPDTKDSPVCPHFTTNGNENSSIEKTSSLESASNIELQTTNTSYEEMKAEQENQELPDEGTLEETLTNETRNADDLEVSSDIIEAVAISSNSFITTGKDSMTVSEVTASISSPSEEDASEMPEFLDKSIVEEEEDDDYVELKVEGSPTEEANLPTELQDNSLSPAASEAGEKLDMFGNDDKLIFQEGKPVTEKQTDTETQDSKDSGIQTMTASGSSAMSPETTVSQIAVESDLGQMLEEGKKATNLTRETKLINDCHGSVSEASSEQKIAKLDVSNVATDTERLELKASPNVEAPQPHRHVLEISRQHEQPGQGIAPDAVNGQRRDSRSTVFRIPEFNWSQMHQRLLTDLLFSIETDIQMWRSHSTKTVMDFVNSSDNVIFVHNTIHLISQVMDNMVMACGGILPLLSAATSATHELENIEPTQGLSIEASVTFLQRLISLVDVLIFASSLGFTEIEAEKSMSSGGILRQCLRLVCAVAVRNCLECQQHSQLKTRGDKALKPMHSLIPLGKSAAKSPVDIVTGGISPVRDLDRLLQDMDINRLRAVVFRDIEDSKQAQFLALAVVYFISVLMVSKYRDILEPQNERHSQSCTETGSENENVSLSEITPAAFSTLTTASVEESESTSSARRRDSGIGEETATGLGSHVEVTPHTAPPGVSAGPDAISEVLSTLSLEVNKSPETKNDRGNDLDTKATPSVSVSKNVNVKDILRSLVNIPADGVTVDPALLPPACLGALGDLSVEQPVQFRSFDRSVIVAAKKSAVSPSTFNTSIPTNAVSVVSSVDSAQASDMGGESPGSRSSNAKLPSVPTVDSVSQDPVSNMSITERLEHALEKAAPLLREIFVDFAPFLSRTLLGSHGQELLIEGTSLVCMKSSSSVVELVMLLCSQEWQNSIQKNAGLAFIELVNEGRLLSQTMKDHLVRVANEAEFILSRQRAEDIHRHAEFESLCAQYSADKREDEKMCDHLIRAAKYRDHVTATQLIQKIINILTDKHGAWGNSAVSRPLEFWRLDYWEDDLRRRRRFVRNPLGSTHPEATLKTAVEHATDEDILAKGKQSIRSQALGNQNSENEILLEGDDDTLSSVDEKDLENLAGPVSLSTPAQLVAPSVVVKGTLSVTSSELYFEVDEEDPNFKKIDPKILAYTEGLHGKWLFTEIRSIFSRRYLLQNTALEIFMANRVAVMFNFPDPATVKKVVNYLPRVGVGTSFGLPQTRRISLASPRQLFKASNMTQRWQHREISNFEYLMFLNTIAGRSYNDLNQYPVFPWVITNYESEELDLTLPTNFRDLSKPIGALNPKRAAFFAERYESWEDDQVPKFHYGTHYSTASFVLAWLLRIEPFTTYFLNLQGGKFDHADRTFSSISRAWRNSQRDTSDIKELIPEFYYLPEMFVNFNNYNLGVMDDGTVVSDVELPPWAKTSEEFVHINRLALESEFVSCQLHQWIDLIFGYKQQGPEAVRALNVFYYLTYEGAVNLNSITDPVLREAVEAQIRSFGQTPSQLLIEPHPPRGSAMQVSPLMFTDKAQQDVIMVLKFPSNSPVTHVAANTQPGLATPAVITVTANRLFAVNKWHNLPAHQGAVQDQPYQLPVEIDPLIASNTGMHRRQITDLLDQSIQVHSQCFVITSDNRYILVCGFWDKSFRVYSTDTGRLIQVVFGHWDVVTCLARSESYIGGNCYILSGSRDATLLLWYWNGKCSGIGDNPGSETAAPRAILTGHDYEVTCAAVCAELGLVLSGSQEGPCLIHSMNGDLLRTLEGPENCLKPKLIQASREGHCVIFYENGLFCTFSVNGKLQATMETDDNIRAIQLSRDGQYLLTGGDRGVVVVRQVSDLKQLFAYPGCDAGIRAMALSYDQRCIISGMASGSIVLFYNDFNRWHHEYQTRY

SEQ ID NO: 278471 - DNA, 8559 bp, Artificial Sequence
  derived and/or modified sequence
atggccagcgaggacaacagagtgcccagccccccccccaccggcgacgacggcggcggcggcggcagagaggagacccccaccgagggcggcgccctgagcctgaagcccggcctgcccatcagaggcatcagaatgaagttcgccgtgctgaccggcctggtggaggtgggcgaggtgagcaacagagacatcgtggagaccgtgttcaacctgctggtgggcggccagttcgacctggagatgaacttcatcatccaggagggcgagagcatcaactgcatggtggacctgctggagaagtgcgacatcacctgccaggccgaggtgtggagcatgttcaccgccatcctgaagaagagcatcagaaacctgcaggtgtgcaccgaggtgggcctggtggagaaggtgctgggcaagatcgagaaggtggacaacatgatcgccgacctgctggtggacatgctgggcgtgctggccagctacaacctgaccgtgagagagctgaagctgttcttcagcaagctgcagggcgacaagggcagatggcccccccacgccggcaagctgctgagcgtgctgaagcacatgccccagaagtacggccccgacgccttcttcaacttccccggcaagagcgccgccgccatcgccctgccccccatcgccaagtggccctaccagaacggcttcaccttccacacctggctgagaatggaccccgtgaacaacatcaacgtggacaaggacaagccctacctgtactgcttcagaaccagcaagggcctgggctacagcgcccacttcgtgggcggctgcctgatcgtgaccagcatcaagagcaagggcaagggcttccagcactgcgtgaagttcgacttcaagccccagaagtggtacatggtgaccatcgtgcacatctacaacagatggaagaacagcgagctgagatgctacgtgaacggcgagctggccagctacggcgagatcacctggttcgtgaacaccagcgacaccttcgacaagtgcttcctgggcagcagcgagaccgccgacgccaacagagtgttctgcggccagatgaccgccgtgtacctgttcagcgaggccctgaacgccgcccagatcttcgccatctaccagctgggcctgggctacaagggcaccttcaagttcaaggccgagagcgacctgttcctggccgagcaccacaagctgctgctgtacgacggcaagctgagcagcgccatcgccttcacctacaaccccagagccaccgacgcccagctgtgcctggagagcagccccaaggacaaccccagcatcttcgtgcacagcccccacgccctgatgctgcaggacgtgaaggccgtgctgacccacagcatccagagcgccatgcacagcatcggcggcgtgcaggtgctgttccccctgttcgcccagctggactacagacagtacctgagcgacgagatcgacctgaccatctgcagcaccctgctggccttcatcatggagctgctgaagaacagcatcgccatgcaggagcagatgctggcctgcaagggcttcctggtgatcggctacagcctggagaagagcagcaagagccacgtgagcagagccgtgctggagctgtgcctggccttcagcaagtacctgagcaacctgcagaacggcatgcccctgctgaagcagctgtgcgaccacgtgctgctgaaccccgccatctggatccacacccccgccaaggtgcagctgatgctgtacacctacctgagcaccgagttcatcggcaccgtgaacatctacaacaccatcagaagagtgggcaccgtgctgctgatcatgcacaccctgaagtactactactgggccgtgaacccccaggacagaagcggcatcacccccaagggcctggacggccccagacccaaccagaaggagatgctgagcctgagagccttcctgctgatgttcatcaagcagctggtgatgaaggacagcggcgtgaaggaggacgagctgcaggccatcctgaactacctgctgaccatgcacgaggacgacaacctgatggacgtgctgcagctgctggtggccctgatgagcgagcaccccaacagcatgatccccgccttcgaccagagaaacggcctgagagtgatctacaagctgctggccagcaagagcgagggcatcagagtgcaggccctgaaggccatgggctacttcctgaagcacctggcccccaagagaaaggccgaggtgatgctgggccacggcctgttcagcctgctggccgagagactgatgctgcagaccaacctgatcaccatgaccacctacaacgtgctgttcgagatcctgatcgagcagatcggcacccaggtgatccacaagcagcaccccgaccccgacagcagcgtgaagatccagaacccccagatcctgaaggtgatcgccaccctgctgagaaacagcccccagtgccccgagagcatggaggtgagaagagccttcctgagcgacatgatcaagctgttcaacaacagcagagagaacagaagaagcctgctgcagtgcagcgtgtggcaggagtggatgctgagcctgtgctacttcaaccccaagaacagcgacgagcagaagatcaccgagatggtgtacgccatcttcagaatcctgctgtaccacgccgtgaagtacgagtggggcggctggagagtgtgggtggacaccctgagcatcacccacagcaaggtgaccttcgagatccacaaggagaacctggccaacatcttcagagagcagcagggcaaggtggacgaggagatcggcctgtgcagcagcaccagcgtgcaggccgccagcggcatcagaagagacatcaacgtgagcgtgggcagccagcagcccgacaccaaggacagccccgtgtgcccccacttcaccaccaacggcaacgagaacagcagcatcgagaagaccagcagcctggagagcgccagcaacatcgagctgcagaccaccaacaccagctacgaggagatgaaggccgagcaggagaaccaggagctgcccgacgagggcaccctggaggagaccctgaccaacgagaccagaaacgccgacgacctggaggtgagcagcgacatcatcgaggccgtggccatcagcagcaacagcttcatcaccaccggcaaggacagcatgaccgtgagcgaggtgaccgccagcatcagcagccccagcgaggaggacgccagcgagatgcccgagttcctggacaagagcatcgtggaggaggaggaggacgacgactacgtggagctgaaggtggagggcagccccaccgaggaggccaacctgcccaccgagctgcaggacaacagcctgagccccgccgccagcgaggccggcgagaagctggacatgttcggcaacgacgacaagctgatcttccaggagggcaagcccgtgaccgagaagcagaccgacaccgagacccaggacagcaaggacagcggcatccagaccatgaccgccagcggcagcagcgccatgagccccgagaccaccgtgagccagatcgccgtggagagcgacctgggccagatgctggaggagggcaagaaggccaccaacctgaccagagagaccaagctgatcaacgactgccacggcagcgtgagcgaggccagcagcgagcagaagatcgccaagctggacgtgagcaacgtggccaccgacaccgagagactggagctgaaggccagccccaacgtggaggccccccagccccacagacacgtgctggagatcagcagacagcacgagcagcccggccagggcatcgcccccgacgccgtgaacggccagagaagagacagcagaagcaccgtgttcagaatccccgagttcaactggagccagatgcaccagagactgctgaccgacctgctgttcagcatcgagaccgacatccagatgtggagaagccacagcaccaagaccgtgatggacttcgtgaacagcagcgacaacgtgatcttcgtgcacaacaccatccacctgatcagccaggtgatggacaacatggtgatggcctgcggcggcatcctgcccctgctgagcgccgccaccagcgccacccacgagctggagaacatcgagcccacccagggcctgagcatcgaggccagcgtgaccttcctgcagagactgatcagcctggtggacgtgctgatcttcgccagcagcctgggcttcaccgagatcgaggccgagaagagcatgagcagcggcggcatcctgagacagtgcctgagactggtgtgcgccgtggccgtgagaaactgcctggagtgccagcagcacagccagctgaagaccagaggcgacaaggccctgaagcccatgcacagcctgatccccctgggcaagagcgccgccaagagccccgtggacatcgtgaccggcggcatcagccccgtgagagacctggacagactgctgcaggacatggacatcaacagactgagagccgtggtgttcagagacatcgaggacagcaagcaggcccagttcctggccctggccgtggtgtacttcatcagcgtgctgatggtgagcaagtacagagacatcctggagccccagaacgagagacacagccagagctgcaccgagaccggcagcgagaacgagaacgtgagcctgagcgagatcacccccgccgccttcagcaccctgaccaccgccagcgtggaggagagcgagagcaccagcagcgccagaagaagagacagcggcatcggcgaggagaccgccaccggcctgggcagccacgtggaggtgaccccccacaccgccccccccggcgtgagcgccggccccgacgccatcagcgaggtgctgagcaccctgagcctggaggtgaacaagagccccgagaccaagaacgacagaggcaacgacctggacaccaaggccacccccagcgtgagcgtgagcaagaacgtgaacgtgaaggacatcctgagaagcctggtgaacatccccgccgacggcgtgaccgtggaccccgccctgctgccccccgcctgcctgggcgccctgggcgacctgagcgtggagcagcccgtgcagttcagaagcttcgacagaagcgtgatcgtggccgccaagaagagcgccgtgagccccagcaccttcaacaccagcatccccaccaacgccgtgagcgtggtgagcagcgtggacagcgcccaggccagcgacatgggcggcgagagccccggcagcagaagcagcaacgccaagctgcccagcgtgcccaccgtggacagcgtgagccaggaccccgtgagcaacatgagcatcaccgagagactggagcacgccctggagaaggccgcccccctgctgagagagatcttcgtggacttcgcccccttcctgagcagaaccctgctgggcagccacggccaggagctgctgatcgagggcaccagcctggtgtgcatgaagagcagcagcagcgtggtggagctggtgatgctgctgtgcagccaggagtggcagaacagcatccagaagaacgccggcctggccttcatcgagctggtgaacgagggcagactgctgagccagaccatgaaggaccacctggtgagagtggccaacgaggccgagttcatcctgagcagacagagagccgaggacatccacagacacgccgagttcgagagcctgtgcgcccagtacagcgccgacaagagagaggacgagaagatgtgcgaccacctgatcagagccgccaagtacagagaccacgtgaccgccacccagctgatccagaagatcatcaacatcctgaccgacaagcacggcgcctggggcaacagcgccgtgagcagacccctggagttctggagactggactactgggaggacgacctgagaagaagaagaagattcgtgagaaaccccctgggcagcacccaccccgaggccaccctgaagaccgccgtggagcacgccaccgacgaggacatcctggccaagggcaagcagagcatcagaagccaggccctgggcaaccagaacagcgagaacgagatcctgctggagggcgacgacgacaccctgagcagcgtggacgagaaggacctggagaacctggccggccccgtgagcctgagcacccccgcccagctggtggcccccagcgtggtggtgaagggcaccctgagcgtgaccagcagcgagctgtacttcgaggtggacgaggaggaccccaacttcaagaagatcgaccccaagatcctggcctacaccgagggcctgcacggcaagtggctgttcaccgagatcagaagcatcttcagcagaagatacctgctgcagaacaccgccctggagatcttcatggccaacagagtggccgtgatgttcaacttccccgaccccgccaccgtgaagaaggtggtgaactacctgcccagagtgggcgtgggcaccagcttcggcctgccccagaccagaagaatcagcctggccagccccagacagctgttcaaggccagcaacatgacccagagatggcagcacagagagatcagcaacttcgagtacctgatgttcctgaacaccatcgccggcagaagctacaacgacctgaaccagtaccccgtgttcccctgggtgatcaccaactacgagagcgaggagctggacctgaccctgcccaccaacttcagagacctgagcaagcccatcggcgccctgaaccccaagagagccgccttcttcgccgagagatacgagagctgggaggacgaccaggtgcccaagttccactacggcacccactacagcaccgccagcttcgtgctggcctggctgctgagaatcgagcccttcaccacctacttcctgaacctgcagggcggcaagttcgaccacgccgacagaaccttcagcagcatcagcagagcctggagaaacagccagagagacaccagcgacatcaaggagctgatccccgagttctactacctgcccgagatgttcgtgaacttcaacaactacaacctgggcgtgatggacgacggcaccgtggtgagcgacgtggagctgcccccctgggccaagaccagcgaggagttcgtgcacatcaacagactggccctggagagcgagttcgtgagctgccagctgcaccagtggatcgacctgatcttcggctacaagcagcagggccccgaggccgtgagagccctgaacgtgttctactacctgacctacgagggcgccgtgaacctgaacagcatcaccgaccccgtgctgagagaggccgtggaggcccagatcagaagcttcggccagacccccagccagctgctgatcgagccccacccccccagaggcagcgccatgcaggtgagccccctgatgttcaccgacaaggcccagcaggacgtgatcatggtgctgaagttccccagcaacagccccgtgacccacgtggccgccaacacccagcccggcctggccacccccgccgtgatcaccgtgaccgccaacagactgttcgccgtgaacaagtggcacaacctgcccgcccaccagggcgccgtgcaggaccagccctaccagctgcccgtggagatcgaccccctgatcgccagcaacaccggcatgcacagaagacagatcaccgacctgctggaccagagcatccaggtgcacagccagtgcttcgtgatcaccagcgacaacagatacatcctggtgtgcggcttctgggacaagagcttcagagtgtacagcaccgacaccggcagactgatccaggtggtgttcggccactgggacgtggtgacctgcctggccagaagcgagagctacatcggcggcaactgctacatcctgagcggcagcagagacgccaccctgctgctgtggtactggaacggcaagtgcagcggcatcggcgacaaccccggcagcgagaccgccgcccccagagccatcctgaccggccacgactacgaggtgacctgcgccgccgtgtgcgccgagctgggcctggtgctgagcggcagccaggagggcccctgcctgatccacagcatgaacggcgacctgctgagaaccctggagggccccgagaactgcctgaagcccaagctgatccaggccagcagagagggccactgcgtgatcttctacgagaacggcctgttctgcaccttcagcgtgaacggcaagctgcaggccaccatggagaccgacgacaacatcagagccatccagctgagcagagacggccagtacctgctgaccggcggcgacagaggcgtggtggtggtgagacaggtgagcgacctgaagcagctgttcgcctaccccggctgcgacgccggcatcagagccatggccctgagctacgaccagagatgcatcatcagcggcatggccagcggcagcatcgtgctgttctacaacgacttcaacagatggcaccacgagtaccagaccagatactag

SEQ ID NO: 278472 - DNA, 8559 bp, Artificial Sequence
  derived and/or modified sequence
atggcctcagaggacaatagagtgccttccccgccaccgacaggagacgacggaggtgggggcgggcgcgaggaaacccccacggagggtggtgctctgagcctcaagccgggcctcccgattcggggaattcgcatgaaatttgctgtgctcaccgggctggtggaggtcggtgaagtctctaatcgggacatcgtggaaaccgtctttaatttgttggtcggcggtcagttcgatctggagatgaattttattattcaggagggcgaatctatcaattgcatggtggacctgttagaaaagtgcgatataacttgccaagcagaggtgtggagcatgtttactgcgattctgaaaaaaagtatccgcaatctgcaggtgtgcacagaagtgggactggtcgagaaggtcctcggaaaaattgagaaggtcgataacatgatagcagatctgcttgtggatatgctgggtgtgctggccagctacaacctgacagtacgggaactgaaactgttcttttcaaaactccagggggataaagggcgctggcctccccatgccgggaaattgctgtccgtcttgaaacatatgccccagaaatatggcccagacgctttcttcaattttcctggtaagtctgccgcggcaatcgccctgccccctattgcaaaatggccttaccagaacgggttcacgttccatacctggctgaggatggaccctgtaaataatattaatgttgataaagacaaaccttacctgtactgcttccggaccagtaagggattgggatactcagcccatttcgtgggcggatgcctcatcgtcacatctatcaaaagcaaggggaaaggtttccaacactgtgtgaagttcgactttaaacctcagaaatggtatatggttaccatcgtgcacatctataatcgctggaagaatagtgaacttcgatgctacgtcaatggtgaacttgcctcatatggagagatcacttggttcgtgaacactagcgatacattcgacaagtgttttcttggatcttcagagaccgcagacgctaaccgcgtgttttgcggacaaatgacagcagtctatttgttcagtgaggccctgaatgccgcacagatattcgcgatctaccaacttggcctcggctataaggggacattcaaattcaaggccgagtctgacctctttctggctgagcaccacaaactccttctttacgacggcaaactgtctagtgccatcgcctttacctataatcctagggctactgacgctcagctgtgcttagagtcctctccgaaagacaatcctagtatttttgtccactcaccacatgcccttatgctgcaggacgttaaagccgtgctgacccactccatccagtcagcgatgcacagcattggaggggtgcaagtacttttcccactgtttgcccagctggactataggcagtacctatcagatgaaatagatctgaccatctgcagtaccctccttgcgtttataatggaactgctaaaaaatagcatagcaatgcaggaacagatgttggcttgcaaaggttttcttgtgatcggctattcattggagaaatcctcaaaatcccacgtctcccgcgccgttcttgaactatgtctagcattctctaagtacctctctaatttgcaaaacggcatgcccctgctgaaacagctgtgcgaccacgtcctgctgaatccagcaatctggattcacaccccggccaaagtccagctgatgctatacacctatctgagcacggaatttattggcactgtgaacatttacaacactatccgcagagttggaacagtgctgttgattatgcacacactgaagtactactattgggcggtgaacccccaggatcgctctggaattacaccaaaaggtctcgatggcccacgacccaatcagaaagagatgctgtctctccgagcatttctgctgatgttcatcaagcagctggtgatgaaggattctggcgtaaaagaagatgaactgcaggcgattcttaattatctgctgaccatgcacgaggacgataatcttatggatgttctccaacttctggtggctttaatgagcgaacacccaaattctatgattccagcctttgaccaacgcaatggcttgagagtcatctacaagctgctcgctagtaagtcggaagggatccgtgtacaagcactgaaagccatggggtacttcctcaaacaccttgctcctaagaggaaagcagaagtgatgctcggtcacggactgttcagtctgctggctgaaaggctcatgcttcaaaccaatctaatcacaatgactacttataatgttcttttcgaaattctgattgagcagattggcacgcaagtcatacataaacaacaccctgacccagattcctctgtgaagatccagaacccccagatattaaaagtgatcgccacactgctgcggaatagcccacagtgcccagagtcaatggaggttcgtagggccttcttgtctgatatgataaagttgtttaataattctagagagaatcgcagatcccttttgcagtgttctgtgtggcaggagtggatgctgagcctttgttacttcaacccaaagaattctgatgagcaaaagatcacagaaatggtttatgccatatttaggatcctactgtatcatgctgtgaagtatgaatgggggggctggagggtgtgggtggacaccttatccattactcactccaaggttacctttgaaattcataaggaaaatctggcgaacatctttcgggagcagcaaggaaaggtcgacgaggaaataggcctgtgctcaagtacctctgtccaagccgctagcgggatcaggcgcgacatcaacgtgtctgtaggttcccagcagcccgacacaaaagacagccctgtgtgtcctcacttcactactaacggcaatgaaaactcatcgattgaaaagacttccagcctggagtctgcgagcaatatcgaactgcagaccacaaacaccagctacgaggagatgaaggccgaacaggagaaccaggagcttcctgatgaagggaccctggaagagactctgaccaacgagactagaaacgcagacgacctcgaagtgagcagtgatatcattgaggcagtggccattagcagtaactcctttataacgacgggaaaggatagcatgacagtgagcgaggtgaccgcatctatttcaagcccatctgaggaggatgcctctgaaatgccagagtttctggacaaatccatcgttgaggaagaagaggatgatgattatgtagagttaaaggtggaggggagcccaaccgaggaggccaaccttccaaccgagctacaggacaactctttatcacctgccgcctctgaggccggggagaaactggatatgttcgggaacgacgataaactcatcttccaggagggcaagccggttacagaaaagcaaactgacacagaaactcaggattctaaggactctggtatacaaaccatgactgcttccggaagcagtgcgatgtcccctgagacgacagtgtcacagatagcggtcgaatccgatctgggccagatgcttgaggaaggaaagaaggccactaatcttacgcgcgaaactaaattgataaatgattgtcatgggagcgtcagcgaagccagcagcgaacagaaaattgctaaattagatgtgtcaaacgtcgctactgacacagagcgactcgagctaaaggcgagccctaatgtggaggcccctcagccacatagacatgtgttagaaatttcccgccaacacgagcaaccaggacagggcatcgcaccagatgccgtcaatgggcagaggcgtgactcacggagcaccgtgtttaggattcccgagtttaattggagccagatgcatcaaaggctcctcacagatctcctgttttccatcgaaaccgatatccagatgtggaggtcccacagcactaagacagtgatggactttgtgaactcatccgataatgtcattttcgttcacaataccatccatcttatcagccaggtcatggataatatggttatggcatgtggaggaatcctcccattgctgtcagcagcaacatcagccacgcacgagcttgaaaatattgagccaactcaggggctgagcatcgaggcttccgtgaccttccttcaaagactgatcagcctggttgacgtgctgatctttgcttcctcattaggattcactgagatcgaagctgagaagtccatgagcagtggaggtattctccgtcaatgccttaggcttgtgtgcgcagtggcagtgaggaattgcttggagtgccagcaacactcccagctgaaaacgagaggcgataaagccttaaaacccatgcactccctcatccctttggggaaatcggctgcaaagtcgcctgtcgatatcgtgacaggtggaatttcccctgttagggacctggaccgcctgctgcaggacatggatataaatcggcttcgtgctgttgtgtttcgagacatcgaggactcaaaacaagctcagttcctggccctggctgtcgtgtactttatcagcgtgcttatggtctctaagtatagagatattctagagccccagaacgagcggcactcccaatcctgtaccgaaacaggctctgagaacgaaaatgtgtctctgtccgagattacccctgcagcttttagcacactcacaacagcatcagtggaggaatccgagagcacgagttctgcacggagacgggatagtggtatcggggaggagaccgccacaggactaggttcacacgtcgaggtgactccacatacagcacctccaggggtttctgctgggcctgatgcgatcagcgaagtgttgtccaccctgtcactcgaagtcaataaatcccccgagaccaagaatgatagaggtaacgatttggacactaaagcgacaccttccgtatcggtgagtaagaatgttaacgtgaaggatattttgcggagtctggtgaatatacctgccgatggcgtcacagtcgaccccgccctgcttccacccgcctgcctaggggcactcggggatctctcagtggaacaacctgtgcaattcaggtcctttgatcgaagcgtgatcgtcgctgcaaaaaaatccgccgtgtctccatctacattcaacacctctatccctacgaacgccgtgagcgtggtgtcctctgtcgactcagctcaggcctcagatatgggcggcgaatcccccggttcccgcagctccaatgccaagctgccaagtgtcccaaccgtggactctgtaagccaggacccagtgtctaatatgagcattacagaaagactggagcacgcgctcgaaaaggctgcacccctcctgcgggagatatttgtcgactttgcaccgtttcttagtagaaccctgctgggctctcacgggcaggaacttcttatcgaagggacctcactggtgtgcatgaagtctagctcctccgtggtcgagttagtgatgctcctatgctctcaggagtggcagaattccatacagaaaaacgccgggctggcattcatcgagctggtcaacgaaggtcggctcttgtctcaaacaatgaaggatcacttggtacgcgttgccaatgaagctgagttcatactgtctaggcagagagcagaggatattcaccgccatgctgagtttgaatccctgtgtgcccagtactctgccgacaagagagaagacgagaagatgtgcgatcacctcatccgggccgcgaagtatcgtgaccatgtcaccgcgactcagctcatacagaagatcatcaatatcctaaccgacaagcacggggcatgggggaactctgccgtctcacggccgctagagttctggcggcttgactactgggaggacgatttgcggcgaagacgaagattcgtcaggaaccctctgggctcaacccaccccgaagccaccctgaaaaccgccgtggagcacgccaccgacgaagacattctagccaaggggaaacagtccattcgttcccaagcgcttgggaatcaaaatagcgaaaatgagatcctactcgagggagacgatgacacattgagctcagtcgatgaaaaagacctggagaacttagctggtcccgttagcctgagcactcctgcccaacttgtagcaccatctgttgtggtgaagggaacactttccgtcacctcctccgagctgtatttcgaagttgacgaagaggatccgaacttcaagaaaatcgaccctaagatattagcttacaccgaagggttacacggaaaatggcttttcacagagatcagatcgatttttagccgtaggtacttactacagaatacggctctcgaaattttcatggcaaacagggtagcagttatgttcaatttcccggatccagcaaccgtgaaaaaagtggtgaactacctgccgagggtgggcgtcggaacaagcttcgggcttccgcagacccgaagaatttcattggcctcaccccgccagctgttcaaggcttccaacatgacacagcggtggcagcaccgggagattagcaactttgagtacctcatgttccttaataccatcgcaggcagaagctataatgacttaaaccaatatcccgtgttcccctgggtgatcacgaattacgaatctgaggagcttgacctaaccctgccaaccaactttcgcgacctctccaaaccgatcggggccttgaatcccaaacgggctgccttcttcgctgagaggtacgaaagctgggaggacgatcaggtgcccaaattccactatggcacacactactctactgcttcattcgtgctagcctggcttcttcgtatcgaaccattcacaacgtacttcttgaatctacaggggggaaagtttgaccacgctgaccgtaccttcagcagcatcagtcgtgcctggaggaactcccagagagacaccagtgatattaaggagctgattcccgaattctactatctacctgagatgtttgtcaatttcaacaactataacctgggcgttatggatgacggtaccgtcgtgtccgacgtggagctcccaccttgggctaaaacatccgaagagttcgtacacatcaatcgcttggccctcgaatcagagttcgtgtcctgtcaactccatcagtggatcgatttgatcttcggatacaagcaacagggacccgaagctgtccgggccctgaatgtcttctactatctcacctatgaaggtgccgtgaacctgaacagtataactgaccccgtgctcagagaggccgtggaggctcagattcggtcctttggtcaaaccccttctcagttgctcatagaaccgcatcctcccagagggtccgctatgcaggttagtcccctcatgtttaccgacaaagcccagcaggatgtcatcatggtcctgaagttccccagcaacagtccagttacgcatgtagcagccaatacacagcctggcctggctacgcctgctgtgattacggtgactgctaaccgcctgtttgccgtgaacaaatggcacaatctacccgcgcatcagggggcggttcaggaccagccgtaccagttgcccgtggaaatcgacccattgatcgcctcgaatacaggcatgcacagacgacagatcacagatttgttggatcagtccattcaggtgcatagtcagtgctttgttataactagcgacaatcggtacattcttgtgtgtggattctgggacaaatccttcagggtttactccacggacacagggaggcttattcaggtggtgttcgggcactgggatgtggtgacctgcctggcccggtctgaatcatacatcggggggaactgctatatacttagcggctctcgcgacgctacccttctgctctggtactggaacggcaagtgctccgggatcggcgataacccgggcagcgagaccgcggcgcccagagccattctaactgggcatgactacgaggtcacatgcgcagcggtgtgcgcagagctgggccttgtgctttctggtagtcaggagggtccttgtctgattcatagcatgaacggcgacctgctgcgaaccctggaaggtccagaaaattgtctgaaaccaaagctgatacaggcgagtcgtgaggggcactgcgttattttttatgagaatgggctgttctgtactttttcagtaaatggaaagctgcaagccacaatggagacagacgacaatatcagagcaatccagctctccagagacgggcagtatctactcacgggaggtgacaggggtgtcgtcgtggttcggcaggtgagtgacctaaaacagctgtttgcatacccgggatgtgatgctggtatacgcgctatggccctttcctacgatcagcgctgtattatctccggcatggcttccggtagcattgtgctgttctacaacgattttaaccggtggcaccacgagtaccagacaagatattag

SEQ ID NO: 278473 - DNA, 10313 bp, Artificial Sequence
  derived and/or modified sequence
agcactcggcgctgtcatggcggccgggagcagcttcagtgggcacacgacagccgcgcgacccgtggcggggcgagctgtggcagtagcatcctcaccactcgcagcagcctcagccgcggcgcccgtagcgccagcagcggctgcttttgcaaaggctgagcgcaggggcggggcgggccaggaagccatggagttctgtgcagccgcggactcccggggagcggactagggaaacttggaggctgcgaccagggtttggcgttgttgtcagcctcggggagagagattggacaaatattctccaagaggaggagggcgacgccaaggactttccacatcaactgctttggggtatctccacaagttggaagagggaccctttcgttttgcattgcgtgtgttgtgctcattaccagtgcagcgactgccgtcccagggtgactctgagttgtcctttatcgtgagctagcaatggctagcgaagacaatcgtgtcccttccccgccaccaacaggtgatgacgggggaggtggagggagagaagaaacccctactgaagggggtgcattgtctctgaaaccagggctccccatcaggggcatcagaatgaaatttgccgtgttgaccggtttggttgaagttggagaagtatccaatagggatattgtagaaactgtctttaacctgttggtaggaggacagtttgatctggaaatgaatttcattatccaagaaggtgagagtattaactgcatggtggacctactggaaaaatgtgacattacgtgccaagcagaagtctggagcatgtttacagccattctgaagaaaagcatacggaatcttcaagtctgcactgaagtaggccttgttgaaaaagtgcttgggaaaattgaaaaagttgacaatatgatagcagatcttttggttgacatgttgggagtgctggctagctataatttgacagttcgcgagctaaagcttttcttcagtaaacttcaaggagataaaggacgatggcctccacatgctgggaagttgctgtctgtgttaaagcatatgcctcagaagtatggtcctgatgccttttttaactttccaggaaagagtgctgcagctattgcattacctcctatagccaaatggccataccagaatggttttacatttcatacatggcttagaatggatcctgtaaataacatcaatgtagataaggataaaccatatttgtattgtttcagaaccagcaaaggtcttggctattctgctcattttgttggaggctgtttgattgtaacatcaataaagtcaaaaggaaaaggctttcaacactgtgtgaaatttgatttcaagccacaaaagtggtatatggttaccatagtacacatctataaccgatggaagaatagtgaacttcgatgttatgtgaatggtgagctggcttcctatggagagataacatggtttgtcaacactagcgatacctttgacaaatgtttcctgggctcatcagaaacagcagatgctaatagagtattctgtggtcagatgactgcagtttaccttttcagtgaagctctaaatgcagctcagatatttgctatttatcagttgggcctgggatacaagggtacatttaaattcaaagcagaaagcgaccttttccttgctgagcatcacaaacttttattgtacgatgggaaactctctagtgccattgcattcacgtacaatccacgggctacagatgcccagctttgtcttgaatcatctcctaaggacaacccttcaatttttgttcattcaccacatgcactcatgctccaggatgtaaaggcagttttaacacattccatccaaagtgcaatgcattcaattggaggagtacaagtactatttccactttttgcacagttggattacaggcaatatttgtctgatgagattgatttgactatatgttcaaccttgctggcctttatcatggaattgttgaagaactcaattgctatgcaggaacagatgcttgcctgtaagggcttcttggtaataggatatagccttgaaaagtcttccaaatctcatgttagcagagcagtacttgaactttgccttgcattttcaaaatatctgagtaatctgcagaatgggatgcccctgctcaagcaattgtgtgatcacgttcttcttaatcctgccatatggattcataccccagccaaggttcaactgatgctctatacttatctgtccacggaattcattggtacagtcaacatatataacaccattcggagagttggaacagtgcttctcatcatgcacacgctgaagtactactactgggcagtgaatcctcaggatcgaagtggtatcaccccaaaaggattagatggaccgcgacctaatcaaaaagaaatgctttctctacgagcattcttgttgatgttcattaagcaattagtgatgaaggattctggagtaaaggaagatgaattacaggccattcttaattacctactgactatgcatgaggatgacaatctaatggatgtcctacagctgcttgttgcattaatgtcagaacaccctaactctatgattcctgcttttgaccaaaggaatgggttacgtgttatctacaaacttctggcatcgaaaagtgaaggaatcagggtacaagctcttaaggcaatgggttattttttaaaacatctggccccaaagaggaaagcagaagtcatgcttggacatggattgttttcattgctagctgaaaggctcatgcttcagacaaatttaatcacaatgaccacatataatgtgctgtttgagattcttatagaacagattggtactcaggtgatacataaacagcatccagatcctgattcttcagtgaagatacaaaaccctcagatactaaaagtaattgcgaccctacttcgaaattctccccagtgcccagagagcatggaggttcgcagagcctttctttctgacatgattaaactttttaataacagtagagaaaacaggaggagcttgctacaatgctctgtgtggcaagaatggatgctttctctctgctattttaatcctaagaattcagatgagcaaaagataacagaaatggtatacgccatattcagaatcctgctttaccatgcagtcaaatatgagtggggtggctggcgtgtatgggtagacactttatcaatcactcattcaaaggtcacttttgaaatacacaaagaaaaccttgccaatatatttagggaacagcaaggaaaagttgatgaagaaatagggctgtgttcttcaacttcagttcaagcagcctctggcattagaagggatattaatgtttcagtaggatcccagcaaccagatacgaaggattctcctgtctgtcctcatttcaccacaaatggtaatgaaaattcaagtatagagaagacaagttcactagaatctgcatctaatattgaactgcaaactactaatacatcttatgaagaaatgaaagctgagcaagaaaatcaggagttaccagatgaaggcactttggaagaaacactgacaaatgagacaaggaatgcagatgatttagaagtatcttctgacataatagaagctgtggctatttcctctaattcttttataacaactggcaaagattcaatgactgtcagtgaagtaactgcttctataagttctccttcagaagaggatgcctcagagatgccagaattcttggataaatctatagtagaggaagaggaagatgatgattatgtggaactgaaagtagaaggcagtcctactgaggaagctaatctacccacagagctccaagataacagtttgtctccagctgcatctgaagccggtgaaaaactggacatgtttggtaatgatgacaaattaatatttcaagaaggaaaacctgttactgaaaagcaaactgatactgaaactcaagattctaaagattctggaattcagactatgacagcatcagggtcttcagctatgtcaccagaaactactgtttcccaaatagctgtagaatcagaccttggtcagatgctggaggaagggaagaaagcaactaacctcactagagaaaccaaattaattaatgattgtcatggtagtgtctctgaggcttcttctgagcaaaagattgcgaagttggatgtttccaatgttgctacagatactgagaggctggagttgaaggccagtcccaacgtggaagcacctcaacctcatcgacatgtgcttgagatatcaaggcaacatgagcagccagggcaaggaatagcaccagatgcagttaatggacaaaggagggattccagatctactgtgtttcgtattcctgagttcaactggtctcagatgcatcaacgtttgctcactgatctattattttcaatagaaacagatatacagatgtggagaagccattcaacaaagacagttatggacttcgtgaatagcagtgataatgtcatctttgtacacaacacaattcatctcatctctcaagtgatggacaatatggtcatggcttgtgggggtatactgccattgctttcagctgctacatcggctacacatgaactggaaaatattgaacctactcaaggcctttcaatagaagcctctgtgacatttttgcagaggctaattagccttgtggatgtgcttatatttgcaagttctcttggctttactgaaattgaagctgaaaaaagtatgtcatctggaggaattttgcggcagtgtctccgactagtttgtgcagtcgcagtaaggaattgcttggagtgtcaacagcattcacaactgaaaactaggggagataaagccttgaaaccaatgcatagccttattcctttagggaaatctgcagcgaagagcccagtggacattgtgactggcggtatatctccagtaagagatcttgacaggcttctacaggacatggatattaatcggcttagggcagttgttttcagagacatagaggatagcaaacaagctcaatttttagccttggcagtagtatactttatctctgttcttatggtctccaagtacagagacattttggaaccccaaaatgaaaggcatagccagtcatgtacagaaactggcagtgaaaatgagaatgtatcactctctgaaatcacaccagcagcattcagcactttaactacggcatcagtggaagaatctgaaagcacatcatctgctcgaaggagggactcaggcattggggaagaaacagccactggtttaggaagccatgtggaagtaactcctcacacagcacctcctggtgtcagtgcaggcccagatgcaatcagcgaggtgctatctactctttctttagaagtcaataagtctccggaaaccaaaaatgatagaggaaatgacttggacactaaggctacaccgtcagtttcagtttcaaaaaacgtcaatgtgaaagacattctccgaagcttggttaacataccagcagatggagtcacagtggatcctgcccttctgccaccagcctgccttggagcccttggtgatctatctgtggaacaacccgtgcagttcagatcttttgacagaagtgtcattgttgcagcaaaaaagtcagcagtctcaccttccacctttaatacaagcatacctaccaatgctgtcagtgtggtttcctcagtagattcagcccaagcctcagatatgggaggagaatcaccaggcagtagatcatctaatgcaaaattgccctcagttccaacagttgattcagtttcacaagatccggtttcaaatatgagtattacagagaggcttgaacacgctttggaaaaggcagctcctctccttcgtgagatttttgtggattttgcaccttttctttctcggacacttttgggtagccatggacaagaactgcttatagaaggaacaagtctggtttgcatgaagtcgagtagttcagttgtggaattggttatgctactgtgttctcaggagtggcaaaattctattcagaagaatgcaggccttgcttttatcgaacttgtcaatgaaggaaggttgcttagccagacaatgaaggatcatctagtaagagtagcaaatgaagctgaatttatcctgagcaggcagagagcagaagatattcacagacatgcggaatttgagtcactgtgtgcccagtattctgcagacaaacgagaagatgagaagatgtgtgatcatttgataagagcagcaaaatatcgtgaccacgtgacagcaactcaactaatccagaaaattatcaacattctcacagacaagcatggagcctggggaaattctgcagtgagtcgtcctcttgagttctggcgccttgactactgggaagatgacttgcggcgccggcgacgatttgtgcgtaaccctctaggatcgacacatcctgaagcgacactaaaaacagccgtggaacatgccacagatgaagatatccttgctaaaggaaaacagtccatcaggagtcaggctttaggaaatcagaactcagaaaacgagatcctcctggaaggcgatgatgatactctgtcatccgtggatgagaaagatttagagaatcttgccggtcctgttagcctgagcacaccagctcagcttgtggccccctctgttgtagtaaagggcactctttctgtcacctcctccgaactctattttgaggtggatgaagaggatcctaacttcaaaaaaatcgaccccaagatcttggcatatacagaagggctgcatggaaaatggctgttcacagagatacgatcaatcttttctcgtcgttatcttttgcaaaatacagccctggagatctttatggcaaacagagttgctgtgatgttcaacttcccagaccctgcaacagtaaagaaagtggttaactatctacctcgtgttggcgttggaacaagttttggattgcctcaaaccagacgtatttcattagctagtccacgtcagctttttaaggcttctaatatgacccagcgatggcaacacagagagatatctaattttgagtacttgatgtttctcaacacgatagcaggacggagttataatgacttaaatcagtatccagtgtttccttgggtcatcactaattatgaatcagaagaactggatcttaccttgcccaccaacttcagagatttgtccaagccaataggagctctgaacccaaaaagagcagcattcttcgctgagcgttatgaatcatgggaagatgatcaagttccaaagtttcactatggtactcattactcaactgcaagttttgttcttgcatggctgctaagaatagaaccctttacaacttatttcctaaatttgcaaggaggcaaatttgatcatgcagatcgaactttttcatcaatttccagagcttggcgaaacagtcagcgtgatacctctgatattaaggagttgatccctgaattttattatctccctgagatgtttgtcaacttcaataattataatcttggagtgatggatgatgggacagtagtgtctgatgtcgaacttcctccttgggccaaaacctcagaagaatttgttcacataaacagattggccctggagagtgaatttgtttcctgccagcttcaccaatggattgatctcatttttggctataaacagcaaggaccagaagctgtccgagccctcaatgtgttctattacttgacctatgaaggagctgtcaatctgaattcaataactgatcctgtgttgagagaggctgttgaagctcaaatccgaagttttggacagactccttctcaactactcatagagccccatcctcccagaggttctgccatgcaagtgagtccattgatgttcacagacaaagcccagcaggatgttatcatggtcctcaagtttccctccaactcccctgttactcacgtggcagccaacacccagcctggtttggcaactcccgctgtgatcacagtcactgctaacaggttatttgcggtgaacaaatggcacaaccttcctgctcatcaaggtgctgtacaagaccagccataccagctgccagtggaaatcgatcctctcatagccagcaatacaggaatgcacaggaggcaaatcactgaccttttagaccaaagtattcaagtgcattcccagtgctttgtcatcacttcagacaaccgctatattctcgtctgtggcttctgggataaaagtttcagagtctattctacagacacaggaagattgatccaagtggtgtttggccattgggatgtcgtcacttgccttgctcgttctgagtcatatattgggggaaattgctacattctctcagggtcacgtgatgcaactcttttgctgtggtattggaatggaaaatgcagtgggattggagataacccaggcagtgagactgctgctcctcgggccattttgaccggccatgactatgaggtcacatgtgctgcggtgtgtgcggagctaggcctggtgttgagtggttcacaagaaggaccatgtctcatacattccatgaatggagacttgttgaggaccttggagggtcctgaaaactgcctgaaaccaaaactcattcaggcttcaagagagggtcattgtgtcatattctatgaaaacggcctcttctgtacattcagtgtgaatggaaaactccaggccacgatggaaacagatgataacataagagccatccagctgagccgagatgggcagtacctgctcacaggaggagacagaggagtggtcgtggtccggcaggtgtcggacctcaagcagctctttgcctatccaggatgtgacgctggaatccgggccatggcgctgtcttacgaccagaggtgcatcatttctggcatggcttcaggaagcattgtgctattttacaacgactttaaccggtggcatcatgaataccaaacccgctactgatggtgacagctgtacatcaactctgcccctaggatgagcagaagtacctggagcatcattctcttctaccacatctgaatgtaacttaaatttgctcaaagaagcaaaatattttttaaagttattaataattgctatttttgtagtctttgcttgacttttttgggggggattagcaaagcagaaaactggctgctgggttctgtagttttaaaaaatctatatttttagtcataatgagaagtctattttcaccaattatggaaacatacagtggagcaagtaaaccacttattccagctataatattatgaagaacatttcccatgcatctacaagcttgagaaataggattttcacagtggggaagtgggttacaatattggaataggaaaatttgatgctgtaatttgggtcctgtatttttccaaacaactgtgcttcttcagcactaatatttctgggatttaaatagtaatgtttaaattatggtaaatgtaatttaaaacatctcaattaagtctgtctatcaatattgttcttcaagcatgttttagacctagaaaagtatggtttgggggaggctattttattgtgtggttagcacaaggaatctaatttatagcaagtgtgaaatagttaccattttttcctgatctgtcatcttcatagcacaacaaaacgaaatgatggaaatgctcttgagctcacaacatttgtttttcttttaaagtaaatgcaagtaccaaagctcactactgcggtttgcctgtgcctggacaatgaggcggagccactgttgttttgttggggcacccccttccctccccgggtttgcaaatagaggctaccgggtgctgtattcagcaacacctgttttactatttgttattaaactatcatctccaccttccttttgattagcaatttgtactaagaaacgaaacaatgttatttggtggtgtataattctacttttctagtagattactgtgtggaattctgtgaaaaatatttgagaaaaggcctgtattgcataaataaattctttgtatgttgtgaactttgatctctatttctcttgcaacagacttcaagtggtccctctttttttcctacacactcagctcttctctaaaagcaaggatttggaatgaacaattcagtttgacagaaaaagctgaataaaatggcatctgtaattgaattgttggaaatgccttttttgctcctaaattttaaacatcattaataaaataatgattcacaaagaaagaaaa

SEQ ID NO: 278474 - DNA, 8559 bp, Artificial Sequence
  derived and/or modified sequence
atggccagcgaggacaacagagtgcccagccccccacccactggagatgatggcggcggcggcggccgggaggagacccccacagagggcggggccctgagcctgaagccaggcctgcccatccggggcatccgcatgaagtttgctgtgctgaccggcctggtggaggtgggggaggtgagcaacagagacatcgtggagaccgtcttcaacctgctggtgggcggccagtttgacctggagatgaacttcatcatccaggagggggagagcatcaactgcatggtggacctgctggagaagtgtgacatcacctgccaggccgaggtgtggagcatgttcaccgccatcctgaagaagagcatccggaacctgcaggtgtgcacagaggtgggcctggtggagaaggtgctgggcaagattgagaaggtggacaacatgattgctgacctgctggtggacatgctgggcgtgctggccagctacaacctgactgtgcgggagctgaagctgttcttcagcaagctgcagggcgacaagggccgctggccccctcatgctgggaagctgctgtctgtgctgaagcacatgccccagaagtatggcccagatgccttcttcaacttccctgggaagtctgctgctgccatcgccctgccccccatcgccaagtggccctaccagaatggcttcaccttccacacctggctgaggatggaccctgtgaacaacatcaacgtggacaaggacaagccctacctgtactgcttccgcaccagcaagggcctgggctacagcgcccactttgtgggcggctgcctgattgtgaccagcatcaagagcaagggcaagggcttccagcactgtgtgaagtttgacttcaagccccagaagtggtacatggtgaccatcgtgcacatctacaaccgctggaagaacagcgagctgcgctgctacgtgaatggagagctggccagctatggagagatcacctggtttgtgaacaccagtgacacctttgacaagtgcttcctgggcagcagcgagacagcagatgccaacagagtcttctgtggccagatgacagctgtgtacctgttcagcgaggccctgaatgctgcccagatctttgccatctaccagctgggcctgggctacaagggcaccttcaagttcaaggccgagagtgacctcttcctggccgagcaccacaagctgctgctgtatgatggcaagctgagcagcgccatcgccttcacctacaacccccgggccacagatgcccagctgtgcctggagagcagccccaaggacaaccccagcatctttgtgcacagcccccacgccctgatgctgcaggatgtgaaggctgtgctgacccacagcatccagagcgccatgcacagcatcggcggcgtgcaggtgctcttccccctgtttgcccagctggactaccggcagtacctgagtgatgaaattgacctgaccatctgcagcaccctgctggccttcatcatggagctgctgaagaacagcatcgccatgcaggagcagatgctggcctgcaagggcttcctggtgattggctacagcctggagaagagcagcaagagccacgtgtccagagctgtgctggagctgtgcctggccttcagcaagtacctgagcaacctgcagaatggcatgcccctgctgaagcagctgtgtgaccacgtgctgctgaacccagccatctggatccacaccccagccaaggtgcagctgatgctgtacacctacctgagcacagagttcatcggcaccgtgaacatctacaacaccatcagaagagtgggcaccgtgctgctgatcatgcacaccctgaagtactactactgggccgtgaacccccaggacaggagcggcatcacccccaagggcctggatggcccccggcccaaccagaaggagatgctgagcctgcgggccttcctgctgatgttcatcaagcagctggtgatgaaggacagcggcgtgaaggaggatgagctgcaggccatcctgaactacctgctgaccatgcatgaagatgacaacctgatggatgtgctgcagctgctggtggccctgatgtctgagcaccccaacagcatgatcccagcctttgaccagagaaatggcctgcgggtcatctacaagctgctggccagcaagtctgagggcatccgggtgcaggccctgaaggccatgggctacttcctgaagcacctggcccccaagaggaaggccgaggtgatgctgggccacggcctcttcagcctgctggccgagcggctgatgctgcagaccaacctgatcaccatgaccacctacaacgtgctgtttgagatcctgattgagcagatcggcacccaggtgatccacaagcagcacccagaccctgacagctctgtgaagatccagaacccccagatcctgaaggtgattgccaccctgctgaggaacagcccccagtgcccagagagcatggaggtgagaagagccttcctgagtgacatgatcaagctgttcaacaacagcagagaaaatagaagaagcctgctgcagtgcagcgtgtggcaggagtggatgctgagcctgtgctacttcaaccccaagaacagtgatgagcagaagatcacagagatggtgtatgccatcttccgcatcctgctgtaccacgctgtgaagtatgagtggggcggctggagggtgtgggtggacaccctgagcatcacccacagcaaggtgacctttgagatccacaaggagaacctggccaacatcttccgggagcagcagggcaaggtggatgaggagatcggcctgtgcagcagcacctctgtgcaggccgccagcggcatccggcgggacatcaacgtgtctgtgggcagccagcagcctgacaccaaggacagccctgtgtgcccccacttcaccaccaatggaaatgaaaacagcagcattgagaagaccagcagcctggagagcgccagcaacatcgagctgcagaccaccaacaccagctatgaggagatgaaggccgagcaggagaaccaggagctgcctgatgagggcaccctggaggagaccctgaccaatgagaccagaaatgctgatgacctggaggtgtccagtgacatcattgaagctgtggccatcagcagcaacagcttcatcaccaccgggaaggacagcatgacagtgtctgaggtgacagccagcatcagcagccccagcgaggaggatgccagcgagatgcctgagttcctggacaagagcatcgtggaggaggaggaggatgatgattatgtggagctgaaggtggagggcagccccacagaggaggccaacctgcccacagagctgcaggacaacagcctgagccctgctgccagcgaggccggggagaagctggacatgtttggaaatgatgacaagctgatcttccaggagggcaagcctgtgacagagaagcagacagacacagagacccaggacagcaaggacagcggcatccagaccatgacagccagcggcagcagcgccatgagccctgagaccaccgtgtcccagattgctgtggagagtgacctgggccagatgctggaggagggcaagaaggccaccaacctgacccgggagaccaagctgatcaatgactgccacggctctgtgtctgaggccagcagcgagcagaagatcgccaagctggatgtgtccaatgtggccacagacacagagcggctggagctgaaggccagccccaacgtggaggccccccagccccaccgccacgtgctggagatcagccggcagcacgagcagcccggccagggcatcgccccagatgctgtgaatggccagaggcgggacagccgcagcaccgtcttccgcatccctgagttcaactggagccagatgcaccagaggctgctgacagacctgctcttcagcattgaaacagacatccagatgtggaggagccacagcaccaagacagtgatggactttgtgaacagcagtgacaacgtcatctttgtgcacaacaccatccacctgatcagccaggtgatggacaacatggtgatggcctgtggcggcatcctgcccctgctgtctgctgccaccagcgccacccatgagctggagaacatcgagcccacccagggcctgagcattgaggcctctgtgaccttcctgcagaggctcatcagcctggtggatgtgctgatctttgccagcagcctgggcttcacagaaattgaggccgagaagtccatgagcagcggcggcatcctgcggcagtgcctgcggctggtgtgtgctgtggccgtgaggaactgcctggagtgccagcagcacagccagctgaagaccaggggggacaaggccctgaagcccatgcacagcctcatccccctgggcaagtctgctgccaagagccctgtggacatcgtgactggaggcatcagccctgtgcgggacctggaccggctgctgcaggacatggacatcaaccggctgcgggctgtggtgttccgggacatcgaggacagcaagcaggcccagttcctggccctggccgtggtgtacttcatctctgtgctgatggtgtccaagtacagagacatcctggagccccagaatgaaagacacagccagagctgcacagagaccggctctgaaaatgaaaatgtgtccctgtctgagatcaccccagctgccttcagcaccctgaccacagcctctgtggaggagagcgagagcaccagcagcgcccggcggcgggacagcggcattggagaggagacagccaccggcctgggcagccacgtggaggtgaccccccacacagcccctcctggggtgtctgctggcccagatgccatcagcgaggtgctgagcaccctgagcctggaggtgaacaagagccctgagaccaagaatgacagaggaaatgacctggacaccaaggccaccccatctgtgtctgtgtccaagaatgtgaatgtgaaggacatcctgcggagcctggtgaacatcccagcagatggagtgacagtggaccctgccctgctgcccccagcctgcctgggcgccctgggggacctgtctgtggagcagcctgtgcagttccgcagctttgacagatctgtgattgtggccgccaagaagtctgctgtgagccccagcaccttcaacaccagcatccccaccaatgctgtgtctgtggtgtcctctgtggacagcgcccaggccagtgacatgggcggggagagccctggcagccgcagcagcaatgccaagctgcccagcgtgcccaccgtggacagcgtgtcccaggaccctgtgagcaacatgagcatcacagagcggctggagcacgccctggagaaggccgcccccctgctgcgggagatctttgtggactttgcccccttcctgagcaggaccctgctgggcagccacggccaggagctgctgattgagggcaccagcctggtgtgcatgaagagcagcagctctgtggtggagctggtgatgctgctgtgcagccaggagtggcagaacagcatccagaagaatgccggcctggccttcatcgagctggtgaatgaaggccgcctgctgagccagaccatgaaggaccacctggtgcgggtggccaatgaagctgagttcatcctgagccggcagagagctgaggacatccacagacatgctgagtttgagagcctgtgtgcccagtacagcgctgacaagcgggaggatgagaagatgtgtgaccacctgatccgggccgccaagtacagagaccacgtgacagccacccagctgatccagaagatcatcaacatcctgacagacaagcatggagcctggggcaacagcgctgtgtcccggcccctggagttctggaggctggactactgggaggatgacctgcggaggagaagaagatttgtgaggaaccccctgggcagcacccaccctgaggccaccctgaagacagctgtggagcacgccacagatgaggacatcctggccaagggcaagcagagcatccgcagccaggccctgggcaaccagaacagtgaaaatgagatcctgctggagggagatgatgacaccctgagctctgtggatgagaaggacctggagaacctggccggccctgtgtccctgagcaccccagcccagctggtggcccccagcgtggtggtgaagggcaccctgtctgtgaccagcagcgagctgtactttgaggtggatgaggaggaccccaacttcaagaagattgaccccaagatcctggcctacacagagggcctgcacggcaagtggctgttcacagagatccgcagcatcttcagccgccgctacctgctgcagaacacagccctggagatcttcatggccaacagagtggccgtgatgttcaacttcccagaccctgccaccgtgaagaaggtggtgaactacctgccccgggtgggcgtgggcaccagctttggcctgccccagacccggcgcatcagcctggccagcccccggcagctgttcaaggccagcaacatgacccagcgctggcagcaccgggagatcagcaactttgagtacctgatgttcctgaacaccatcgccggccgcagctacaatgacctgaaccagtaccctgtgttcccctgggtgatcaccaactatgagagcgaggagctggacctgaccctgcccaccaacttccgggacctgagcaagcccatcggggccctgaaccccaagagagctgccttctttgctgagagatatgaatcctgggaggatgaccaggtgcccaagttccactacggcacccactacagcacagccagctttgtgctggcctggctgctgagaattgagcccttcaccacctacttcctgaacctgcagggcggcaagtttgaccatgctgacaggaccttcagcagcatcagccgggcctggaggaacagccagagggacaccagtgacatcaaggagctgatccctgagttctactacctgcctgagatgtttgtgaacttcaacaactacaacctgggcgtgatggatgatggcaccgtggtgtctgatgtggagctgcccccctgggccaagaccagcgaggagtttgtgcacatcaaccggctggccctggagagcgagtttgtgtcctgccagctgcaccagtggattgacctgatcttcggctacaagcagcagggccctgaggccgtgcgggccctgaatgtgttctactacctgacctatgagggcgctgtgaacctgaacagcatcacagatcctgtgctgcgggaggccgtggaggcccagatccgcagctttggccagacccccagccagctgctgattgagccccaccccccccggggcagcgccatgcaggtgagccccctgatgttcacagacaaggcccagcaggacgtcatcatggtgctgaagttccccagcaacagccctgtgacccacgtggccgccaacacccagcccggcctggccaccccagctgtgatcaccgtgacagccaacagactctttgctgtgaacaagtggcacaacctgcctgcccaccagggcgctgtgcaggaccagccctaccagctgcctgtggagattgaccccctcatcgccagcaacacaggcatgcaccggcggcagatcacagacctgctggaccagagcatccaggtgcacagccagtgcttcgtcatcaccagtgacaaccgctacatcctggtgtgtggcttctgggacaagagcttccgggtgtacagcacagacaccggccgcctcatccaggtggtgtttggccactgggatgtggtgacctgcctggcccggtctgagagctacatcggcggcaactgctacatcctgagcggcagcagagatgccaccctgctgctgtggtactggaatggaaaatgttctggaattggagacaaccctggcagcgagacagctgccccccgggccatcctgactggacatgactatgaggtgacctgtgccgctgtgtgtgccgagctgggcctggtgctgagcggcagccaggagggcccctgcctgatccacagcatgaatggagacctgctgcggaccctggagggccctgagaactgcctgaagcccaagctgatccaggccagccgggagggccactgtgtgatcttctatgaaaatggcctcttctgcaccttctctgtgaatggcaagctgcaggccaccatggagacagatgacaacatccgggccatccagctgagcagagatggccagtacctgctgactggaggagaccggggcgtggtggtggtgcggcaggtgtctgacctgaagcagctgtttgcctacccaggctgtgatgctggcatccgggccatggccctgtcctatgaccagcgctgcatcatcagcggcatggccagcggcagcatcgtgctcttctacaatgacttcaaccgctggcaccacgagtaccagacccgctactag

SEQ ID NO: 278475 - DNA, 8559 bp, Artificial Sequence
  derived and/or modified sequence
atggccagcgaggacaaccgggtgcccagccccccccccaccggcgacgacggcggcggaggcggcagggaagagacaccaactgaaggtggggcccttagcttgaaaccggggttgccgatccgcggcatccgcatgaaatttgccgtgttgactggcctggtggaagtgggggaggtgtccaatagggatatcgtagaaaccgtttttaatcttctcgttggcggccagttcgatctggaaatgaatttcatcattcaggagggtgagtcaatcaactgtatggttgatctgctggagaaatgcgatattacatgccaagccgaagtgtggagcatgtttacagcaattctcaagaagtctatcagaaatctgcaggtgtgtacagaggttggactggtggaaaaagtgctgggcaaaattgagaaggttgataatatgatagccgatctactggtggacatgctgggcgtcctcgctagctataatctaacggtccgtgaattgaaactctttttctcaaagcttcagggcgacaagggccggtggcccccacatgccggcaagctattaagtgtgctcaagcacatgccacagaagtacggtccagacgccttttttaacttccctggtaagtcagccgcggccatcgcacttcccccgattgcaaaatggccgtatcagaacggattcaccttccacacctggctgagaatggacccagtcaacaacatcaacgtggacaaggacaagccatatctgtattgcttccgcacctccaaaggactggggtattcagcacattttgtgggagggtgcttgattgtaacatcgatcaaatcaaaaggcaaagggttccagcattgtgtaaagtttgacttcaaacctcaaaagtggtacatggtgacaattgtgcatatttataaccgctggaagaacagcgagctgagatgttacgtcaacggggaactcgcatcctacggagagatcacctggttcgtgaacaccagcgacaccttcgacaagtgctttttaggcagttcggaaactgcagatgccaacagggtcttttgtggccagatgactgccgtatatctcttcagtgaagccttgaacgccgcccagatctttgctatttaccagctcgggctaggatacaagggtacctttaaattcaaggcagaaagcgatctgttcctcgccgaacaccataaattgcttctgtacgatgggaagctttcctccgcaattgcattcacttacaatcccagggcaaccgacgcccagctttgcttagagtcctcacccaaagataatccatccattttcgtccactctcctcatgcccttatgttgcaggacgtgaaggctgtactgacgcatagtattcagtctgctatgcacagtatcggcggagtgcaagtattgtttccgttgttcgcccagctagactataggcagtatctgtctgacgagattgatttgactatctgcagcaccctgctggctttcattatggagttgcttaagaattctatcgccatgcaggagcagatgctcgcatgcaaggggttcctggtgatagggtattccctggagaaatcctctaaaagccacgtaagccgcgccgtcttagagttgtgtctggctttctcaaagtatctgtccaacctgcaaaatggaatgcctctgttaaagcagttgtgtgaccacgtgctcctgaaccccgcaatttggatccacacacctgccaaagtccagctcatgctgtacacgtatctcagtacagaattcatcgggacagttaatatatacaacacgattaggagggtcgggacagtgttgttgataatgcacaccttaaaatactattactgggcagtgaacccccaggaccgcagcgggatcaccccgaaagggctggatggaccaaggccaaaccagaaggagatgcttagtctgcgcgccttcctcctgatgttcattaagcagctagtgatgaaggactccggagtgaaagaggacgagctccaggccatcctgaactacctgctaactatgcacgaagacgacaatctgatggacgtgcttcagcttcttgttgcactcatgagcgaacaccctaactcgatgatcccggctttcgaccagcggaatggcctgagggttatctacaagttacttgcctctaagtccgagggcatccgggttcaggcattaaaggcaatgggatatttcctgaaacatctggcgccaaagaggaaggcggaagttatgctgggacacggcttgttctcacttctggctgaaagactgatgctgcagacaaacctcatcactatgacaacatataacgtcctctttgagatcctcatcgagcagattggaacccaggtgatccataaacagcacccagaccctgacagttctgtaaagatccaaaatcctcagatcctaaaggtgatcgcgacccttctacgaaatagcccgcagtgcccagaatcaatggaggtgagacgggcgttcctttcagacatgatcaagttgtttaacaacagtagagaaaatcggcgctcactgctgcagtgcagtgtctggcaggagtggatgttgagtctctgttactttaaccctaagaactccgatgaacagaaaattacagaaatggtgtacgctatatttcgaattcttctataccacgccgttaaatatgagtgggggggctggagggtctgggtggataccctttccattacacattcaaaggtgacgtttgagattcataaggagaacctggcaaacatctttcgggagcagcagggaaaagtggacgaagagattgggctgtgttcttcgaccagcgtccaagccgcctcagggattcgcagggatataaatgtgagtgtaggatcccagcaacccgataccaaggattctcctgtctgcccccacttcaccaccaatggaaacgagaactcatccatcgaaaagactagctcccttgagagtgccagtaacatcgagctgcaaaccacaaacacatcttacgaagaaatgaaggctgaacaagagaatcaggaactcccggacgagggaaccctcgaggagactttgacgaacgagactagaaacgcagacgatctcgaggtgtcaagtgacattatcgaagcggttgccatttcatcaaatagtttcattaccaccggtaaggactctatgacggtcagtgaggttacagcgagtatcagtagcccctccgaggaagacgcctcagaaatgcctgagttcttggacaagagcatcgtcgaggaggaagaagacgatgattacgttgaactgaaggtggagggcagcccaactgaagaggcaaatttgcccacagaactccaagataatagcctcagtcccgccgcaagtgaagccggcgagaagcttgatatgtttgggaatgacgataaacttatcttccaagagggcaagcccgtgaccgagaagcaaaccgataccgaaacgcaagattccaaggactcaggcatccagactatgaccgcatctgggtcctctgccatgtcaccggagacgaccgtgtctcagatagcggtggagagtgacctcggccaaatgctcgaagaaggtaaaaaggccacaaatctcacacgagagacaaaactgatcaacgattgtcacgggagtgtgtctgaggcctcatccgagcaaaaaatagctaagctggacgtgtctaacgtggcaacagatactgagcgcctggaattaaaggccagccctaacgtggaagccccacagcctcatcggcacgtactcgagatttcccgtcagcatgagcaacccggccaagggatcgccccagatgctgtgaatgggcagaggcgagatagcaggagcaccgtattcagaataccagagttcaactggagccagatgcaccaaaggttgctgaccgacctgttattctccatcgagaccgacattcagatgtggcgcagccattcaactaaaaccgttatggacttcgtcaactcctctgacaacgtcatttttgtccacaatacaatccatctcatctcacaggtcatggataacatggtcatggcttgtgggggcattttgcctttactgagcgccgccacctcagccacccacgaacttgaaaacattgaaccaacacagggactcagcatcgaggccagcgtgacgttcttacaaaggctgatctccctcgtagacgtgttaatattcgcctcaagtctgggcttcaccgaaatcgaggctgagaaatctatgtcctctggtggcattctccgtcaatgtttaaggctagtctgtgccgtggcagtgagaaattgtttagagtgccagcaacattctcaactgaaaacccgcggggacaaggccttgaaacccatgcacagcctcatccctctgggaaaaagtgccgctaaatccccagtggatattgtcacggggggcatctcaccagtgcgtgatctcgatagactgttacaagatatggatattaacagattgagggcagtggtattcagagacatcgaggattctaagcaagctcagtttctggctctcgctgtcgtctacttcatatcggttttaatggtctccaaatacagagacattctggagccacagaatgaaagacacagccaaagttgtactgagactgggtctgaaaacgagaatgtcagcttaagtgaaatcacacccgccgcattcagcaccctaacaaccgcctcagtggaggagtcggaatctacttcctcagcccggaggcgggacagtggtattggggaggaaactgctactgggttgggctcccacgtagaggttacaccccacaccgctcctcccggcgtaagcgctggccctgacgctatatccgaggtgttatccactttgtcactggaggtgaacaagtctcccgagaccaaaaatgacagaggcaatgacctcgatacaaaagcaaccccaagcgtctctgtttctaagaatgtgaatgtgaaagacattctacgcagcctggtgaacattcccgccgatggggttactgtggaccctgcattgctgcccccagcctgcctgggggctctaggagacctaagcgtagaacagcctgtgcaatttcggagcttcgataggagcgtgattgtggccgctaagaaaagtgcggtgtcaccaagcacattcaacacctccatacccacgaatgccgtgtccgtggtgagcagcgtggacagcgcacaggcctcagatatgggaggcgaaagtcccgggtcacggtcctcaaacgccaagctaccgagtgttccaacggttgactcagtgtctcaggaccctgtttctaatatgtccataaccgaacgcctcgaacatgctctagagaaagctgcccccctgctaagggagatctttgttgattttgccccctttctgtcccggaccctgctcggcagccacgggcaggaattgctgatcgagggtacctctctggtttgtatgaaaagcagttccagcgtggtagagctggttatgttgctgtgttcacaagaatggcaaaactccatccagaagaacgctggcttggccttcatcgagctagtgaacgaaggtcgtctgttatcacaaactatgaaagatcatctggtgagggtagccaatgaggccgagtttatactgtccagacagcgggcagaggacatccacaggcatgcagagttcgagagtctgtgtgcccagtattcagccgacaagcgggaggacgagaagatgtgtgaccaccttattcgcgcggcaaagtaccgagaccacgtgacagctacccagctcattcagaaaattattaatatattgaccgataaacatggcgcatggggaaatagcgccgtcagcaggcccttagagttctggcgacttgactactgggaagacgatcttcggcgtagacggcgcttcgtgcgtaatccgttagggtcaacccatccagaggccaccttgaagactgcggttgagcacgccacagatgaagacatcctggccaagggcaagcagagcataaggagccaagccctgggtaatcaaaatagcgagaatgaaattcttctagaaggtgacgacgataccctctccagtgtagacgagaaagacttggaaaacctggctggccccgtgtctctctccaccccggcccagctggtggcaccctcagtggtcgtcaaaggcaccctgagtgtcacgtcgtctgaactgtacttcgaggtggacgaggaggacccaaactttaagaaaatcgacccaaagatactcgcctacaccgaggggctgcacggaaaatggctctttacagagatccgaagtatcttctctagacggtacctgttacagaacactgcactggagatcttcatggccaatcgagtggctgtgatgttcaactttccagacccagccaccgtgaaaaaagtcgtgaattaccttcctcgtgttggagtgggcacgtcatttggactgccgcagacgcgccgtatctccttagcaagcccacgccagcttttcaaagccagcaatatgacacagcgatggcagcaccgggaaatctctaacttcgagtaccttatgttcctcaatacgattgccgggcggagttacaatgatctcaatcagtaccccgtgttcccctgggtgatcaccaattatgaatctgaagaactcgatctgactctcccgacaaactttcgcgatctgtctaaacctataggagcgctaaatcccaaacgggcagcttttttcgcagaaagatacgaatcatgggaggacgaccaggtgccaaagttccactacgggacacattactctacggccagcttcgttttagcatggctcctgcggatcgagccgttcacaacatattttctcaatttacagggtggcaagttcgatcatgcggatcggacattttcatctataagtcgggcctggcgcaactcccagcgcgacacctcagatattaaggagttgatccctgagttctattacttacccgaaatgttcgtgaacttcaataattataacctcggcgtgatggatgacgggaccgtcgtgagcgatgttgagcttcctccttgggccaaaacctctgaagaattcgttcatatcaatagactggctctggagtccgagtttgtgagctgccagttacaccaatggattgatctgatttttggctacaagcagcagggtcctgaagccgttagagccttgaacgttttctattatttaacatacgaaggtgccgtgaatctaaacagtattaccgacccggtactgcgtgaggccgtggaggcccagatccgcagtttcggacaaaccccaagccagcttctcatagagccccacccacccagaggaagcgcgatgcaggtctctcctctcatgtttacagataaagcacaacaagatgtgatcatggttttgaaatttccatccaattcacctgttacccacgtggctgccaatacccaacctggtctggccacccccgccgtgattaccgttacagcgaatcggttgtttgccgttaacaagtggcataacttgcctgcgcaccagggagctgttcaagatcaaccctaccagctgcccgtggagatcgatcccttaattgcttctaatacaggaatgcaccgtcggcaaattactgatctgctggatcagagcatacaagtgcacagccagtgcttcgttatcacaagtgacaaccgatacattctagtatgtggcttctgggataaatccttcagggtgtactcaacagatacaggtcgcttgatacaggtggtgtttgggcactgggatgttgtgacatgcctggccaggagtgagagctatattggaggcaattgttatatattgtccggcagtcgcgacgcaacgctgcttttgtggtattggaacggcaagtgcagcggcattggcgacaaccccggatccgagacagccgctccacgcgccatcctaactggacatgattatgaagtcacttgcgctgcagtttgcgctgaactgggtcttgttttgagtggttcccaagagggaccatgtctcatccattccatgaatggcgatcttctccgtacactggaaggcccagagaactgtctcaaacctaagctcattcaagccagcagagagggtcactgtgtaatcttttacgagaacggcctcttctgcactttttcggtgaacggcaaactccaggcgactatggagactgatgataatatccgcgccatccagctgtcccgagacggccagtatctgttgaccggtggggaccgcggagtggttgttgtcagacaagtcagcgacttaaagcagttgttcgcctacccgggttgcgatgccggaatcagagcaatggccctgagttacgatcagagatgtatcatcagcgggatggctagtggaagtattgtgctgttttacaatgatttcaaccgctggcaccacgaataccagacccgctattag

SEQ ID NO: 278476 - DNA, 8558 bp, Artificial Sequence
  derived and/or modified sequence
atggcttctgaggacaatcgtgtacccagtccccctcccactggggatgacggaggcggagggggacgggaggagactcccaccgaggggggagcactttctctcaaaccgggattacccattagaggaattcgaatgaaatttgctgtcttgaccggccttgtagaggtcggtgaggtctcaaacagggatatagtcgagacagtgtttaatctcctagtcggcggacaattcgatctcgagatgaacttcatcatccaagaaggcgaatccatcaattgcatggtcgacctgctagagaaatgtgacatcacatgtcaggcagaagtctggtctatgttcaccgcaattctgaagaaaagcattaggaatttacaggtgtgtaccgaagttgggcttgtcgagaaagtgctgggcaagatcgagaaggtggacaatatgatcgcggacctattagtggacatgctgggcgttctggcctcatacaacttgacagtgcgagaactgaaattatttttctcaaaattgcagggcgataaaggaagatggccaccccacgcagggaaactgttaagcgtgctcaagcatatgcctcagaaatatggccctgatgcgttcttcaattttcccggaaaatctgccgctgctatcgcgcttcccccaatagccaagtggccgtaccagaacggctttacctttcacacctggctcagaatggatcccgttaacaatatcaacgtggacaaggacaaaccgtatctctactgtttccggacctccaaaggccttggatactccgcacactttgtgggaggctgcttaatcgttaccagcataaagagcaaaggaaaggggtttcagcattgtgtgaagttcgatttcaaaccccaaaagtggtacatggtgaccatcgtgcacatttataaccgctggaagaactcggaactgcgatgctacgtgaatggcgagctggcctcttacggggaaataacctggttcgtcaataccagcgacacgttcgataagtgttttctcggcagtagtgaaaccgctgacgctaatcgtgtgttttgcgggcagatgaccgccgtctacctgttttctgaagcgctgaatgccgctcagatctttgcaatctaccagctcggtcttggttataaaggtacctttaagtttaaagccgagagcgatttgttcctggcagagcatcacaagctgctgctctacgatggcaaactgagttctgccatcgcgttcacttataaccctcgggctaccgacgcacagctgtgtctggaaagtagccctaaggacaatcctagcattttcgtccacagtccacacgctctgatgttacaggacgttaaagcagtcctgacacattctattcagagtgctatgcactcaataggcggagtccaggtgctgtttccactctttgctcagttggactaccgacaatacctgagtgacgagatcgatctcacaatttgcagtactttgctcgcctttatcatggaactgcttaaaaactccattgcgatgcaggagcaaatgctggcatgtaaggggtttctggtcatcgggtactcccttgagaaaagctctaagagccacgtgagcagggcagtgttagagttgtgtctggccttttctaaatacctgtcaaatctacagaacgggatgccgctgttgaagcagctttgtgaccatgtgttgctgaatcccgctatttggatccatacacccgcaaaggtacagttaatgctctatacttacctcagcaccgagtttataggaacagtaaatatctataacaccatccgtagggttgggactgtcctgctcatcatgcacaccctaaagtattactactgggctgttaaccctcaggataggtctggtattacaccaaagggcctagatgggcctagacccaaccaaaaggaaatgttgtcgctgagggcgttcttgctgatgtttattaaacagttggtaatgaaggactctggtgtcaaggaggacgaactgcaggccatcctgaattatctgctgacaatgcatgaggacgacaatctgatggatgtgctgcagctgctagttgctctgatgagcgagcatccgaacagcatgattcccgcattcgaccagagaaacggtttgagagtgatttataaactgttggccagcaaatctgaaggaatccgcgtgcaggccttgaaagccatgggttacttccttaagcatctggccccaaagcgcaaagctgaagtaatgctgggacacggactcttttcccttcttgcagagaggctgatgctccagacgaacttgatcacgatgacaacgtacaatgtgttatttgagattctcatcgaacagatagggacacaggtgatccataagcaacacccagacccggattcctccgtgaagattcagaatcctcagatcctcaaggtgatcgctacgttgctgcgcaactccccccagtgtcctgagtcaatggaagtgaggagggcctttctgagcgacatgattaaactctttaacaacagtagggaaaatcgccgtagcctgctgcaatgctccgtctggcaggaatggatgttatctctatgctatttcaatccaaaaaattcggacgaacagaaaatcacggaaatggtgtacgctatatttcggatcctgttatatcacgctgtgaaatacgaatggggaggctggagggtttgggttgataccttaagcatcacccattccaaagtgacttttgagattcataaggaaaacctggccaatatcttcagagaacagcagggcaaagttgatgaggagataggtctgtgtagcagcacgagtgtgcaggccgcttccgggatccgtcgggacattaatgtatctgttgggtctcaacaacccgacaccaaagactcccccgtgtgcccacactttactacgaatggcaatgagaatagctctattgaaaaaacatcttctctggagagtgctagcaatatagaacttcagaccaccaacaccagttacgaagaaatgaaggctgagcaggagaatcaggagctgcctgacgagggaacattggaagagacacttaccaacgaaacccgtaatgccgacgacctagaggttagctccgatattattgaagctgtcgctatcagcagcaatagttttataacaaccgggaaggacagtatgaccgtgtcagaagtgactgcatccatatcatccccttctgaggaggacgctagcgaaatgcccgagttcctcgacaagtcaatagtggaagaggaggaggacgacgattacgttgaactcaaggttgaagggtcccccaccgaagaggctaatctacccactgagctccaggataactctctgtctccagctgctagcgaggcaggagaaaagttggatatgttcgggaatgatgataaacttatatttcaggaaggaaagcctgttacggaaaagcagactgatacggaaacccaagactctaaagactcaggtatccaaacaatgacagcctctggctcctccgccatgagccccgagaccactgtgagtcagattgctgtcgagtcagacttggggcagatgctggaagaggggaaaaaagctacaaaccttaccagggagacaaagctcatcaacgactgtcatgggtccgtgtccgaggcctcctctgagcagaaaattgctaagctggatgtgagcaatgtggccacagacaccgagcgtctcgagcttaaggcttcccctaacgtcgaggccccacagcctcaccggcacgttcttgaaatctcgaggcagcatgaacaacctggacaggggattgctcctgatgctgtaaatggccagaggcgggacagtcgatcaactgtgtttaggatccccgagttcaactggagccagatgcaccagagactgctaaccgaccttctttttagtatcgaaactgacatacagatgtggaggagccactctacgaagactgttatggacttcgtgaattctagcgataatgttattttcgtacacaatacgattcatctgatttcccaggttatggacaatatggtcatggcgtgtgggggaattctgcccctcctgtctgccgctacctcagctacccacgaattggaaaatattgaacctacccagggattatcgattgaggccagtgtcaccttcctccagagactgattagtttggtggacgttctgattttcgcttctagtctgggattcaccgagatcgaagcagaaaagtctatgagcagcggcggtatactgaggcagtgtctccggcttgtgtgcgcagtggctgtccggaattgtttggagtgccagcaacactcccaactgaagacccgtggagataaggctctgaagccaatgcattcattgattccactcgggaagtccgctgccaaaagccccgttgatatagttacggggggaatttcacccgtcagggacctcgatagactgctgcaggatatggatattaacagacttcgggctgtagtgttccgagacattgaggactcgaaacaggcacagttcttggctctggcagtggtctactttatttcggtactgatggtgtctaaatacagagacatactggaaccacaaaacgaacgccacagccagtcttgcaccgagaccggttccgagaatgaaaacgtgtccttgtcagagatcacaccggcagccttcagcaccctcactacagcgagtgtagaggagtccgagagtacaagtagcgctcgacgacgggactctgggattggcgaagaaactgccacaggactggggagccacgtggaggtcaccccacatacagctcctccaggagtgagcgccggacccgatgctatttcagaggtccttagcacactttcgttagaagtgaataaaagcccagagacaaaaaacgaccgcggaaacgaccttgacacaaaagctaccccaagcgtgtccgtgagtaagaatgttaacgttaaagacattctgaggagtctcgtgaacattcctgcagacggcgtcacagtggacccagctttacttcctcccgcatgcttaggcgctcttggggacctgtctgtagagcagcctgttcaattcagatcctttgatcgcagtgtgattgttgctgccaaaaaaagcgccgtgagtccgagcacattcaacacttccatcccgactaatgctgtaagcgtagtgtcctcagttgattcggcacaggcctcagacatgggaggggaaagccccggtagtcggtccagcaacgctaaactgccctcagtgcccacagtggactcggtcagccaggacccggtcagcaatatgtcaatcaccgaaagactggaacacgccctcgaaaaggccgctccattgctaagagagatctttgttgattttgccccttttcttagtagaacgctgctggggtcacatggccaggagctgctcattgagggaactagcttggtttgcatgaagtcctcctctagtgtcgtggagctagtgatgctcctgtgctctcaggaatggcaaaatagtatacagaaaaacgccggactggccttcattgaattggtcaacgaggggcgtctactgtctcaaacgatgaaagaccacttggtgagagtggccaacgaagctgaattcatcttgagcaggcagcgggcagaagatatccatcgtcacgcggaatttgagtctttgtgcgctcagtattctgctgacaaacgcgaggacgaaaagatgtgcgatcatctgattagggctgctaaataccgggaccatgttaccgctacccagctgatccaaaagatcatcaatatactcacagacaagcatggagcgtgggggaacagcgcagtgtctcggcctctcgaattctggagactggattattgggaagacgatcttcgccgtcgtaggcgtttcgtgcgcaaccctcttggcagcactcaccccgaggcaacactgaagaccgccgtggagcacgccacagacgaggatatactcgcgaagggtaaacaatccattcgctcacaggcactgggcaatcagaactctgagaatgaaattctgttagagggcgacgacgatactctgagctccgtagacgagaaagatctggagaacctggcgggtcctgttagcctgtcaacaccggcacagcttgtggcaccatctgtagtggtgaaaggaacactctcagtcacatcatccgaactgtattttgaagtcgacgaggaggacccaaattttaaaaagatagaccctaagatcctagcctatactgagggtcttcatgggaagtggctgtttaccgaaatccggagtatcttttcccgtaggtaccttctgcagaacaccgctttagagatctttatggccaacagggtcgccgttatgtttaatttcccagatccagcaaccgtgaaaaaggtagtgaactacctcccacgggtgggagtcggcacctcctttgggctgcctcagacacggaggatttctctggccagtcccaggcagttattcaaagcaagcaacatgactcagcgatggcagcaccgagaaatatccaactttgagtacttaatgttcctgaatacgattgccggacgatcatataacgacctaaatcagtatcctgtgttcccctgggtcatcaccaactatgagagcgaggaactggatctcaccttacccacaaacttccgcgacctatccaaaccaattggagcactgaaccccaagcgcgcagcttttttcgccgaacggtacgagtcatgggaggacgatcaggtcccgaagttccattatggaactcactacagcacagcatcttttgtcctggcttggttgctgagaattgaacctttcacaacctacttcctgaatctacagggcggaaaattcgatcatgccgacaggaccttctccagtatctctagggcttggcggaactctcagcgagacacctcggacataaaggagctgatccctgagttctattacctgcctgaaatgtttgtcaattttaacaactacaatctgggggttatggacgatgggactgtcgtgagcgatgttgagctgcctccatgggctaaaacatccgaggaatttgtgcatattaatcggcttgctttggagagtgaatttgtctcctgtcagctccaccaatggatagatttgatttttggctataagcaacaggggcctgaggctgtccgcgcacttaatgtgttctactacctgacatatgaaggagccgtcaaccttaattctatcacagaccctgtgctcagagaagccgtcgaggcgcagatccggagctttggtcagaccccgagccagctgttgatagagcctcacccacccagaggtagtgcgatgcaggtgtcccctctaatgttcacagacaaggcccaacaggacgtgatcatggtgctgaagtttccctctaattctcctgtcacccatgtggcagcgaatacccagcctgggctcgccacgcccgctgtaattaccgtgaccgctaaccggctctttgccgtgaacaagtggcacaatctccccgctcaccagggcgcagtgcaggatcagccataccagttacccgtggagatcgatcctctgattgcctccaataccggcatgcatcggcgtcagattacagacctgctggaccagtccatacaagtacattcccagtgttttgtgatcacaagtgataacaggtacatcttagtttgcggtttttgggataagtcctttcgggtgtatagcaccgatactgggcgattaatccaggtggtcttcggtcactgggatgtcgtgacatgcttagccaggagcgagagctacatagggggaaactgctatatattgtccgggtcgagggacgctactctccttctctggtattggaacggtaaatgttccgggatcggcgataacccgggaagtgagactgccgctcccagggccattctgactggacatgattatgaagtcacttgcgcagctgtttgtgccgaactgggtctcgtgctgagtggctctcaggaaggcccttgtttgatacatagcatgaacggggatttgctgaggaccctagaaggcccagagaattgccttaagcctaagcttatccaggcaagccgggagggtcactgtgttattttttacgagaatgggttgttctgtacattctccgtaaacggcaagctccaggccacaatggagaccgatgacaacatcagagcaatacagctgtcaagagacggacagtatttgctcaccggaggcgaccggggagtggtcgtggttcggcaggtcagtgacctcaagcagctatttgcttacccaggctgcgatgccggaattcgggctatggcactctcctacgaccaaaggtgtattattagtgggatggccagtggatccattgtattgttttataatgatttcaaccggtggcatcatgagtaccagactcgctatta

SEQ ID NO: 278477 - protein, 1613 aa, Artificial Sequence
  derived and/or modified sequence
MVDASGRAAAEGWRKMEAPPDGAADLVPLDRYDAARAKIAANLQWICAKAYGRDNIPEDLRDPFYVDQYEQEHIKPPVIKLLLSSELYCRVCSLILKGDQVAALQGHQSVIQALSRKGIYVMESDDTPVTESDLSRAPIKMSAHMAMVDALMMAYTVEMISIEKVVASVKRFSTFSASKELPYDLEDAMVFWINKVNLKMREITEKEVKLKQQLLESPAHQKSPSKWYWKLVPVRYRREHLSARQSPYFPLLEDLMRDGSDGAALLAVIHYYCPEQMKLDDICLKEVTSMADSLYNIRLLREFSNEYLNKCFYLTLEDMLYAPLVLKPNVMVFIAELFWWFENVKPDFVQPRDVQELKDAKTVLHQKSSRPPVPISNATKRSFLGSPAAGTLAELQPPVQLPAEGCHRHYLHPEEPEYLGKGTAAFSPSHPLLPLRQKQQKSIQGEDIPDQRHRSNSLTRVDGQPRGAAIAWPEKKTRPASQPTPFALHHAASCEVDPSSGDSISLARSISKDSLASNIVNLTPQNQPHPTATKSHGKSLLSNVSIEDEEEELVAIVRADVVPQQADPEFPRASPRALGLTANARSPQGQLDTSESKPDSFFLEPLMPAVLKPAKEKQVITKEDERGEGRPRSIVSRRPSEGPQPLVRRKMTGSRDLNRTFTPIPCSEFPMGIDPTETGPLSVETAGEVCGGPLALGGFDPFPQGPSTDGFFLHVGRADEDTEGRLYVSCSKSPNSHDSEPWTLLRQDSDSDVVDIEEAEHDFMGEAHPVVFSRYIGEEESAKLQEDMKVKEHEDKDDASGRSSPCLSTASQMSSVSMASGSVKMTSFAERKLQRLNSCETKSSTSSSQKTTPDASESCPAPLTTWRQKREQSPSQHGKDPASLLASELVQLHMQLEEKRRAIEAQKKKMEALSARQRLKLGKAAFLHVVKKGKAEAAPPLRPEHFAKEYSQHNGEDCGDAVSKTEDFLVKEEQREELLHEPQDVDKESLAFAQQHKAKDPVALHELERNKVISAALLEDTVGEVVDVNECDLSIEKLNETISTLQQAILKISQQQEQLLMKSPTVPVPGSKNNSQDHKVKAPVHFVEPLSPTGVAGHRKAPRLGQGRNSRSGRPAELKVPKDRPQGSSRSKTPTPSVETLPHLRPFPASSHPRTPTDPGLDSALEPSGDPHGKCLFDSYRLHDESNQRTLTLSSSKDANILSEQMSLKEVLDASVKEVGSSSSDVSGKESVPVEEPLRSRASLIEVDLSDLKAPDEDGELVSLDGSADLVSEGDQKPGVGFFFKDEQKAEDELAKKRAAFLLKQQRKAEEARVRKQQLEAEVELKRDEARRKAEEDRVRKEEEKARRELIKQEYLRRKQQQILEEQGLGKPKSKPKKPRPKSVHREESCSDSGTKCSSTPDNLSRTQSGSSLSLASAATTEPESVHSGGTPSQRVESMEALPILSRNPSRSTDRDWETASAASSLASVAEYTGPKLFKEPSSKSNKPIIHNAISHCCLAGKVNEPHKNSILEELEKCDANHYIILFRDAGCQFRALYCYYPDTEEIYKLTGTGPKNITKKMIDKLYKYSSDRKQFNLIPAKTMSVSVDALTIHNHLWQPKRPAVPKKAQTRK

SEQ ID NO: 278478 - DNA, 4842 bp, Artificial Sequence
  derived and/or modified sequence
atggttgacgcatcaggtagagctgccgccgagggatggcgcaagatggaggcaccccctgacggcgctgccgacctcgtccccttggataggtatgatgcagcccgagcaaagatcgccgcaaatctacagtggatctgcgcaaaagcgtacggcagggataacatacccgaggacctgagggacccattttacgtggaccagtatgaacaggaacatatcaaaccacccgtgattaaactcctgttaagcagcgagttgtactgcagggtatgttccctcattctcaagggcgaccaggtggccgccctccagggccaccaaagcgtgattcaggcgctttctaggaaagggatttatgtcatggagtctgacgatacaccagttaccgagtccgacctctcccgagcaccgataaagatgtctgcccacatggccatggtcgatgccttgatgatggcctatactgtggagatgatttccatagagaaggtcgtggcttctgtgaagaggttctccaccttctctgcgagcaaagagctcccctacgatcttgaggacgccatggtgttctggatcaataaagtgaatctcaagatgagggagatcaccgaaaaggaggtgaagcttaaacagcagttgctggagtccccggcacaccagaaatccccgagcaagtggtattggaaactggtccctgtgcgctacagacgagaacacctctccgccaggcagagcccatattttccgttgttggaggacctgatgcgggacggatccgacggagccgctcttttagcagtgatccactactattgcccagaacaaatgaagttagacgacatctgcctgaaagaagtaacttccatggccgatagcctgtataacatccgcctgctgcgtgaattttctaatgaatatttgaacaaatgtttctacctcacccttgaagacatgctttacgctcctttagtattgaagcctaatgtgatggtgttcatcgctgagcttttttggtggtttgagaacgtgaagccggatttcgtccaaccgagagacgtccaggagcttaaagatgccaaaactgtccttcaccagaaaagctctcggcctccagttccgatcagtaacgccacaaaaagatcgttcctcggatcgccggccgccggcacactggcagaactgcagcccccagtacagctgcctgcggagggttgtcacaggcattatctgcaccccgaagagccggagtacttaggcaagggtaccgcagcattctctcccagccaccctctgcttccactcaggcagaagcagcaaaaatctatccagggtgaagatatcccagaccagcgccatcggagcaatagtctgacccgggtggatggtcagccaaggggggcggccatcgcctggccagagaagaaaactcgcccggcttcccagcctacaccgttcgctctgcatcacgcagcgtcatgcgaggtggacccatcgagcggcgactccatctctctcgctagaagcatttcaaaggattctcttgccagcaatattgtgaacttgaccccgcagaaccaaccccatcccaccgccaccaaaagtcacggcaaaagtctcctgagcaatgtgtcaatcgaggacgaggaagaagagctcgtggcaattgtgagggcagacgtggttccccaacaagcagacccagaatttcctagagccagcccccgcgccttagggttaactgccaacgcccggtccccccagggccagctggatacaagtgagtcaaaaccagacagcttcttccttgagcccctcatgccagcagtgctcaaacctgccaaagaaaaacaagtgatcacaaaggaagacgagcgaggggaaggcagacccaggtcaatcgtgagtaggagaccgtctgaaggaccacaacccctagtccgtcgaaaaatgactggctctagggatctgaaccgcacttttacacccatcccctgcagcgaattccctatgggaatcgatcctaccgagactggaccactctccgttgagaccgctggggaagtgtgcgggggtcccctagcactgggagggttcgacccctttcctcaaggccctagcaccgacggattcttcctccatgtgggacgggctgacgaagatactgaaggacgactgtatgtttcctgttcgaagtctcctaatagccacgacagcgaaccatggactctcctcagacaggattccgactccgacgtggttgacattgaagaggcagagcacgactttatgggcgaggctcaccccgtggttttttccagatacatcggagaggaggagtctgccaaactccaggaggacatgaaggtcaaggaacacgaggataaggacgatgcctctgggagaagctctccatgtttgtccacagcctcccagatgagttcggtgtctatggccagcggctctgtaaagatgaccagcttcgccgagaggaagctgcaacggctcaactcatgtgagaccaaaagcagtacctccagttcacagaagacgacccccgacgcaagtgagtcttgccctgctcccctcacaacatggaggcagaagcgcgaacagagtccttcccagcatggtaaggatcctgcctcattactggctagtgaacttgttcagctacacatgcagctggaggagaagcggcgggctatcgaagcccagaaaaaaaaaatggaggccctgtccgcacggcagcgcctgaagctcggtaaggccgcgttcctgcatgtggtgaagaagggaaaagctgaggcggcccccccgctcaggccagagcacttcgctaaagaatacagccagcacaatggagaggattgcggcgatgccgtgagcaagacagaggatttcctggttaaggaggaacaaagggaggagctcctacatgaaccacaggatgtggacaaggaatcactcgccttcgcccaacagcacaaggccaaagatcccgtggcactccatgagcttgagagaaataaagtcatatccgcagctctcctcgaggatacagtaggcgaggtcgttgacgtaaatgagtgcgacctctcaatcgagaagctgaacgagacaatctccacacttcaacaggcaatcttgaagatcagccaacagcaggaacaacttctgatgaagtcccctaccgtgcccgtgcccggttcaaagaataatagtcaggatcataaggtgaaggcccccgtgcactttgtcgagcccctgagtccaactggggtggctggacaccggaaagcccctcgcttgggccaggggagaaatagcaggtctggtcggcccgccgagctgaaggtccccaaagataggccccagggctcttctagatcaaagacccccactccctcggtggagacactgcctcatctgaggccttttcccgcatcctctcatccaagaacaccaacagaccctggtctggacagcgcgctggaacccagtggcgacccccacggcaagtgtctgtttgattcgtacagactgcacgacgaaagcaaccagcggactttgactctcagctcctccaaagacgctaatatcctgagcgaacagatgtccctgaaagaggtgctggacgcttctgtgaaggaggtgggatcctcttcttccgatgtcagcgggaaggagtccgtgccagtggaagaacccctcagatcacgcgccagtctgatcgaggtggacttgagtgatctcaaagccccagacgaggacggtgagttagtgagcctcgacggctccgctgatctggtgagcgagggagaccagaaaccaggggtggggttcttcttcaaggatgagcagaaagctgaggacgagctggcaaagaagcgcgcggccttcctcctgaaacaacagagaaaagctgaggaagcaagagtgagaaagcagcagctggaggcagaggtggagcttaagagggatgaagctcgacgtaaggccgaagaggacagggtgaggaaagaagaggagaaagccagacgcgaactgattaagcaggagtatctcaggcggaaacagcaacagattttggaggaacagggcctcgggaaaccgaaatcgaaaccaaagaaacctcggcctaaatccgtgcatcgagaagagagttgttcagactcaggtaccaaatgttcaagcacacccgacaacctgtctcgcacgcaatccgggtctagcctgagcttggcctctgcggctacaaccgagcccgaatcagtccacagcggcggcacaccctcacaacgtgttgagagcatggaagccttgccgatcctctccagaaatccaagtagatccacagaccgggactgggagactgcatccgcagcttcaagtctcgctagtgttgccgagtataccggtcccaagctcttcaaagaaccctccagtaaatcaaacaagcccattattcacaacgctatttcccactgctgtttggctggaaaggtgaacgagccgcacaaaaactctatcctggaagagcttgagaagtgcgacgccaaccattatattatcctgtttcgcgatgcaggatgccagtttagggcactgtattgttattaccccgacaccgaagaaatctacaaactcactggaacaggaccaaagaatatcacgaagaaaatgattgacaagctctataagtattcctcggaccgcaaacagttcaacctgatacccgcaaagacaatgagtgtgagtgttgacgcgctgacgattcacaatcacctgtggcagcccaagcgccccgccgttcccaagaaagcccaaactagaaaatag

SEQ ID NO: 278479 - DNA, 4842 bp, Artificial Sequence
  derived and/or modified sequence
atggtggatgccagcggccgggctgctgctgagggctggaggaagatggaggcccccccagatggagctgctgacctggtgcccctggacagatatgatgctgcccgggccaagattgctgccaacctgcagtggatctgtgccaaggcctacggccgggacaacatccctgaggacctgcgggaccccttctacgtggaccagtatgagcaggagcacatcaagccccctgtgatcaagctgctgctgagcagcgagctgtactgccgggtgtgcagcctcatcctgaagggggaccaggtggccgccctgcagggccaccagagcgtcatccaggccctgagcaggaagggcatctacgtgatggagagtgatgacacccctgtgacagaaagtgacctgagccgggcccccatcaagatgtctgcccacatggccatggtggatgccctgatgatggcctacacagtggagatgatcagcattgagaaggtggtggcctctgtgaagcgcttcagcaccttcagcgccagcaaggagctgccctatgacctggaggatgccatggtgttctggatcaacaaggtgaacctgaagatgagggagatcacagagaaggaggtgaagctgaagcagcagctgctggagagccctgcccaccagaagagccccagcaagtggtactggaagctggtgcctgtgcgctacagaagagagcacctgagcgcccggcagagcccctacttccccctgctggaggacctgatgagagatggcagtgatggagctgccctgctggccgtcatccactactactgcccagagcagatgaagctggatgacatctgcctgaaggaggtgacctccatggctgacagcctgtacaacatccggctgctgcgggagttcagcaatgagtacctgaacaagtgcttctacctgaccctggaggacatgctgtatgcccccctggtgctgaagcccaacgtgatggtgttcatcgccgagctgttctggtggtttgaaaatgtgaagccagactttgtgcagcccagagatgtgcaggagctgaaggatgccaagacagtgctgcaccagaagagcagcaggcctcctgtgcccatcagcaatgccaccaagaggagcttcctgggcagccctgctgctggcaccctggccgagctgcagccccctgtgcagctgcctgctgagggctgccaccgccactacctgcaccctgaggagcctgagtacctgggcaaaggaacagctgccttcagccccagccaccccctgctgcccctgcggcagaagcagcagaagagcatccagggcgaggacatcccagaccagaggcacaggagcaacagcctgaccagggtggatggccagcccaggggggccgccatcgcctggccagagaagaagaccaggcctgccagccagcccaccccatttgccctgcaccacgccgccagctgtgaggtggaccccagcagcggggacagcatcagcctggcccggagcatcagcaaggacagcctggccagcaacatcgtgaacctgaccccccagaaccagccccaccccacagccaccaagagccacggcaagagcctgctgagcaatgtgtccattgaagatgaggaggaggagctggtggccatcgtgcgggcagatgtggtgccccagcaggccgaccctgagttcccccgggccagcccccgggccctgggcctgacagccaatgcccggagcccccagggccagctggacaccagcgagagcaagccagacagcttcttcctggagcccctgatgcctgctgtgctgaagccagccaaggagaagcaggtgatcaccaaggaggatgagcggggggagggccggcccaggagcatcgtgtccagaagacccagcgagggcccccagcccctggtgcggaggaagatgacaggcagccgggacctgaacagaaccttcacccccatcccctgcagcgagttccccatgggcatcgaccccacagagaccggccccctgtctgtggagacagctggggaggtgtgtggcggccccctggccctgggcggctttgaccccttcccccagggccccagcacagatggcttcttcctgcacgtgggccgggcagatgaggacacagagggccgcctgtatgtgtcctgcagcaagagccccaacagccatgattctgagccctggaccctgctgcggcaggacagcgacagtgatgtggtggacatcgaggaggccgagcatgacttcatgggagaggcccaccctgtggtgttcagccgctacatcggggaggaggagagcgccaagctgcaggaggacatgaaggtgaaggagcacgaggacaaggatgatgccagcggccgcagcagcccctgcctgagcacagccagccagatgagctctgtgtccatggccagcggctctgtgaagatgaccagctttgctgagaggaagctgcagaggctgaacagctgtgagaccaagagcagcaccagcagcagccagaagaccaccccagatgccagcgagagctgcccagcccccctgaccacctggaggcagaagcgggagcagagccccagccagcacggcaaggaccctgccagcctgctggccagcgagctggtgcagctgcacatgcagctggaggagaagaggcgggccatcgaggcccagaagaagaagatggaggccctgagcgcccggcagaggctgaagctgggcaaggccgccttcctgcacgtggtgaagaagggcaaggccgaggccgccccacccctgcggcctgagcactttgccaaggagtacagccagcacaacggggaggactgtggagatgctgtgtccaagacagaggacttcctggtgaaggaggagcagcgggaggagctgctgcacgagccccaggatgtggacaaggagagcctggcctttgcccagcagcacaaggccaaggaccctgtggccctgcacgagctggagaggaacaaggtgatctctgctgccctgctggaggacacagtgggggaggtggtggatgtgaatgaatgtgacctgagcattgagaagctgaatgagaccatcagcaccctgcagcaggccatcctgaagatcagccagcagcaggagcagctgctgatgaagagccccaccgtgcctgtgcccggcagcaagaacaacagccaggaccacaaggtgaaggcccctgtgcactttgtggagcccctgagccccactggagtggccggccacaggaaggccccccggctgggccagggcaggaacagccgcagcggccggcctgctgagctgaaggtgcccaaggaccggccccagggcagcagccgcagcaagacccccaccccatctgtggagaccctgccccacctgcggcccttccctgccagcagccaccccaggacccccacagatcctggcctggacagcgccctggagcccagcggggacccccacggcaagtgcctgtttgacagctaccgcctgcatgatgagagcaaccagaggaccctgaccctgagcagcagcaaggatgccaacatcctgtctgagcagatgagcctgaaggaggtgctggatgcctctgtgaaggaggtgggcagcagcagcagtgatgtgtctgggaaggagagcgtgcctgtggaggagcccctgcggagccgggccagcctgattgaggtggacctgagtgacctgaaggccccagatgaagatggagagctggtgtccctggatggcagcgctgacctggtgtctgagggggaccagaagccaggagtgggcttcttcttcaaggatgagcagaaggcagaagatgagctggccaagaagagagctgccttcctgctgaagcagcagaggaaggccgaggaggcccgggtgaggaagcagcagctggaggccgaggtggagctgaagagagatgaggcccggaggaaggccgaggaggacagagtgaggaaggaggaggagaaggcccggcgggagctgatcaagcaggagtacctgcggaggaagcagcagcagatcctggaggagcagggcctgggcaagcccaagagcaagcccaagaagccccggcccaagtctgtgcaccgggaggagagctgcagcgacagcggcaccaagtgcagcagcaccccagacaacctgagcaggacccagagcggcagcagcctgagcctggccagcgctgccaccacagagcctgagagcgtgcacagcggcggcacccccagccagagggtggagagcatggaggccctgcccatcctgagcaggaaccccagccgcagcacagaccgggactgggagacagccagcgctgccagcagcctggcctctgtggccgagtacacaggccccaagctgttcaaggagcccagcagcaagagcaacaagcccatcatccacaatgccatcagccactgctgcctggccggcaaggtgaatgagccccacaagaacagcatcctggaggagctggagaagtgtgatgccaaccactacatcatcctcttcagagatgctggctgccagttccgggccctgtactgctactacccagacacagaggagatctacaagctgactggaacaggccccaagaacatcaccaagaagatgattgacaagctgtacaagtacagcagtgacaggaagcagttcaacctgatcccagccaagaccatgtctgtgtctgtggatgccctgaccatccacaaccacctgtggcagcccaagaggcctgctgtgcccaagaaggcccagaccaggaagtag

SEQ ID NO: 278480 - DNA, 4842 bp, Artificial Sequence
  derived and/or modified sequence
atggtggacgccagcggccgggccgccgccgagggctggcggaagatggaagctccccctgacggcgctgctgacttggtgccactggatcgctatgatgctgccagagctaagatcgcagcgaacctccagtggatctgtgctaaagcctatggccgtgacaacataccagaggacttgcgggatccgttctacgtagaccagtacgagcaggaacacataaaacctcccgtgatcaagctcctcctgagctctgaactctattgcagggtgtgcagcttaattttgaagggagaccaagtggctgccctgcaaggacaccagtcagtcatccaggccctgtctcgcaagggcatttacgttatggaatctgacgacactcctgtgacagaatcggatcttagccgagccccaattaaaatgtcagcccatatggcaatggtggatgccctgatgatggcctacaccgttgaaatgataagcatagaaaaggttgtggccagcgttaagcgattttcaactttctcagcctccaaagagctcccatacgacctcgaggacgctatggttttctggatcaacaaagttaaccttaaaatgcgggagattactgagaaagaagtgaaactgaagcagcagcttctggagtctcccgcacaccagaaatcacctagcaagtggtattggaagctcgtgcctgtgagatacaggcgcgaacaccttagcgctcggcaaagtccatactttcccctgctcgaggatttgatgagagatggctcggacggagccgcgttgctcgcggtgatacattactactgccctgaacaaatgaaactggatgacatctgtctgaaggaggtcacatcaatggctgactctctatacaacatcaggctcctgcgggagttctccaatgagtacctgaacaaatgcttctacctcacactcgaggatatgctgtatgctccgttggtgctgaaaccgaacgtcatggtctttattgcagaacttttttggtggttcgaaaacgtcaaacccgatttcgtgcaacctcgcgacgtgcaagagctgaaggatgctaaaacggtgcttcatcagaaaagcagcaggccccctgtgccaatttctaacgccacaaagagaagtttcctcggtagtcccgccgccggtactcttgcggagctgcagcctcccgtccagctgcccgctgagggctgccatagacactacctacaccccgaagaaccagagtatctcggcaaaggaaccgcagcctttagcccctcccacccactgctgcccctaagacagaaacaacaaaaatcaatccaaggagaggatatacctgaccagaggcacaggtcaaattcgttgactagagttgacggccaaccccgtggggccgccattgcttggccagagaaaaagacaagacccgcttcccaacccacaccatttgctctccaccatgcagccagttgtgaagtagatccttccagtggggattcaatctcactggcccggagcatcagtaaagactcactcgcaagcaacatagtcaatctgaccccgcagaatcaaccacatcctactgccacaaaatcacatggcaagtccctgctcagcaacgtttctatcgaagatgaggaggaagaattagtggcaatcgtccgcgcagacgttgtcccccagcaggctgaccctgaatttccacgcgcttccccacgcgctttaggccttacagccaatgctagaagcccccagggacagttggacacatcagagagcaagccagattcatttttcctggaaccattaatgcctgccgtgctgaaaccagctaaagaaaagcaggtgataactaaggaggacgagcggggagagggtcgacctagatcaattgtttcccgtagacctagcgaaggtccacagcctctggtgcgcagaaaaatgaccggctccagggacttgaatcgaactttcacgcctatcccatgttccgaatttcccatggggattgacccgacagagactgggccactgagtgttgaaacagctggcgaagtttgcggcggcccgctggcgctggggggcttcgatccctttccccagggccctagcactgatggatttttcctgcacgttgggcgcgccgacgaagataccgaggggcggttgtatgtgtcttgctctaaaagccccaactcccacgactccgaaccctggacactgttgcgacaggactctgactcagacgtggtggacatcgaagaagctgagcatgactttatgggcgaagcgcatcccgttgtgttctcccggtacatcggcgaggaggagagtgcgaagcttcaggaagacatgaaggtgaaggagcatgaggacaaggacgatgcgtctggtcggagtagtccctgcctatccaccgcttcacagatgtcatccgtcagtatggcctccggaagtgtgaaaatgacctcgtttgccgaaagaaaactgcagcgacttaatagttgcgagactaaatcctccactagctcctctcaaaagacaacccctgacgccagtgaaagttgccccgctcctctcactacctggcggcagaagcgcgagcagtctccttcacagcacggcaaagatcccgccagtctgctggccagcgagctcgtacaactgcatatgcagttggaagagaaaagacgggccatagaggcacaaaaaaagaaaatggaggcactgagtgcccgacagcggctcaagctcggcaaagccgcattcctgcacgtggttaagaagggaaaggccgaagctgcccctcccctgcgtccagaacattttgcaaaggaatacagccagcacaatggagaggattgtggcgatgccgtgagcaagaccgaagacttccttgtgaaggaggagcagcgagaagagctgctgcatgaacctcaggatgtggataaagaaagcctagccttcgcacagcagcacaaggcgaaggacccagtggccctccacgagctggagcggaacaaagtgatttcagctgcattgctggaggacacagtaggggaggtggtcgacgttaacgaatgtgacttaagtattgagaagttgaacgagacgatcagcacgctacaacaggctatcctcaagatctcgcaacagcaggagcaactgctgatgaaaagcccaaccgttccggtgccaggatccaaaaataatagtcaggaccataaagttaaggccccagtgcacttcgtagagccactttcccccaccggtgtggccggccaccggaaagcaccccggcttgggcagggtcgaaactcgagatcagggcgacccgccgagctgaaggtgcctaaggataggccccaggggagctcccggtcaaagacacccaccccctccgtcgagacattgccacacctccggcctttcccagcatcttctcaccctagaacacctactgaccccggcttagactccgccctggagccatccggcgacccccatggtaagtgcctttttgattcctacagactccatgatgagtcaaatcagcggactctgactctctcgagctcaaaggacgcaaacatactctcagagcagatgtccctcaaagaagtgctcgatgcgtccgttaaagaagtgggcagttcctcctcagatgtgagtggaaaagagtccgtgccggtggaggaaccacttcggagccgcgccagcctgatcgaagtcgacctgtctgatctcaaggcacctgacgaggatggagagctcgtgagccttgatggctctgccgatctggtatcagagggcgaccaaaagcctggagttggctttttcttcaaggacgaacagaaggccgaggacgagctggctaagaaacgtgcggctttcctcctcaaacaacagaggaaggccgaagaggctcgggttaggaagcagcagctggaggcggaagtagagctcaaacgcgatgaagcacgccgcaaggctgaggaagacagagtgcgcaaggaggaagaaaaggccagaagagagctaattaaacaagagtatctgagacggaaacagcagcagatcctggaggaacaaggcctgggcaagccaaaatccaagccgaagaaaccacggccaaaaagtgtacatagggaggagtcctgtagcgattctggcaccaagtgttccagcacacctgacaacctcagtcggacccagtcgggcagtagcctcagtctggcttccgcagcaacaactgaacctgagagcgttcatagcggcgggactcctagccaacgcgtcgagtctatggaagctctcccaattctctccaggaatccctctagaagcactgaccgcgactgggaaaccgccagcgccgcctcctcactggctagcgtagcagaatatacgggcccaaagttgtttaaggaacctagcagcaaatctaataagcctattatacataatgccataagccattgttgtctggctggcaaggtgaatgagccacataagaattctatcctcgaggagctcgaaaagtgtgatgccaaccactacataatactgttccgggacgcaggctgtcaattccgagccctttactgttactaccctgataccgaagaaatatataagcttacaggaacggggcctaaaaatatcaccaagaagatgatcgataagttgtacaaatacagctccgacagaaaacaattcaaccttataccagccaaaacaatgtcagtctccgtggatgcacttacaatccacaatcacctatggcagccaaaaaggcctgctgtgcctaaaaaagcacagactcgcaaatag

SEQ ID NO: 278481 - DNA, 4842 bp, Artificial Sequence
  derived and/or modified sequence
atggtggacgcaagcggcagagcggcagccgaaggttggcgaaagatggaggcccctccagacggagcagcagatctggttccactggatcgatatgacgctgctcgcgctaaaatcgctgcgaacttgcaatggatttgtgctaaagcttacggaagggataatatacctgaggacctgcgagacccattctacgtggaccagtatgaacaagagcacatcaaacccccagtgatcaagctgctgctgtcctccgagctatactgtcgggtgtgctctttgatactcaagggagaccaggttgccgctctccagggtcaccaaagcgtgatacaggccctctcccggaaaggaatttatgtaatggagagtgatgacactcccgtcactgagtccgacttaagccgcgctcctattaagatgagcgcgcatatggctatggtggacgcactgatgatggcatacactgtagaaatgatcagcatcgagaaggttgttgcctccgtgaaacggttctccaccttcagcgctagtaaggagcttccatacgacctagaagatgctatggtattctggatcaataaggtgaatttgaaaatgcgcgaaatcactgaaaaagaagtgaagctaaagcagcaactgctggaatccccagcccaccaaaaaagcccctcaaaatggtattggaaactggtccccgtgaggtatcgcagggagcacttgagcgccagacagagcccatatttccccctcctggaagatctcatgagggatggcagtgacggggcagccctcttggctgttatccactattattgccccgaacagatgaaactcgatgatatctgtctcaaggaagtcacctcaatggccgacagcctctacaacattagattgcttagagaattctcaaacgaatacctaaacaagtgcttttatctcaccctagaggatatgctgtacgcccctcttgtccttaagccgaacgttatggtgttcatagccgagctcttctggtggtttgagaatgtgaagcctgattttgtgcagccgagggacgtgcaagaactgaaggacgccaaaaccgtgctgcatcaaaaatcaagccgccctccggtgcccatctccaacgcaacaaagcggtctttcctgggcagtcccgctgctggcactctggccgaactccaacccccagtacaacttcctgcggagggctgccacagacactatcttcaccccgaggagcccgaatacctgggcaagggaacagccgcattctctccatctcatccgctgctgcctctgagacagaagcaacagaagtcgattcagggggaggacatccctgaccaacggcatcgatctaatagtctgacccgagtggacggtcaacccaggggggcagctattgcttggccggagaaaaagacccggccagcaagccagccaacccctttcgctctccatcacgccgcttcctgcgaggtcgatccgtctagcggcgattctattagcttggcacgcagcatctctaaggatagcctcgctagcaatatcgtgaacttgactccacaaaaccagccacatcccacggcaacaaaatcccatggtaagtctctgttgtccaacgtgagcattgaagacgaagaagaggagctggtcgccattgtgagggccgacgtggtgccacagcaagccgacccagagttcccacgggctagccctcgggcattgggtttgaccgcaaatgctcgcagcccacaggggcagctggacacctcagaatctaaacccgattcattttttctggaacccctgatgcccgctgttctgaagcctgcaaaagagaaacaggtcattaccaaggaagacgagagaggagaggggaggccacggtctattgtcagtcggagaccctcagaaggaccccagccgttggtgcgtcgcaaaatgacgggatcaagagacttaaaccggacctttactccaatcccttgctcagaatttcccatgggaattgatcctacagaaaccggtccgctgagcgtggaaacagccggagaagtatgtgggggtcccctggcattgggcggatttgacccttttccgcaaggcccttcaaccgatggcttttttttgcatgttggcagagctgatgaagacaccgaaggtcgtctttatgtctcctgttccaagagccccaactcgcatgattcagagccctggactctgttaaggcaggactccgactcagatgtcgtggatatcgaggaggctgaacacgatttcatgggtgaggcccacccagttgtgttctcccgctacatcggcgaagaagaatccgccaagctccaggaggacatgaaggtaaaggagcatgaggacaaagatgacgcctccgggagaagtagtccgtgtttaagcaccgcttcgcagatgagctctgtgtccatggcctcagggagtgtgaagatgactagtttcgctgagagaaaactccagagactgaactcctgtgagactaaatcatctacttcaagttctcagaaaacaacacctgatgccagcgaatcatgccctgcccctctgaccacttggagacagaaaagagagcagtcaccttcccagcatggaaaagaccctgcctcgttgctcgcatctgaacttgtgcagctccacatgcaactggaggaaaagagaagagctattgaggctcagaagaagaaaatggaggccctttcagcgagacagaggctcaagctgggaaaggctgcttttttgcacgttgtcaagaagggaaaggcagaggccgcaccacccctgcggccagagcatttcgccaaagagtacagccagcacaatggcgaagactgtggcgatgccgtgagtaagaccgaggatttcctcgtgaaagaggagcagagggaggaacttctgcacgagcctcaggatgtggataaggagagcctggcatttgcgcagcagcacaaagccaaggatccggtagcattgcatgagctcgaacgaaacaaggttattagcgctgcactcctcgaagacaccgttggggaggtggtggacgtcaatgagtgtgatttaagtatcgagaagctgaacgaaactatttccacactccagcaggccattctcaagattagccagcagcaggagcagctgctgatgaaaagccctactgttcctgttcctggttccaagaataattctcaagatcataaagtcaaggctcccgtgcacttcgtggagcccctctcccccactggtgtggccggacaccggaaggctccaaggctggggcagggtcgaaattccagaagcggcagacccgctgaacttaaggtgcctaaggatcggcctcagggcagcagtcgaagcaaaacccccactccttccgttgaaaccttgccacacctcaggccctttccggcttcaagtcacccgcgaacacccaccgaccccggtctggatagcgcactggagccttccggtgatcctcacgggaagtgcttatttgactcgtatcgcctgcacgatgagtcaaaccagcggacgcttaccttatcgagctctaaggacgcaaacattctcagtgagcagatgtccctgaaggaagttctggatgccagcgtgaaggaggtcggttcaagcagttccgacgtcagtggcaaagaatcggtaccggtcgaggagcccctgaggtcccgcgcatcattaatcgaggtagacctgtccgatctgaaagccccagacgaagatggtgagctggtgagtctagatggctctgctgacctcgtgagcgagggggatcagaagcctggtgtgggatttttttttaaagatgagcagaaggctgaggatgagctggctaagaagcgcgcagcttttctgctcaaacaacaacgaaaggccgaggaagcgagggtgcggaagcagcaactcgaagctgaggtggaacttaaacgagacgaagcgagacgcaaggctgaagaggacagggtgcgtaaggaggaggagaaagctagaagggagttgatcaaacaagagtacctgcgtaggaaacaacagcagatattagaggaacaaggacttggaaagcctaaatcgaaaccaaaaaaaccaagaccgaagtccgtacaccgagaggagagctgctccgactccggtacaaaatgctcgtcgacaccagataacctttcacgaactcagtccggcagttccctctctctcgcatcagccgctactaccgagcccgagagcgttcacagtgggggtacaccatctcaaagagtcgagtcgatggaggccctgcccatcctgtcccgaaacccttctcggtcaacggacagggactgggaaaccgcctccgccgcttcctcactcgcgtcagtcgctgagtacacaggtccaaagttgttcaaggaaccatcctctaagtcgaacaaacccattatccataacgccatctctcattgctgtcttgcaggcaaggtcaatgagccccacaagaactccatccttgaggaattagagaaatgtgatgcgaaccactatataattctgtttcgggatgctggatgccaatttcgcgcactgtactgttactacccggacaccgaggaaatctacaagctgaccggcactggcccaaaaaatattacaaagaaaatgattgataagctctataaatacagtagcgatagaaagcagtttaacttaatccccgctaaaactatgagcgtgtctgtggatgctctcacaattcacaatcacctttggcagccgaagagacccgctgtcccgaaaaaagcccaaacccgaaaatag

SEQ ID NO: 278482 - DNA, 5730 bp, Artificial Sequence
  derived and/or modified sequence
gcccggcgcggcgaggggcggcggcgcctttgttgcggccgggccgccgcctcagccctttgtctgcagatggtggacgcgagcggccgcgccgccgccgagggctggaggaagatggaggccccgccggacggcgccgccgacctcgtgcccctggaccgctacgacgcggcgcgcgccaagatcgccgccaacctgcagtggatctgcgccaaggcctacggccgagataacatccctgaggacctcagagaccctttctacgttgaccagtatgagcaggagcacattaagccgcctgttatcaagcttctcctgtccagcgagctgtactgccgtgtctgcagcctcatcctgaaaggggaccaggtggccgccttacagggacaccagtctgtcatccaggccctgtcccggaaagggatctatgtgatggagagtgatgacacccccgtgacagagtccgacctcagtcgcgcacccataaaaatgagtgcccacatggcaatggtggatgccctgatgatggcctacactgtggagatgatcagcatcgagaaggtggtggccagtgtcaagcgcttctcaacgttcagtgcctcgaaagaacttccgtacgacctcgaggatgccatggtgttctggatcaacaaggtaaatcttaaaatgagagagataacagagaaagaagttaaattaaaacaacagttattggaaagtccagctcatcaaaagtctccctccaagtggtattggaagttagtgcctgtccgctatcgacgagagcacctttctgctaggcagtcaccctacttcccgttgttggaggatttgatgagagacggcagtgatggtgctgctctcttagctgtgattcactattattgcccagagcagatgaaactggatgatatatgcttaaaggaggtaacgtcgatggccgacagtctgtataatattcggcttctgagagaattctccaatgaatatcttaataaatgtttttatctcaccttggaagatatgctgtatgcgccattagtgttgaagccgaatgttatggtttttattgcggagcttttttggtggttcgagaatgtcaagccagattttgttcagcccagggatgttcaggagctgaaagacgcgaaaacagtgttacaccagaagagcagccggcctcctgtaccgatctccaacgcgaccaaacgcagtttcctaggcagccctgctgcagggaccctggctgagctgcagccccccgtgcagctgccggcggaaggctgtcacaggcactacctgcacccggaagaacctgaatacctcgggaaaggaactgctgccttcagcccatcccatcctttattgccactgagacagaaacagcagaaatccatacagggagaggacatccctgatcagcgacatcgatcgaattctttgacccgagttgatggtcagcctcgaggagcagcaatagcctggccagaaaaaaaaaccaggcctgcgtcccagccaacaccttttgctctacatcacgctgcgagttgtgaagtggatcccagctctggcgacagcatcagcttggcccgctccatcagcaaagacagtttggcatccaacattgttaatctgaccccacagaaccagccacaccccacggccacgaagagccacgggaagagcctcctgagcaatgtcagtattgaggatgaggaagaggagcttgtggctattgttagagcagacgtggttccccagcaggctgacccggagttccccagggcctcaccccgggccttaggccttacagcaaatgcccggtctccccaaggacagctggacacctcggaaagtaagcctgacagttttttcttggagcctttgatgccagcagttcttaagccagcgaaagagaagcaggtgatcaccaaggaggatgaacggggggaagggagaccgaggagcatcgtgtctaggaggcccagcgagggcccccagcctttggtacgaaggaaaatgactggcagtcgcgacttgaataggacttttaccccgattccatgctcagaattccccatgggcatcgaccccaccgagacaggaccactgtcagtggaaaccgcaggagaggtctgtggtgggcctctggcccttggcggattcgatccgttcccccagggaccatccacggatggcttcttccttcatgtaggcagggccgatgaagacaccgagggaaggttatatgttagttgttcaaaaagccccaactcccacgattcagagccgtggactctcctcaggcaggattctgactcggatgtggtggacatagaggaagccgagcacgatttcatgggtgaggcccatcctgtggttttcagcagatacattggggaggaagagtcggccaaactgcaggaggacatgaaggtgaaggaacatgaagacaaagatgacgccagcggccgctcgagcccctgcctgagcacagcctctcagatgagcagtgtctccatggcgagtgggagcgtgaagatgaccagctttgcggagaggaagctccagagactcaacagctgtgagaccaagtccagcaccagcagctcccagaagaccacgccagatgcgtctgagagctgcccagcccctctgacgacgtggaggcagaagagggagcagagtccgagccagcatggcaaggatcccgccagcctcctggcatctgagctggtacagctgcacatgcagctggaggagaagcgcagggccatcgaggcccagaagaagaagatggaggcgctgtcggcaaggcagcgcctgaagctcggcaaggctgcattcctgcatgtggtgaagaagggcaaggccgaggctgccccacccctcaggccggagcactttgcaaaggagtactctcagcacaacggggaggactgtggggacgctgtttccaaaaccgaagactttctcgtgaaggaggagcagagagaggagctccttcacgagccacaggatgtggacaaagagagcctggcctttgctcagcaacataaagcaaaagaccctgtggctctgcacgagctggagagaaataaggtgatctccgctgccctcctggaggacactgttggggaggttgtcgacgtgaatgaatgtgacctttccatcgagaagcttaacgaaaccatcagtacgctgcagcaggccatcctgaaaatctctcagcagcaagagcagcttctgatgaagtcccccacagtcccagtgccaggctctaagaataactcgcaggaccacaaagtgaaggcaccagtccacttcgtggagccactctctcccacgggcgtggctggccaccgcaaagccccccggctgggtcaaggccggaattcccgttccggaaggccggcggagctgaaggtcccaaaagacaggccacagggctcctcccgaagtaaaaccccaacgcccagtgtagagacgctcccgcacttgagacccttccctgccagcagccaccctcggacgcccacggaccctggcctggacagtgccctggagcccagtggtgacccacatgggaagtgtctcttcgacagttacaggctccatgatgaaagcaatcagcggacacttactctgtcctcttccaaagatgccaacattctttcggagcagatgagcctcaaagaagttctggatgcgagtgtgaaggaggtggggtccagctcctcagatgtctcgggaaaagagagcgtccccgtggaggagcctctgaggagcagggccagcctcattgaagtggacctctccgacctgaaggcccccgacgaggatggggagctggtaagcctcgatggctcggcggaccttgtcagcgaaggcgaccagaagccgggggtcggcttcttcttcaaggatgaacagaaagcggaagatgagctcgccaagaagcgggcggccttcctcctgaagcagcagcgcaaggccgaggaggcccgcgtgcgcaagcagcagctggaagcggaggtggagctcaagcgtgacgaagcccggcgcaaagctgaggaagaccgggtgcggaaggaggaggagaaggcgcggcgcgagctcatcaagcaggagtacctgcggaggaagcagcagcagatcctagaggagcaggggctcggcaagcccaagtcaaagccgaagaagccgcggccgaagtcggtgcaccgggaagagtcgtgcagcgactccggcaccaagtgctcctccacccctgataacttgagccggactcagtcaggctccagcctgtccttggcctctgcggcgacgacagaacccgagagcgttcattccgggggcacaccctctcagcgagtggaatcgatggaagccctgcccatactgagccgtaacccaagcaggagcacagaccgagactgggagaccgcgtcggcggcatcttccctggcctcagtggccgagtacacaggtcccaagctctttaaggagcccagtagtaaatcaaacaagccgattattcacaatgccatatcccattgctgcctggctggaaaagtgaacgaaccccacaagaattccatattggaggagctggagaagtgtgatgccaatcactacatcatactgtttcgtgatgctggctgccagttcagggcgctttactgctactatcctgatactgaggaaatctacaaactcactggcacggggccaaagaacatcaccaagaaaatgatcgacaaactgtataaatacagctcagaccgaaaacagtttaacttgatcccagccaaaaccatgtctgtcagtgtggacgcactcacaatccacaaccacctgtggcagcccaagcggcctgcagtgccaaagaaggcccagactcgtaaatgaccccggtgcagctggcgtccaaagggtgacccagactcgtaaatgatgcccttgtggctggcatccagagggtgccacggggtccttatttattgttttcatctatttgggtacgaagtgtgcaaagtcacagaccttttgcaaagaggtttctagacagcagaagaaaacccctctctcagcgctcatctcacgcagaggatgccaggcagggtgaggatgggggagtagatgccgcttttgcagtggctcgcactgctgtggccactgctgaccactgaggctcccagcggagggtgttcacagccaggtcccgggccacggagctcccttacttgaagttctccttcagcatagattagacgtgatccactttgctttcttgcttctcacctcgcccccttgcacattgcctgacaccctcatattggccagctgtaatctcgtgactatgggactgaggctcaatcttggcttggggtgtttgaatgtctatagcaaaggaattcataatgggaaatctttttcatttgagaaattgtatgatatttattggttgtgtctactgccaacatttatatccaattctaagatttctgaaaaaaaattcttatcccttgctgctcagaaaaagtttacggaaaacaccagttcactaaaagcaccgaaatctgcaaagcctgtcttccgctagaacaacgtctacaaatgtgaagatgatgacttctggcacgcggtcatgagggtggggaatggcactaggagctgatgtttgcctcatttaaagtaggcaagccgagccaactgcagccatcattc

SEQ ID NO: 278483 - DNA, 4842 bp, Artificial Sequence
  derived and/or modified sequence
atggtggacgccagcggcagagccgccgccgagggctggagaaagatggaggccccccccgacggcgccgccgacctggtgcccctggacagatacgacgccgccagagccaagatcgccgccaacctgcagtggatctgcgccaaggcctacggcagagacaacatccccgaggacctgagagaccccttctacgtggaccagtacgagcaggagcacatcaagccccccgtgatcaagctgctgctgagcagcgagctgtactgcagagtgtgcagcctgatcctgaagggcgaccaggtggccgccctgcagggccaccagagcgtgatccaggccctgagcagaaagggcatctacgtgatggagagcgacgacacccccgtgaccgagagcgacctgagcagagcccccatcaagatgagcgcccacatggccatggtggacgccctgatgatggcctacaccgtggagatgatcagcatcgagaaggtggtggccagcgtgaagagattcagcaccttcagcgccagcaaggagctgccctacgacctggaggacgccatggtgttctggatcaacaaggtgaacctgaagatgagagagatcaccgagaaggaggtgaagctgaagcagcagctgctggagagccccgcccaccagaagagccccagcaagtggtactggaagctggtgcccgtgagatacagaagagagcacctgagcgccagacagagcccctacttccccctgctggaggacctgatgagagacggcagcgacggcgccgccctgctggccgtgatccactactactgccccgagcagatgaagctggacgacatctgcctgaaggaggtgaccagcatggccgacagcctgtacaacatcagactgctgagagagttcagcaacgagtacctgaacaagtgcttctacctgaccctggaggacatgctgtacgcccccctggtgctgaagcccaacgtgatggtgttcatcgccgagctgttctggtggttcgagaacgtgaagcccgacttcgtgcagcccagagacgtgcaggagctgaaggacgccaagaccgtgctgcaccagaagagcagcagaccccccgtgcccatcagcaacgccaccaagagaagcttcctgggcagccccgccgccggcaccctggccgagctgcagccccccgtgcagctgcccgccgagggctgccacagacactacctgcaccccgaggagcccgagtacctgggcaagggcaccgccgccttcagccccagccaccccctgctgcccctgagacagaagcagcagaagagcatccagggcgaggacatccccgaccagagacacagaagcaacagcctgaccagagtggacggccagcccagaggcgccgccatcgcctggcccgagaagaagaccagacccgccagccagcccacccccttcgccctgcaccacgccgccagctgcgaggtggaccccagcagcggcgacagcatcagcctggccagaagcatcagcaaggacagcctggccagcaacatcgtgaacctgaccccccagaaccagccccaccccaccgccaccaagagccacggcaagagcctgctgagcaacgtgagcatcgaggacgaggaggaggagctggtggccatcgtgagagccgacgtggtgccccagcaggccgaccccgagttccccagagccagccccagagccctgggcctgaccgccaacgccagaagcccccagggccagctggacaccagcgagagcaagcccgacagcttcttcctggagcccctgatgcccgccgtgctgaagcccgccaaggagaagcaggtgatcaccaaggaggacgagagaggcgagggcagacccagaagcatcgtgagcagaagacccagcgagggcccccagcccctggtgagaagaaagatgaccggcagcagagacctgaacagaaccttcacccccatcccctgcagcgagttccccatgggcatcgaccccaccgagaccggccccctgagcgtggagaccgccggcgaggtgtgcggcggccccctggccctgggcggcttcgaccccttcccccagggccccagcaccgacggcttcttcctgcacgtgggcagagccgacgaggacaccgagggcagactgtacgtgagctgcagcaagagccccaacagccacgacagcgagccctggaccctgctgagacaggacagcgacagcgacgtggtggacatcgaggaggccgagcacgacttcatgggcgaggcccaccccgtggtgttcagcagatacatcggcgaggaggagagcgccaagctgcaggaggacatgaaggtgaaggagcacgaggacaaggacgacgccagcggcagaagcagcccctgcctgagcaccgccagccagatgagcagcgtgagcatggccagcggcagcgtgaagatgaccagcttcgccgagagaaagctgcagagactgaacagctgcgagaccaagagcagcaccagcagcagccagaagaccacccccgacgccagcgagagctgccccgcccccctgaccacctggagacagaagagagagcagagccccagccagcacggcaaggaccccgccagcctgctggccagcgagctggtgcagctgcacatgcagctggaggagaagagaagagccatcgaggcccagaagaagaagatggaggccctgagcgccagacagagactgaagctgggcaaggccgccttcctgcacgtggtgaagaagggcaaggccgaggccgccccccccctgagacccgagcacttcgccaaggagtacagccagcacaacggcgaggactgcggcgacgccgtgagcaagaccgaggacttcctggtgaaggaggagcagagagaggagctgctgcacgagccccaggacgtggacaaggagagcctggccttcgcccagcagcacaaggccaaggaccccgtggccctgcacgagctggagagaaacaaggtgatcagcgccgccctgctggaggacaccgtgggcgaggtggtggacgtgaacgagtgcgacctgagcatcgagaagctgaacgagaccatcagcaccctgcagcaggccatcctgaagatcagccagcagcaggagcagctgctgatgaagagccccaccgtgcccgtgcccggcagcaagaacaacagccaggaccacaaggtgaaggcccccgtgcacttcgtggagcccctgagccccaccggcgtggccggccacagaaaggcccccagactgggccagggcagaaacagcagaagcggcagacccgccgagctgaaggtgcccaaggacagaccccagggcagcagcagaagcaagacccccacccccagcgtggagaccctgccccacctgagacccttccccgccagcagccaccccagaacccccaccgaccccggcctggacagcgccctggagcccagcggcgacccccacggcaagtgcctgttcgacagctacagactgcacgacgagagcaaccagagaaccctgaccctgagcagcagcaaggacgccaacatcctgagcgagcagatgagcctgaaggaggtgctggacgccagcgtgaaggaggtgggcagcagcagcagcgacgtgagcggcaaggagagcgtgcccgtggaggagcccctgagaagcagagccagcctgatcgaggtggacctgagcgacctgaaggcccccgacgaggacggcgagctggtgagcctggacggcagcgccgacctggtgagcgagggcgaccagaagcccggcgtgggcttcttcttcaaggacgagcagaaggccgaggacgagctggccaagaagagagccgccttcctgctgaagcagcagagaaaggccgaggaggccagagtgagaaagcagcagctggaggccgaggtggagctgaagagagacgaggccagaagaaaggccgaggaggacagagtgagaaaggaggaggagaaggccagaagagagctgatcaagcaggagtacctgagaagaaagcagcagcagatcctggaggagcagggcctgggcaagcccaagagcaagcccaagaagcccagacccaagagcgtgcacagagaggagagctgcagcgacagcggcaccaagtgcagcagcacccccgacaacctgagcagaacccagagcggcagcagcctgagcctggccagcgccgccaccaccgagcccgagagcgtgcacagcggcggcacccccagccagagagtggagagcatggaggccctgcccatcctgagcagaaaccccagcagaagcaccgacagagactgggagaccgccagcgccgccagcagcctggccagcgtggccgagtacaccggccccaagctgttcaaggagcccagcagcaagagcaacaagcccatcatccacaacgccatcagccactgctgcctggccggcaaggtgaacgagccccacaagaacagcatcctggaggagctggagaagtgcgacgccaaccactacatcatcctgttcagagacgccggctgccagttcagagccctgtactgctactaccccgacaccgaggagatctacaagctgaccggcaccggccccaagaacatcaccaagaagatgatcgacaagctgtacaagtacagcagcgacagaaagcagttcaacctgatccccgccaagaccatgagcgtgagcgtggacgccctgaccatccacaaccacctgtggcagcccaagagacccgccgtgcccaagaaggcccagaccagaaagtag

SEQ ID NO: 278484 - protein, 73 aa, Artificial Sequence
  derived and/or modified sequence
MRQAEPADMRPEIWIAQELRRIGDEFNAYYARRVMMFSLPAFLLTPSPSTLYFFKKTVTSCNYMLILEMITVA

SEQ ID NO: 278485 - protein, 198 aa, Artificial Sequence
  derived and/or modified sequence
MAKQPSDVSSECDREGRQLQPAERPPQLRPGAPTSLQTEPQGNPEGNHGGEGDSCPHGSPQGPLAPPASPGPFATRSPLFIFMRRSSLLSRSSSGYFSFDTDRSPAPMSCDKSTQTPSPPCQAFNHYLSAMASMRQAEPADMRPEIWIAQELRRIGDEFNAYYARRVFLNNYQAAEDHPRMVILRLLRYIVRLVWRMH

SEQ ID NO: 278486 - DNA, 3649 bp, Artificial Sequence
  derived and/or modified sequence
gccgcctggtctgcagtttgttggagctctgcgtccagcgccgctgccgctgccgccgccgccgccgccgccgccgccgccgccgccgccgccactaccaccacttgattcttgcagccaccctgcgaaccctgccacactgcgatcgcatcatcgcggtattcggttcgctgcgttcccgccgccaccgcctcggcgccctttcttggcccttgttcccccaaatgtctgactctgactctcggactgagaaacgcaagaaaaaaagaccaaatggcaaagcaaccttctgatgtaagttctgagtgtgaccgagaaggtagacaattgcagcctgcggagaggcctccccagctcagacctggggcccctacctccctacagacagagccacaaggtaatcctgaaggcaatcacggaggtgaaggggacagctgcccccacggcagccctcagggcccgctggccccacctgccagccctggcccttttgctaccagatccccgcttttcatctttatgagaagatcctccctgctgtctcgatcctccagtgggtatttctcttttgacacagacaggagcccagcacccatgagttgtgacaaatcaacacaaaccccaagtcctccttgccaggccttcaaccactatctcagtgcaatggcttccatgaggcaggctgaacctgcagatatgcgcccagagatatggatcgcccaagagttgcggcgtattggagacgagtttaacgcttactatgcaaggagggtatttttgaataattaccaagcagccgaagaccacccacgaatggttatcttacgactgttacgttacattgtccgcctggtgtggagaatgcattgacaggttctttgcggagccgagataccatgcagacattttgcttgttcaaaccaacaagacccagcaccgcggtctcctggtgccattattatgcagccagcggttctcttgtggagggggcaggtgacgtttcagaagacaccgagctggatgggactacctttctgttcatcaccacacagcagaatttctaatggaagtttgttgtgaatgtaaaggagggagcattctttgctttttaatatacaaaccatggttttttggagcaggattttgtgtaagaatggtgtttacatgcagtgtgttttccccctcaccttcaataaggtttttcaaaaaggaaatggaaactttttaaccaatttgtgaataacttttgtattaaaattttaagaacctacggcctattctcagaggattatgtaacccctgcagtggaaactgagccagctaacttaaaaagctgccttagtttatttttagagattacagaatttttaaacagggagacgtgtgatatactccctcccttccctactattgcctctctgacctttttaaattatttttaataccaaaagagttcttttgaaatggaactgattaaaagggcagagggtctgttgccagcctgcattgatataccagtcccatttgtaaatatttacgtacctttataaattcagttgcatctgtggcaaaatttcagactatttttgcgtctttcctcatcactttttgtgatgcaactccagtctggactcagatgcatagatttggtccagtgtattttcatgataaagtgaaattgagtcagaacaagagttaatatctgcctgtatcttgcacagttcgagcgatctgttattaactgggaagcatttggtgttggttttcattccatttcgacgagcatgttattgggaagtattctgaagaggcaatagcagtaataacaacagacttaagtgctacgcccctttgtgctgctggcttttctggttgcaggctttcccatggtcacaggatgcactgtcagcatcaggtcccagagggccaccgtgtccattacagcagagtccagctgcagcatccagctcacgccctcatgggaattggcacaggcctggggcagggcttctgatggccatttgcttggcctcctgcattttagtccaactcacagtccactagcttcactcctttaaattcactttgaaacaggcctcatcccacttccaccagcaccatagaagaataattctgggcagaagtctgttttttttcatttttccaggacagttggatattgtcaggccacttgtgaccccagccatgtagtgagggtgctctttctctgtgcctgctccttatgagtgcagtggaaggaagccacacactggtcagtcatttcagaggcagcagatgcccagggagacccaagaaagagtcaggttagggagcagtgaaagtgaggagggaagacaattctgtgaactctgtaactcttaaaatttttgaaaactccatcgttaaacaacttttaaaagaaataactaaattttcaaatgagtaagcagtgccaccaactagtgttttgcccgatagaagagccagcatgttcacgttatttaaattaggtggaaaaatctaaacatttttatcttcataatttaaaaaatatatatgtatatattgcatattcactttttcctttaggtagagatgatttcaatccaaatactcttactttaaaaaatttcctttccccaagaatctccttgggactttgacttatttttaaagctgtgttggagctcatcttgttccctgatgtgtctcgagcccattggtagggtcatacaaagcccacggttacaagcagtggtaggattgcagccgtgggcctgctggacacacacatacaccaaagatgtatttggatctgggcaccccctcccaggatccctgtactcacgtgccagtctcctgactagagcactttactctgtttcctcagccctgcagcccctgggagcacacactgggtgcagccctgggccaggcacgggaggccctgccctgtgctgcccaggggctgtgtgcaccacatgagcacatttccctctggcctggcggcctccaggctggctgtggaaacagttcctgaggaaattagagattctatgaattgtaggagtattaaagaccaggctgttggcaccagaacttaaagcgatgactggatgtctctgtactgtatgtatctggttatcaagatgcctctgtgcagaaagtatgcctcccgtgggtatacgtttttaccttttttaaaaaacatttttgtagaaaaaataattaaatcccctttttggaaacttactgcaggttttgtgccttgacaacctctccctatgtgaggtttgtaaaaagtgtcctgtgacttaacacagaaacgcaataaacacacacaaaatagtttcatgagtgattcttcagatgcccttcccaactggttagttgatcaagaattttgggggtgggggttgcggagaaatcaagtttaaaattccttctgattaaaaaaatatagtggaatacaattgtctgccgtttccccttcttaatgtatatattgtgagtatttattagattcgtaggtcatattacttatcaactgagccaaatgtctgtgtgcaattgtgtttcctttaccttgtaaaattttgtacagcataaataagtaaaaaaatcactgtttttctcaactttttcaaaa

SEQ ID NO: 278487 - protein, 138 aa, Artificial Sequence
  derived and/or modified sequence
MAKQPSDVSSECDREGRQLQPAERPPQLRPGAPTSLQTEPQDRSPAPMSCDKSTQTPSPPCQAFNHYLSAMASMRQAEPADMRPEIWIAQELRRIGDEFNAYYARRVFLNNYQAAEDHPRMVILRLLRYIVRLVWRMH

SEQ ID NO: 278488 - DNA, 1522 bp, Artificial Sequence
  derived and/or modified sequence
acttcgctccgcgcagccgcctggtctgcagtttgttggagctctgcgtccagcgccgctgccgctgccgccgccgccgccgccgccgccgccgccgccgccgccgccactaccaccacttgattcttgcagccaccctgcgaaccctgccacactgcgatcgcatcatcgcggtattcggttcgctgcgttcccgccgccaccgcctcggcgccctttcttggcccttgttcccccaaatgtctgactctgactctcggactgagaaacgcaagaaaaaaagaccaaatggcaaagcaaccttctgatgtaagttctgagtgtgaccgagaaggtagacaattgcagcctgcggagaggcctccccagctcagacctggggcccctacctccctacagacagagccacaagacaggagcccagcacccatgagttgtgacaaatcaacacaaaccccaagtcctccttgccaggccttcaaccactatctcagtgcaatggcttccatgaggcaggctgaacctgcagatatgcgcccagagatatggatcgcccaagagttgcggcgtattggagacgagtttaacgcttactatgcaaggagggtatttttgaataattaccaagcagccgaagaccacccacgaatggttatcttacgactgttacgttacattgtccgcctggtgtggagaatgcattgacaggttctttgcggagccgagataccatgcagacattttgcttgttcaaaccaacaagacccagcaccgcggtctcctggtgccattattatgcagccagcggttctcttgtggagggggcaggtgacgtttcagaagacaccgagctggatgggactacctttctgttcatcaccacacagcagaatttctaatggaagtttgttgtgaatgtaaaggagggagcattctttgctttttaatatacaaaccatggttttttggagcaggattttgtgtaagaatggtgtttacatgcagtgtgttttccccctcaccttcaataaggtttttcaaaaaggaaatggaaactttttaaccaatttgtgaataacttttgtattaaaattttaagaacctacggcctattctcagaggattatgtaacccctgcagtggaaactgagccagctaacttaaaaagctgccttagtttatttttagagattacagaatttttaaacagggagacgtgtgatatactccctcccttccctactattgcctctctgacctttttaaattatttttaataccaaaagagttcttttgaaatggaactgattaaaagggcagagggtctgttgccagcctgcattgatataccagtcccatttgtaaatatttacgtacctttataaattcagttgcatctgtggcaaaatttcagactatttttgcgtctttcctcatcactttttgtgatgcaactccagtctggactcagatgcatagatttggtccagtgtattttcatgataaagtgaaattgagtcag

SEQ ID NO: 278489 - DNA, 482 bp, Artificial Sequence
  derived and/or modified sequence
gcggccggggcagcgcgggccagaggcgcggcgtgcggagccctcggctgcccggcggagcgcggcggcgggctggcgggaaggcgcgggctttgcgctgcgccggggactctgaacccgagtcccgggctttgtctcctgcgctgctttcgtggtgacggtcagggggcgcccggtcggcgaagggcgcgggccggacgccgcggggcttggtccctggcccggacgctgcgctctgaagggaaggcgcggacaaaaaaagaccaaatggcaaagcaaccttctgatgtaagttctgagtgtgaccgagaaggtagacaattgcagcctgcggagaggcctccccagctcagacctggggcccctacctccctacagacagagccacaaggtaatcctgaaggcaatcacggaggtgaaggggacagctgcccccacggcagccctcagggcccgctggccccacctgccagccctggccc

SEQ ID NO: 278490 - DNA, 572 bp, Artificial Sequence
  derived and/or modified sequence
gacgcgcgtcctccagcgactccgggaacccaaggcctccttcacctcgctcaaaattcacccgaaaatgcgctgagactttggcatggggctgcgctgtgtcccactgacgttacagaagcgcttatgaatttaaaaactgctccaggcggccggacggcgggacaacgcctcctcacttgctcctctacgaaaaaaagaccaaatggcaaagcaaccttctgatgtaagttctgagtgtgaccgagaaggtagacaattgcagcctgcggagaggcctccccagctcagacctggggcccctacctccctacagacagagccacaaggtaatcctgaaggcaatcacggaggtgaaggggacagctgcccccacggcagccctcagggcccgctggccccacctgccagccctggcccttttgctaccagatccccgcttttcatctttatgagaagatcctccctgctgtctcgatcctccagtgggtatttctcttttgacacagacaggagcccagcacccatgagttgtgacaaatcaacacaaaccccaagtcctccttgccagg

SEQ ID NO: 278491 - DNA, 546 bp, Artificial Sequence
  derived and/or modified sequence
acttcgctccgcgcagccgcctggtctgcagtttgttggagctctgcgtccagcgccgctgccgctgccgccgccgccgccgccgccgccgccgccgccgccgccgccactaccaccacttgattcttgcagccaccctgcgaaccctgccacactgcgatcgcatcatcgcggtattcggttcgctgcgttcccgccgccaccgcctcggcgccctttcttggcccttgttcccccaaatgtctgactctgactctcggactgagaaacgcaagaaaaaaagaccaaatggcaaagcaaccttctgatgtaagttctgagtgtgaccgagaaggtagacaattgcagcctgcggagaggcctccccagctcagacctggggcccctacctccctacagacagagccacaagcttccatgaggcaggctgaacctgcagatatgcgcccagagatatggatcgcccaagagttgcggcgtattggagacgagtttaacgcttactatgcaaggaggctggcaaaactcctggcatcctccacctga

SEQ ID NO: 278492 - DNA, 222 bp, Artificial Sequence
  derived and/or modified sequence
atgcggcaagccgagccggccgacatgcgaccagaaatctggatcgcccaagaactaagacgaattggcgatgaattcaatgcttactacgctcggcgtgtcatgatgttcagcctgcccgcattcctcctcacgccctctcccagcactctctattttttcaaaaagaccgtcactagttgcaattacatgttaattctggagatgattactgtggcctag

SEQ ID NO: 278493 - DNA, 222 bp, Artificial Sequence
  derived and/or modified sequence
atgaggcaggccgagcctgctgacatgaggcctgagatctggatcgcccaggagctgcggagaattggagatgagttcaatgcctactatgcccggcgggtgatgatgttcagcctgcctgccttcctgctgacccccagccccagcaccctgtacttcttcaagaagacagtgaccagctgcaactacatgctgatcctggagatgatcaccgtggcctag

SEQ ID NO: 278494 - DNA, 222 bp, Artificial Sequence
  derived and/or modified sequence
atgcggcaggccgagcccgccgacatgcggcccgagatctggatcgcccaggaactccggcgaatcggggatgagttcaacgcctactatgcccgaagagtgatgatgtttagcttgcctgctttcctgctgacaccctcaccttccacgttgtatttcttcaagaagactgttacatcatgtaattatatgctgatcctcgagatgattacagtggcttag

SEQ ID NO: 278495 - DNA, 222 bp, Artificial Sequence
  derived and/or modified sequence
atgaggcaggcagaaccagccgatatgcgaccggagatttggattgcccaagaactgcggcgtatcggagacgaattcaatgcctattatgcccgaagagtaatgatgttttccctgccagctttccttctcaccccctctccatctaccctgtacttctttaagaaaacagtcacgtcttgtaactatatgctgatcctggagatgatcacagtggcctag

SEQ ID NO: 278496 - DNA, 2030 bp, Artificial Sequence
  derived and/or modified sequence
gtgagatgggcttgcctctagagacttatctttggaactttcccagtgatctgtggaccacaatgtgatttttgttttgttttgttctgatgcagcttccatgaggcaggctgaacctgcagatatgcgcccagagatatggatcgcccaagagttgcggcgtattggagacgagtttaacgcttactatgcaaggagggtaatgatgttttctttacccgcttttctgctcacaccctccccttccacactatatttttttaaaaagacagtgacttcttgtaactacatgctaattctggaaatgattactgttgcctagttgtgacctttcattgtttctcctttcccatttttcatttgttttatgactaagtaatggcacttaaataaaataatacagtaggaggcagcaaaggaattttatgagcacagactttaaaacaatgctaaaaaagggattatttatagactttgagatagtctagaaatactattaacataggtttcaatccatgtagtgtgtttctgtactccccttgtgcattttaggtcaaagttaaaggtaatttttaaacaacatcttttgtcacttagcgcatgggagcgatgccagcactcatgtaaaagactctcctgcaatttgcagggtggcccgaggaagcagggagccattgcccttgcagagcccattgctgtctttggacatttaattgttgaaatgtattaggaggccgctaatcaatagcctgtaatttgggctgtaaaaactttatattatagataattgccacttattttgagctatgttcttgattttttaaaaattttagcctatgtcatcttctgtagttagtagaagcggtgttttttgtttgttttacctgggggcaatgtaggtgaccatttggacacctttttcacatgggacacttttgtttgtttgtttgtttgtttgtgtgtgtgtttgtttttgagacggagtcttgctctgtcaccaggctgaaagattgcaccattgcactctagcctccacaagagcgaaactccatctaaaaaaaaaaatagttcaaaacactggatgatgctgtggatagtgacaccgtgatcttcaaagccacagacacccgtcttgatacttgttagattaaaaacagtccattgtctggaatcacacttaatggtccattgttaaatattgggggcagaaatctgggaaggtaatgggaggccgttttgggaaataatgaattcaaattacctgctgtcttcacaagggaattatcctctcttggcaagcgagtgtatctcactgtgctgctttaggatggatattaaccttttaaatgttgagtgtctttatttgcttaatgctattacaatgccttgtctaaagtgttagtcttttattgccacgagccttgcaaagcctgacaggatattttcccgtttttccagttagagaaatagaggaagttgtcgtgtagttgtcatgtattcagtccacttaagggcagtggggaagcgtttgagacggagctgtggaggctgaatccttgaaggaggaggtgagagaggcacaggtgagcgcaaagtcccagtgcatgtcccctcttctctcccgatgcagtgtcattcccaggtgaacctgccgggctgaacggcctggcccctctattcagtcggagttttactactccagtggattttggtaacttcatttggaaataatttcagacttacaaaaatgttgcaagaatgacacaaagaaccacccttttatatctgccccacttgttttcatgttttccctctttgcacacatgtacaatttatttcagaaaaaactacagacatgatactgcttttcctacactaaaaatacttcagtgtatatttcccaaaaataggagtaatcccttatgtaaccacagtgtaattatcaaaattcacaaatagtgttacaaaactattatctgatctatggaccttattcagattttaccacttgtcccaacaatgcccttctc

SEQ ID NO: 278497 - DNA, 222 bp, Artificial Sequence
  derived and/or modified sequence
atgagacaggccgagcccgccgacatgagacccgagatctggatcgcccaggagctgagaagaatcggcgacgagttcaacgcctactacgccagaagagtgatgatgttcagcctgcccgccttcctgctgacccccagccccagcaccctgtacttcttcaagaagaccgtgaccagctgcaactacatgctgatcctggagatgatcaccgtggcctag

SEQ ID NO: 278498 - protein, 89 aa, Artificial Sequence
  derived and/or modified sequence
MCQKEVMEQSAGIMYRKSCASSAACLIASAGYQSFCSPGKLNSVCISCCNTPLCNGPRPKKRGSSASALRPGLRTTILFLKLALFSAHC

SEQ ID NO: 278499 - DNA, 495 bp, Artificial Sequence
  derived and/or modified sequence
atgcaggcccccagagccgcccccgccgcccccctgagctacgacagaagacccagagacagcggcagaatgtgggtgctgggcatcgccgccaccttctgcggcctgttcctgctgcccggcttcgccctgcagatccagtgctaccagtgcgaggagttccagctgaacaacgactgcagcagccccgagttcatcgtgaactgcaccgtgaacgtgcaggacatgtgccagaaggaggtgatggagcagagcgccggcatcatgtacagaaagagctgcgccagcagcgccgcctgcctgatcgccagcgccggctaccagagcttctgcagccccggcaagctgaacagcgtgtgcatcagctgctgcaacacccccctgtgcaacggccccagacccaagaagagaggcagcagcgccagcgccctgagacccggcctgagaaccaccatcctgttcctgaagctggccctgttcagcgcccactgctag

SEQ ID NO: 278500 - DNA, 495 bp, Artificial Sequence
  derived and/or modified sequence
atgcaggctcctcgggcggcacctgcagcacccctcagctacgaccgcaggcctcgggatagcgggagaatgtgggttctcgggatcgccgccacattttgtgggctgttccttctccccgggtttgccctgcagatccagtgctaccagtgtgaggaatttcagctgaataatgattgttcctcccctgagttcatcgtgaactgtaccgtgaacgtgcaggatatgtgtcagaaggaggttatggagcagtccgccggaattatgtataggaagagctgcgccagcagtgccgcctgtctgatcgcatccgccggatatcagtcattctgctcacctggtaagttaaatagcgtgtgtatcagctgctgtaacacccctctgtgcaacggtccaaggcccaagaaaaggggctctagcgccagtgccctacgccccggcctgcggacaaccatccttttcctgaaacttgccttattttcagcacactgttag

SEQ ID NO: 278501 - DNA, 1776 bp, Artificial Sequence
  derived and/or modified sequence
atgcaggctccgcgagcggcacctgcggctcctctaagctacgaccgtcgtccccgggactccgggagaatgtgggtcctaggcatcgcggcaactttttgcggattgttcttgcttccaggctttgcgctgcaaatccagtgctaccagtgtgaagaattccagctgaacaacgactgctcctcccccgagttcattgtgaattgcacggtgaacgttcaagacatgtgtcagaaagaagtgatggagcaaagtgccgggatcatgtaccgcaagtcctgtgcatcatcagcggcctgtctcatcgcctctgccgggtaccagtccttctgctccccagggaaactgaactcagtttgcatcagctgctgcaacacccctctttgtaacgggccaaggcccaagaaaaggggaagttctgcctcggccctcaggccagggctccgcaccaccatcctgttcctcaaattagccctcttctcggcacactgctgaagctgaaggagatgccaccccctcctgcattgttcttccagccctcgcccccaaccccccacctccctgagtgagtttcttctgggtgtccttttattctgggtagggagcgggagtccgtgttctcttttgttcctgtgcaaataatgaaagagctcggtaaagcattctgaataaattcagcctgactgaattttcagtatgtacttgaaggaaggaggtggagtgaaagttcacccccatgtctgtgtaaccggagtcaaggccaggctggcagagtcagtccttagaagtcactgaggtgggcatctgccttttgtaaagcctccagtgtccattccatccctgatgggggcatagtttgagactgcagagtgagagtgacgttttcttagggctggagggccagttcccactcaaggctccctcgcttgacattcaaacttcatgctcctgaaaaccattctctgcagcagaattggctggtttcgcgcctgagttgggctctagtgactcgagactcaatgactgggacttagactggggctcggcctcgctctgaaaagtgcttaagaaaatcttctcagttctccttgcagaggactggcgccgggacgcgaagagcaacgggcgctgcacaaagcgggcgctgtcggtggtggagtgcgcatgtacgcgcaggcgcttctcgtggttggcgtgctgcagcgacaggcggcagcacagcacctgcacgaacacccgccgaaactgctgcgaggacaccgtgtacaggagcgggttgatgaccgagctgaggtagaaaaacgtctccgagaaggggaggaggatcatgtacgcccggaagtaggacctcgtccagtcgtgcttgggtttggccgcagccatgatcctccgaatctggttgggcatccagcatacggccaatgtcacaacaatcagccctgggcagacacgagcaggagggagagacagagaaaagaaaaacacagcatgagaacacagtaaatgaataaaaccataaaatatttagcccctctgttctgtgcttactggccaggaaatggtaccaatttttcagtgttggacttgacagcttcttttgccacaagcaagagagaatttaacactgtttcaaacccgggggagttggctgtgttaaagaaagaccattaaatgctttagacagtgtatttataccagttgatgtctgttaattttaaaaaaatgttttcattggtgtttgtttgcgtatccagaaagcagttcatgttatccata

SEQ ID NO: 278502 - DNA, 495 bp, Artificial Sequence
  derived and/or modified sequence
atgcaggccccccgggccgccccagctgcccccctgtcctatgaccggcggccccgggacagcggccgcatgtgggtgctgggcattgctgccaccttctgtggcctcttcctgctgcccggctttgccctgcagatccagtgctaccagtgtgaggagttccagctgaacaatgactgcagcagccctgagttcatcgtgaactgcaccgtgaatgtgcaggacatgtgccagaaggaggtgatggagcagagcgctggcatcatgtacaggaagagctgtgccagcagcgctgcctgcctgattgccagcgctggctaccagagcttctgcagccctgggaagctgaacagcgtgtgcatcagctgctgcaacacccccctgtgcaatggcccccggcccaagaagaggggcagcagcgccagcgccctgcggcccggcctgcggaccaccatcctcttcctgaagctggccctcttcagcgcccactgctag

SEQ ID NO: 278503 - DNA, 495 bp, Artificial Sequence
  derived and/or modified sequence
atgcaggccccccgggccgcccccgccgcccccctgagctacgaccgcagaccacgcgacagcggccggatgtgggtcttaggtatagcagccacattctgtggactctttcttttacccggcttcgccctccaaatccagtgctatcagtgtgaagaatttcaacttaataacgattgcagcagccctgaatttatcgtgaattgtacggtgaatgtccaagacatgtgtcaaaaagaggtgatggagcagtcagccggaatcatgtaccggaagagctgcgcttcctctgcagcttgtttgatcgcatccgccgggtatcagagcttttgctcgccaggtaagcttaacagtgtgtgtatcagctgttgcaacacaccgctctgtaatggcccccgccctaaaaagcgaggaagcagcgcaagtgctcttcggcccgggctgagaactactatccttttcctgaaactggctttattttccgcccactgctag

SEQ ID NO: 278504 - DNA, 495 bp, Artificial Sequence
  derived and/or modified sequence
atgcaagcccctagggccgctcctgccgcaccgctgagctatgacagacggcctagagattccggcagaatgtgggtcttaggaattgctgccactttctgcggacttttcctcctgcccggatttgccctgcagatccaatgctatcagtgtgaagaatttcagttgaacaatgactgttcaagtcccgaatttatcgtcaattgtaccgtaaacgtccaggacatgtgccaaaaggaggtcatggagcagtcggctggaatcatgtaccgaaagtcatgtgccagctctgccgcttgcctgattgcatcagcgggttaccagtctttctgcagcccaggaaagctgaattccgtatgcataagctgttgcaatacaccactgtgtaatggcccacgaccgaagaagagggggtcctccgcatccgccctgagaccaggtctgcggactaccattctgttcttaaagttagctcttttctcagctcactgttag

SEQ ID NO: 278505 - DNA, 270 bp, Artificial Sequence
  derived and/or modified sequence
atgtgccagaaggaggtgatggagcagagcgccggcatcatgtacagaaagagctgcgccagcagcgccgcctgcctgatcgccagcgccggctaccagagcttctgcagccccggcaagctgaacagcgtgtgcatcagctgctgcaacacccccctgtgcaacggccccagacccaagaagagaggcagcagcgccagcgccctgagacccggcctgagaaccaccatcctgttcctgaagctggccctgttcagcgcccactgctag

SEQ ID NO: 278506 - DNA, 270 bp, Artificial Sequence
  derived and/or modified sequence
atgtgtcagaaggaagtcatggaacaatccgctggaattatgtatcgaaagtcatgtgccagcagcgctgcctgtctaatcgctagcgcagggtatcagagcttttgtagtcctggcaaactcaactcagtgtgcatctcttgctgcaacactccactgtgtaatgggccacggcccaagaagcgcggcagcagcgcctctgccttgcgcccagggctgaggactaccatcctctttctgaaactggccctcttctccgctcactgttag

SEQ ID NO: 278507 - DNA, 270 bp, Artificial Sequence
  derived and/or modified sequence
atgtgccagaaggaggtgatggagcagagcgctggcatcatgtacaggaagagctgtgccagcagcgctgcctgcctgattgccagcgctggctaccagagcttctgcagccctgggaagctgaacagcgtgtgcatcagctgctgcaacacccccctgtgcaatggcccccggcccaagaagaggggcagcagcgccagcgccctgcggcccggcctgcggaccaccatcctcttcctgaagctggccctcttcagcgcccactgctag

SEQ ID NO: 278508 - DNA, 270 bp, Artificial Sequence
  derived and/or modified sequence
atgtgccagaaggaggtgatggagcagagcgccggcatcatgtaccggaagtcttgtgcctccagcgcggcttgtctaattgcttcagccggctatcaatcattttgctctcccggaaaactaaattccgtatgtataagctgctgcaacacccccctttgtaacggccctcggccaaagaaacgtggatccagcgccagcgcgctgagacccggactcagaaccaccattctgtttctaaagctggcgttattcagcgctcactgttag

SEQ ID NO: 278509 - DNA, 270 bp, Artificial Sequence
  derived and/or modified sequence
atgtgccagaaggaggttatggagcaatccgcgggaattatgtaccgcaagtcgtgcgcaagttccgcagcttgtctgattgcatctgcaggctaccaaagtttctgtagccctggaaagctcaacagcgtctgtatttcatgctgtaatacccccctgtgcaatggaccgaggcctaagaagcgcggatcctcggccagcgctttgcgtcctggccttcgtacgaccattctattcctcaagctcgcactctttagtgcacactgctag

SEQ ID NO: 278510 - protein, 69 aa, Artificial Sequence
  derived and/or modified sequence
MEGKRQLEKRDFGKRLSLDSSLVEYMDSNKYIEHLLTQLEEQHRSLWREKLAVARLQREVAQRTSEGAM

SEQ ID NO: 278511 - protein, 178 aa, Artificial Sequence
  derived and/or modified sequence
MDSNKYIEHLLTQLEEQHRSLWREKLAVARLQREVAQRTSEGAMHEKLIHELEEERHLRLQSEKRLQEVTLESERNRIQMRSLQQQFSRMEETVRNLLQSQGSPEQKKEETVNIMVYQEKLSEEERKHKEALEDLHMVVDEDSRSESSSTDEGKEKTKLLLERLKALERNGWNWHPVS

SEQ ID NO: 278512 - DNA, 432 bp, Artificial Sequence
  derived and/or modified sequence
atgcaggccttcagaatctgggacgtgaaccagaagaccttctacctgagaaacaaccagctggtggccggctacctgcagggccccaacgtgaacctggaggagaagatcgacgtggtgcccatcgagccccacgccctgttcctgggcatccacggcggcaagatgtgcctgagctgcgtgaagagcggcgacgagaccagactgcagctggaggccgtgaacatcaccgacctgagcgagaacagaaagcaggacaagagattcgccttcatcagaagcgacagcggccccaccaccagcttcgagagcgccgcctgccccggctggttcctgtgcaccgccatggaggccgaccagcccgtgagcctgaccaacatgcccgacgagggcgtgatggtgaccaagttctacttccaggaggacgagtag

SEQ ID NO: 278513 - DNA, 432 bp, Artificial Sequence
  derived and/or modified sequence
atgcaggctttccgcatttgggatgttaaccagaaaacattttatctcaggaataatcaacttgttgccgggtatttacagggcccaaacgtgaatctcgaagaaaagatcgatgttgtgccaatcgagccgcacgccctgtttctcgggatccatggcggcaagatgtgtctgtcgtgcgtgaaatctggtgatgaaacccgtctccagctggaggcggtcaacatcacagacctgtcagagaatagaaaacaggacaaacggttcgcctttatcagatcggacagtggccccaccacttccttcgaaagcgctgcctgccctggatggttcttatgtactgccatggaagccgatcagcctgtgtccttaactaacatgcccgacgaaggagtgatggttacaaaattttacttccaggaagatgaatag

SEQ ID NO: 278514 - DNA, 432 bp, Artificial Sequence
  derived and/or modified sequence
atgcaggccttccgcatctgggatgtgaaccagaagaccttctacctgaggaacaaccagctggtggccggctacctgcagggccccaacgtgaacctggaggagaagattgatgtggtgcccatcgagccccacgccctcttcctgggcatccacggcggcaagatgtgcctgagctgtgtgaagtctggagatgagacccggctgcagctggaggccgtgaacatcacagacctgtctgaaaataggaagcaggacaagagatttgccttcatccgcagtgacagcggccccaccaccagctttgagagcgctgcctgccccggctggttcctgtgcacagccatggaggccgaccagcctgtgtccctgaccaacatgccagatgaaggagtgatggtgaccaagttctacttccaggaggatgaatag

SEQ ID NO: 278515 - DNA, 432 bp, Artificial Sequence
  derived and/or modified sequence
atgcaggccttccggatctgggacgtgaaccagaagaccttctacctacgcaacaaccaattggttgcggggtaccttcaaggtccaaatgtaaatctggaggagaagattgatgtggtgccgatcgagccgcatgccctcttcctgggaatccacggcggcaaaatgtgtctgtcgtgcgtaaaaagtggcgacgaaacccggttacagctggaggctgtcaacatcactgacctgtctgaaaataggaagcaagataagcggtttgcttttatccggtccgatagtgggcctacaacaagtttcgagagcgctgcctgccctggctggttcctttgtacagccatggaagctgaccagccagtttcattgacaaatatgcctgatgagggagtaatggtcaccaaattctattttcaggaggacgagtag

SEQ ID NO: 278516 - DNA, 432 bp, Artificial Sequence
  derived and/or modified sequence
atgcaggctttccgaatctgggatgtgaatcagaagaccttctacctgaggaacaatcagctcgtggcgggataccttcagggacccaacgtaaacctggaagagaaaattgatgtggtccccattgagccacacgcgttgttcctcggaatacacggaggaaaaatgtgcctctcttgcgtgaaaagcggggacgaaaccaggctgcagctcgaggcggtgaacataaccgacctgtccgagaatagaaagcaagataaacggttcgcctttatacgatccgacagtgggccaacaaccagtttcgagagcgctgcctgcccaggatggttcctctgcactgcaatggaggcggatcaacccgtgagtttaacaaacatgcctgacgaaggggtgatggttactaaattttatttccaggaagatgagtag

SEQ ID NO: 278517 - protein, 690 aa, Artificial Sequence
  derived and/or modified sequence
MPWEEPAGEKPSCSHSQKAFHMEPAQKPCFTTDMVTWALLCISAETVRGEAPSQPRGIPHRSPVSVDDLWLEKTQRKKLQKQAHVERRLHIGAVHKDGVKCWRKTIITSPESLNLPRRSHPLSQSAPTGLNHMGWPEHTPGTAMPDGALDTAVCADEVGSEEDLYDDLHSSSHHYSHPGGGGEQLAINELISDGSVVCAEALWDHVTMDDQELGFKAGDVIEVMDATNREWWWGRVADGEGWFPASFVRLRVNQDEPADDDAPLAGNSGAEDGGAEAQSSKDQMRTNVINEILSTERDYIKHLRDICEGYVRQCRKRADMFSEEQLRTIFGNIEDIYRCQKAFVKALEQRFNRERPHLSELGACFLEHQADFQIYSEYCNNHPNACVELSRLTKLSKYVYFFEACRLLQKMIDISLDGFLLTPVQKICKYPLQLAELLKYTHPQHRDFKDVEAALHAMKNVAQLINERKRRLENIDKIAQWQSSIEDWEGEDLLVRSSELIYSGELTRVTQPQAKSQQRMFFLFDHQLIYCKKDLLRRDVLYYKGRLDMDGLEVVDLEDGKDRDLHVSIKNAFRLHRGATGDSHLLCTRKPEQKQRWLKAFAREREQVQLDQETGFSITELQRKQAMLNASKQQVTGKPKAVGRPCYLTRQKHPALPSNRPQQQVLVLAEPRRKPSTFWHSISRLAPFRK

SEQ ID NO: 278518 - protein, 630 aa, Artificial Sequence
  derived and/or modified sequence
MPWEEPAGEKPSCSHSQKAFHMEPAQKPCFTTDMVTWALLCISAETVRGEAPSQPRGIPHRSPVSVDDLWLEKTQRKKLQKQAHVERRLHIGAVHKDGVKCWRKTIITSPESLNLPRRSHPLSQSAPTGLNHMGWPEHTPGTAMPDGALDTAVCADEVGSEEDLYDDLHSSSHHYSHPGGGGEQLAINELISDGSVVCAEALWDHVTMDDQELGFKAGDVIEVMDATNREWWWGRVADGEGWFPASFVRLRVNQDEPADDDAPLAGNSGAEDGGAEAQSSKDQMRTNVINEILSTERDYIKHLRDICEQADFQIYSEYCNNHPNACVELSRLTKLSKYVYFFEACRLLQKMIDISLDGFLLTPVQKICKYPLQLAELLKYTHPQHRDFKDVEAALHAMKNVAQLINERKRRLENIDKIAQWQSSIEDWEGEDLLVRSSELIYSGELTRVTQPQAKSQQRMFFLFDHQLIYCKKDLLRRDVLYYKGRLDMDGLEVVDLEDGKDRDLHVSIKNAFRLHRGATGDSHLLCTRKPEQKQRWLKAFAREREQVQLDQETGFSITELQRKQAMLNASKQQVTGKPKAVGRPCYLTRQKHPALPSNRPQQQVLVLAEPRRKPSTFWHSISRLAPFRK

SEQ ID NO: 278519 - protein, 619 aa, Artificial Sequence
  derived and/or modified sequence
MRPDGQQALDAVVRSFDCHSEAALRQRNDVIYCSLPRTAQGIVQREDQLEVLVSLREVWGRRRGRDGTCTGAMPDGALDTAVCADEVGSEEDLYDDLHSSSHHYSHPGGGGEQLAINELISDGSVVCAEALWDHVTMDDQELGFKAGDVIEVMDATNREWWWGRVADGEGWFPASFVRLRVNQDEPADDDAPLAGNSGAEDGGAEAQSSKDQMRTNVINEILSTERDYIKHLRDICEGYVRQCRKRADMFSEEQLRTIFGNIEDIYRCQKAFVKALEQRFNRERPHLSELGACFLEHQADFQIYSEYCNNHPNACVELSRLTKLSKYVYFFEACRLLQKMIDISLDGFLLTPVQKICKYPLQLAELLKYTHPQHRDFKDVEAALHAMKNVAQLINERKRRLENIDKIAQWQSSIEDWEGEDLLVRSSELIYSGELTRVTQPQAKSQQRMFFLFDHQLIYCKKDLLRRDVLYYKGRLDMDGLEVVDLEDGKDRDLHVSIKNAFRLHRGATGDSHLLCTRKPEQKQRWLKAFAREREQVQLDQETGFSITELQRKQAMLNASKQQVTGKPKAVGRPCYLTRQKHPALPSNRPQQQVLVLAEPRRKPSTFWHSISRLAPFRK

SEQ ID NO: 278520 - protein, 461 aa, Artificial Sequence
  derived and/or modified sequence
MWQLTSLLLFVATWGISGTPAPLDSVFSSSERAHQVLRIRKRANSFLEELRHSSLERECIEEICDFEEAKEIFQNVDDTLAFWSKHVDGDQCLVLPLEHPCASLCCGHGTCIDGIGSFSCDCRSGWEGRFCQREVSFLNCSLDNGGCTHYCLEEVGWRRCSCAPGYKLGDDLLQCHPAVKFPCGRPWKRMEKKRSHLKRDTEDQEDQVDPRLIDGKMTRRGDSPWQVVLLDSKKKLACGAVLIHPSWVLTAAHCMDESKKLLVRLGEYDLRRWEKWELDLDIKEVFVHPNYSKSTTDNDIALLHLAQPATLSQTIVPICLPDSGLAERELNQAGQETLVTGWGYHSSREKEAKRNRTFVLNFIKIPVVPHNECSEVMSNMVSENMLCAGILGDRQDACEGDSGGPMVASFHGTWFLVGLVSWGEGCGLLHNYGVYTKVSRYLDWIHGHIRDKEAPQKSWAP

SEQ ID NO: 278521 - protein, 116 aa, Artificial Sequence
  derived and/or modified sequence
MWQLTSLLLFVATWGISGTPAPLDSVFSSSERAHQVLRIRKRANSFLEELRHSSLERECIEEICDFEEAKEIFQNVDDTLAFWSKHVDGDQCLVLPLEHPCASLCCGHGTCIDGIG

SEQ ID NO: 278522 - protein, 126 aa, Artificial Sequence
  derived and/or modified sequence
MWQLTSLLLFVATWGISGTPAPLDSVFSSSERAHQVLRIRKRANSFLEELRHSSLERECIEEICDFEEAKEIFQNVDDTLAFWSKHVDGDQCLVLPLEHPCASLCCGHGTCIDGIGSFSCDCRSGW

SEQ ID NO: 278523 - DNA, 1773 bp, Artificial Sequence
  derived and/or modified sequence
aactcgaactccaggctgtcatggcggcaggacggcgaacttgcagtatctccacgacccgcccctacaggtgccagtgcctccagaatgtggcagctcacaagcctcctgctgttcgtggccacctggggaatttccggcacaccagctcctcttgactcagtgttctccagcagcgagcgtgcccaccaggtgctgcggatccgcaaacgtgccaactccttcctggaggagctccgtcacagcagcctggagcgggagtgcatagaggagatctgtgacttcgaggaggccaaggaaattttccaaaatgtggatgacacactggccttctggtccaagcacgtcgacggtgaccagtgcttggtcttgcccttggagcacccgtgcgccagcctgtgctgcgggcacggcacgtgcatcgacggcatcggcagcttcagctgcgactgccgcagcggctgggagggccgcttctgccagcgcgaggtgagcttcctcaattgctcgctggacaacggcggctgcacgcattactgcctagaggaggtgggctggcggcgctgtagctgtgcgcctggctacaagctgggggacgacctcctgcagtgtcaccccgcagtgaagttcccttgtgggaggccctggaagcggatggagaagaagcgcagtcacctgaaacgagacacagaagaccaagaagaccaagtagatccgcggctcattgatgggaagatgaccaggcggggagacagcccctggcaggtggtcctgctggactcaaagaagaagctggcctgcggggcagtgctcatccacccctcctgggtgctgacagcggcccactgcatggatgagtccaagaagctccttgtcaggcttggagagtatgacctgcggcgctgggagaagtgggagctggacctggacatcaaggaggtcttcgtccaccccaactacagcaagagcaccaccgacaatgacatcgcactgctgcacctggcccagcccgccaccctctcgcagaccatagtgcccatctgcctcccggacagcggccttgcagagcgcgagctcaatcaggccggccaggagaccctcgtgacgggctggggctaccacagcagccgagagaaggaggccaagagaaaccgcaccttcgtcctcaacttcatcaagattcccgtggtcccgcacaatgagtgcagcgaggtcatgagcaacatggtgtctgagaacatgctgtgtgcgggcatcctcggggaccggcaggatgcctgcgagggcgacagtggggggcccatggtcgcctccttccacggcacctggttcctggtgggcctggtgagctggggtgagggctgtgggctccttcacaactacggcgtttacaccaaagtcagccgctacctcgactggatccatgggcacatcagagacaaggaagccccccagaagagctgggcaccttagcgaccctccctgcagggctgggcttttgcatggcaatggatgggacattaaagggacatgtaacaagcacaccggcctgctgttctgtccttccatccctcttttgggctcttctggagggaagtaacatttactgagcacctgttgtatgtcacatgccttatgaatagaatcttaactcctagagcaactctgtggggtggggaggagcagatccaagttttgcggggtctaaagctgtgtgtgttgagggggatactctgtttatgaaaaagaataaaaaacacaaccacgaagcca

SEQ ID NO: 278524 - DNA, 598 bp, Artificial Sequence
  derived and/or modified sequence
ctgcattctggagctgctttctaggcaggcagtgtgagctcagccccacgtagagcgggcagccgaggccttctgaggctatgtctctagcgaacaaggaccctcaatcccagcttccgccctgacggccagcacacagggacagccctttcattccgcttccacctgggggtgcaggcagagcagcagcgggggtaggcactgcccggagctcagaagtcctcctcagacaggtgccagtgcctccagaatgtggcagctcacaagcctcctgctgttcgtggccacctggggaatttccggcacaccagctcctcttgactcagtgttctccagcagcgagcgtgcccaccaggtgctgcggatccgcaaacgtgccaactccttcctggaggagctccgtcacagcagcctggagcgggagtgcatagaggagatctgtgacttcgaggaggccaaggaaattttccaaaatgtggatgacacactggccttctggtccaagcacgtcgacggtgaccagtgcttggtcttgcccttggagcacccgtgcgccagcctgtgctgcgggcacggcacgtgcatcgacggcatcggc

SEQ ID NO: 278525 - DNA, 581 bp, Artificial Sequence
  derived and/or modified sequence
actcgaactccaggctgtcatggcggcaggacggcgaacttgcagtatctccacgacccgcccctcttccgccctgacggccagcacacagggacagccctttcattccgcttccacctgggggtgcaggcagagcagcagcgggggtaggcactgcccggagctcagaagtcctcctcagacaggtgccagtgcctccagaatgtggcagctcacaagcctcctgctgttcgtggccacctggggaatttccggcacaccagctcctcttgactcagtgttctccagcagcgagcgtgcccaccaggtgctgcggatccgcaaacgtgccaactccttcctggaggagctccgtcacagcagcctggagcgggagtgcatagaggagatctgtgacttcgaggaggccaaggaaattttccaaaatgtggatgacacactggccttctggtccaagcacgtcgacggtgaccagtgcttggtcttgcccttggagcacccgtgcgccagcctgtgctgcgggcacggcacgtgcatcgacggcatcggcagcttcagctgcgactgccgcagcggctggg

SEQ ID NO: 278526 - protein, 495 aa, Artificial Sequence
  derived and/or modified sequence
MWQLTSLLLFVATWGISGTPAPLDSVFSSSERAHQVLRIRKRANSFLEELRHSSLERECIEEICDFEEAKEIFQNVDDTLAFWSKHVDGDQCLVLPLEHPCASLCCGHGTCIDGIGSFSCDCRSGWEGRFCQRGEGERWMLAGGGAGLGPGWGRGTSTSCPRPPLPAEVSFLNCSLDNGGCTHYCLEEVGWRRCSCAPGYKLGDDLLQCHPAVKFPCGRPWKRMEKKRSHLKRDTEDQEDQVDPRLIDGKMTRRGDSPWQVVLLDSKKKLACGAVLIHPSWVLTAAHCMDESKKLLVRLGEYDLRRWEKWELDLDIKEVFVHPNYSKSTTDNDIALLHLAQPATLSQTIVPICLPDSGLAERELNQAGQETLVTGWGYHSSREKEAKRNRTFVLNFIKIPVVPHNECSEVMSNMVSENMLCAGILGDRQDACEGDSGGPMVASFHGTWFLVGLVSWGEGCGLLHNYGVYTKVSRYLDWIHGHIRDKEAPQKSWAP

SEQ ID NO: 278527 - protein, 516 aa, Artificial Sequence
  derived and/or modified sequence
MAAGRRTCSISTTRPCASASRMWQLTSLLLFVATWGISGTPAPLDSVFSSSERAHQVLRIRKRANSFLEELRHSSLERECIEEICDFEEAKEIFQNVDDTLAFWSKHVDGDQCLVLPLEHPCASLCCGHGTCIDGIGSFSCDCRSGWEGRFCQRGEGERWMLAGGGAGLGPGWGRGTSTSCPRPPLPAEVSFLNCSLDNGGCTHYCLEEVGWRRCSCAPGYKLGDDLLQCHPAVKFPCGRPWKRMEKKRSHLKRDTEDQEDQVDPRLIDGKMTRRGDSPWQVVLLDSKKKLACGAVLIHPSWVLTAAHCMDESKKLLVRLGEYDLRRWEKWELDLDIKEVFVHPNYSKSTTDNDIALLHLAQPATLSQTIVPICLPDSGLAERELNQAGQETLVTGWGYHSSREKEAKRNRTFVLNFIKIPVVPHNECSEVMSNMVSENMLCAGILGDRQDACEGDSGGPMVASFHGTWFLVGLVSWGEGCGLLHNYGVYTKVSRYLDWIHGHIRDKEAPQKSWAP

SEQ ID NO: 278528 - protein, 420 aa, Artificial Sequence
  derived and/or modified sequence
MWMTHWPSGPSTSTVTSAWSCPWSTRAPACAAGTARASTASAASAATAAAAGRAASASAVRGRGGCWRGGAGLGPGWGRGTSTSCPRPPLPAEVSFLNCSLDNGGCTHYCLEEVGWRRCSCAPGYKLGDDLLQCHPAVKFPCGRPWKRMEKKRSHLKRDTEDQEDQVDPRLIDGKMTRRGDSPWQVVLLDSKKKLACGAVLIHPSWVLTAAHCMDESKKLLVRLGEYDLRRWEKWELDLDIKEVFVHPNYSKSTTDNDIALLHLAQPATLSQTIVPICLPDSGLAERELNQAGQETLVTGWGYHSSREKEAKRNRTFVLNFIKIPVVPHNECSEVMSNMVSENMLCAGILGDRQDACEGDSGGPMVASFHGTWFLVGLVSWGEGCGLLHNYGVYTKVSRYLDWIHGHIRDKEAPQKSWAP

SEQ ID NO: 278529 - DNA, 1488 bp, Artificial Sequence
  derived and/or modified sequence
atgtggcagctgaccagcctgctgctgttcgtggccacctggggcatcagcggcacccccgcccccctggacagcgtgttcagcagcagcgagagagcccaccaggtgctgagaatcagaaagagagccaacagcttcctggaggagctgagacacagcagcctggagagagagtgcatcgaggagatctgcgacttcgaggaggccaaggagatcttccagaacgtggacgacaccctggccttctggagcaagcacgtggacggcgaccagtgcctggtgctgcccctggagcacccctgcgccagcctgtgctgcggccacggcacctgcatcgacggcatcggcagcttcagctgcgactgcagaagcggctgggagggcagattctgccagagaggcgagggcgagagatggatgctggccggcggcggcgccggcctgggccccggctggggcagaggcaccagcaccagctgccccagaccccccctgcccgccgaggtgagcttcctgaactgcagcctggacaacggcggctgcacccactactgcctggaggaggtgggctggagaagatgcagctgcgcccccggctacaagctgggcgacgacctgctgcagtgccaccccgccgtgaagttcccctgcggcagaccctggaagagaatggagaagaagagaagccacctgaagagagacaccgaggaccaggaggaccaggtggaccccagactgatcgacggcaagatgaccagaagaggcgacagcccctggcaggtggtgctgctggacagcaagaagaagctggcctgcggcgccgtgctgatccaccccagctgggtgctgaccgccgcccactgcatggacgagagcaagaagctgctggtgagactgggcgagtacgacctgagaagatgggagaagtgggagctggacctggacatcaaggaggtgttcgtgcaccccaactacagcaagagcaccaccgacaacgacatcgccctgctgcacctggcccagcccgccaccctgagccagaccatcgtgcccatctgcctgcccgacagcggcctggccgagagagagctgaaccaggccggccaggagaccctggtgaccggctggggctaccacagcagcagagagaaggaggccaagagaaacagaaccttcgtgctgaacttcatcaagatccccgtggtgccccacaacgagtgcagcgaggtgatgagcaacatggtgagcgagaacatgctgtgcgccggcatcctgggcgacagacaggacgcctgcgagggcgacagcggcggccccatggtggccagcttccacggcacctggttcctggtgggcctggtgagctggggcgagggctgcggcctgctgcacaactacggcgtgtacaccaaggtgagcagatacctggactggatccacggccacatcagagacaaggaggccccccagaagagctgggccccctag

SEQ ID NO: 278530 - DNA, 1551 bp, Artificial Sequence
  derived and/or modified sequence
atggccgccggcagaagaacctgcagcatcagcaccaccagaccctgcgccagcgccagcagaatgtggcagctgaccagcctgctgctgttcgtggccacctggggcatcagcggcacccccgcccccctggacagcgtgttcagcagcagcgagagagcccaccaggtgctgagaatcagaaagagagccaacagcttcctggaggagctgagacacagcagcctggagagagagtgcatcgaggagatctgcgacttcgaggaggccaaggagatcttccagaacgtggacgacaccctggccttctggagcaagcacgtggacggcgaccagtgcctggtgctgcccctggagcacccctgcgccagcctgtgctgcggccacggcacctgcatcgacggcatcggcagcttcagctgcgactgcagaagcggctgggagggcagattctgccagagaggcgagggcgagagatggatgctggccggcggcggcgccggcctgggccccggctggggcagaggcaccagcaccagctgccccagaccccccctgcccgccgaggtgagcttcctgaactgcagcctggacaacggcggctgcacccactactgcctggaggaggtgggctggagaagatgcagctgcgcccccggctacaagctgggcgacgacctgctgcagtgccaccccgccgtgaagttcccctgcggcagaccctggaagagaatggagaagaagagaagccacctgaagagagacaccgaggaccaggaggaccaggtggaccccagactgatcgacggcaagatgaccagaagaggcgacagcccctggcaggtggtgctgctggacagcaagaagaagctggcctgcggcgccgtgctgatccaccccagctgggtgctgaccgccgcccactgcatggacgagagcaagaagctgctggtgagactgggcgagtacgacctgagaagatgggagaagtgggagctggacctggacatcaaggaggtgttcgtgcaccccaactacagcaagagcaccaccgacaacgacatcgccctgctgcacctggcccagcccgccaccctgagccagaccatcgtgcccatctgcctgcccgacagcggcctggccgagagagagctgaaccaggccggccaggagaccctggtgaccggctggggctaccacagcagcagagagaaggaggccaagagaaacagaaccttcgtgctgaacttcatcaagatccccgtggtgccccacaacgagtgcagcgaggtgatgagcaacatggtgagcgagaacatgctgtgcgccggcatcctgggcgacagacaggacgcctgcgagggcgacagcggcggccccatggtggccagcttccacggcacctggttcctggtgggcctggtgagctggggcgagggctgcggcctgctgcacaactacggcgtgtacaccaaggtgagcagatacctggactggatccacggccacatcagagacaaggaggccccccagaagagctgggccccctag

SEQ ID NO: 278531 - DNA, 1263 bp, Artificial Sequence
  derived and/or modified sequence
atgtggatgacccactggcccagcggccccagcaccagcaccgtgaccagcgcctggagctgcccctggagcaccagagcccccgcctgcgccgccggcaccgccagagccagcaccgccagcgccgccagcgccgccaccgccgccgccgccggcagagccgccagcgccagcgccgtgagaggcagaggcggctgctggagaggcggcgccggcctgggccccggctggggcagaggcaccagcaccagctgccccagaccccccctgcccgccgaggtgagcttcctgaactgcagcctggacaacggcggctgcacccactactgcctggaggaggtgggctggagaagatgcagctgcgcccccggctacaagctgggcgacgacctgctgcagtgccaccccgccgtgaagttcccctgcggcagaccctggaagagaatggagaagaagagaagccacctgaagagagacaccgaggaccaggaggaccaggtggaccccagactgatcgacggcaagatgaccagaagaggcgacagcccctggcaggtggtgctgctggacagcaagaagaagctggcctgcggcgccgtgctgatccaccccagctgggtgctgaccgccgcccactgcatggacgagagcaagaagctgctggtgagactgggcgagtacgacctgagaagatgggagaagtgggagctggacctggacatcaaggaggtgttcgtgcaccccaactacagcaagagcaccaccgacaacgacatcgccctgctgcacctggcccagcccgccaccctgagccagaccatcgtgcccatctgcctgcccgacagcggcctggccgagagagagctgaaccaggccggccaggagaccctggtgaccggctggggctaccacagcagcagagagaaggaggccaagagaaacagaaccttcgtgctgaacttcatcaagatccccgtggtgccccacaacgagtgcagcgaggtgatgagcaacatggtgagcgagaacatgctgtgcgccggcatcctgggcgacagacaggacgcctgcgagggcgacagcggcggccccatggtggccagcttccacggcacctggttcctggtgggcctggtgagctggggcgagggctgcggcctgctgcacaactacggcgtgtacaccaaggtgagcagatacctggactggatccacggccacatcagagacaaggaggccccccagaagagctgggccccctag

SEQ ID NO: 278532 - DNA, 1488 bp, Artificial Sequence
  derived and/or modified sequence
atgtggcaattaacctcactgctcctcttcgtggccacatgggggatttccggtacgcccgctcctctcgatagcgtcttttcttctagtgaacgggcacatcaagtcctccgaatcagaaagcgcgccaactcttttctggaggagctccgccatagcagtctcgagcgcgagtgtatcgaggaaatctgcgacttcgaggaagcaaaggaaatcttccagaacgtggatgatacccttgcgttttggtccaaacatgtcgacggtgatcaatgcctcgtgctacccctcgaacacccctgtgcctcattgtgctgtggacacggcacatgtatagacggcatcggctctttcagctgtgactgtagaagcgggtgggagggaaggttttgtcagcgcggcgagggagagcggtggatgctagccggaggtggcgctggactagggccaggctggggaagaggtacgtcgacttcatgcccaagaccgcctctgccagccgaggtaagcttcttgaactgcagtctggataacgggggatgcactcactactgtctcgaagaggtcgggtggcgcagatgcagctgtgcaccgggatacaagttgggggacgatttgctccaatgccacccagcggtcaagttcccctgcggcagaccatggaagcggatggaaaagaagcggagtcacctgaagcgtgatactgaggatcaggaagatcaagtcgaccctcggctgattgacgggaagatgaccagacgcggagactcgccatggcaggtggtgctcctggacagcaagaaaaagcttgcctgcggggctgtcctgattcacccttcctgggtgctgactgccgcgcactgcatggacgaaagcaagaaactgctggttaggcttggcgaatatgacctgagacggtgggaaaagtgggagctggatctcgacatcaaagaggtgttcgtccatccaaactattccaagtctacgacggacaatgacatagccctcttacacctggctcagcctgctacattgagtcaaacaatagtgcctatctgcctacccgacagcggactggccgaaagagagttgaaccaggcaggccaggaaacactagtaacgggctggggataccatagttcgcgcgagaaagaggcaaagcgtaatcgtactttcgtgctgaatttcataaaaatcccagtagtgcctcacaacgagtgctcagaggtgatgtccaacatggtgagcgaaaacatgttatgtgccgggattctgggagaccgtcaggatgcctgtgagggtgacagtggcgggccgatggtggcaagctttcacgggacgtggttcctcgtgggactggtgagctggggggagggttgtggattgctgcacaactatggagtctacaccaaagtttcccgataccttgactggatacatgggcacatccgtgataaagaggcccctcaaaagtcttgggctccttag

SEQ ID NO: 278533 - DNA, 1551 bp, Artificial Sequence
  derived and/or modified sequence
atggccgcgggacgtcgtacatgttccatttcaacaacacgaccttgtgcgtccgccagccggatgtggcagctgacctctctacttctttttgtggcgacttggggaatttccggaacccctgcaccactggattctgttttcagcagcagcgaacgggcgcaccaggtgctgcgcattagaaagcgcgcaaattccttccttgaggagttacgccactcctcgctggaaagggaatgcatcgaggaaatctgtgattttgaggaagccaaggaaattttccagaacgttgatgataccctggccttctggtccaagcacgtagacggcgatcagtgcctggtgcttccgctggagcacccctgtgcctcactttgctgtggacacggtacctgtatcgacggtatcggtagctttagttgtgactgccgctctggctgggaagggagattctgccagcgaggtgagggggagcgctggatgctagctggtggtggggcaggactcgggccagggtggggaagaggaacctcaacgtcatgtcccagaccaccactgcctgctgaggtgtcttttcttaattgttccctcgataacggagggtgtacccactactgcctggaagaagtcggatggcgacgctgctcatgcgcccctgggtacaagctcggggatgatttgctgcagtgccacccagcagtcaaatttccatgtggacggccatggaagaggatggagaagaagcgatctcatttgaagagggatacggaagatcaggaggatcaggtcgacccaagactaatcgacggcaagatgacaaggcggggtgacagcccatggcaagttgtactgctggactcaaaaaagaaactggcatgtggcgccgtcttgattcacccctcatgggtgctgaccgccgcccactgcatggacgagtccaaaaagttgttggtgcggcttggcgaatacgatcttcgacggtgggaaaaatgggagctggacttggatatcaaagaggtgttcgtacatcccaattattcgaaatctaccactgataatgacatcgctctgctacacttggcacaaccagccactctgtcgcagaccattgtaccaatctgcttgcctgacagcgggctcgctgagagggagctgaaccaggccggacaggagaccctggtgacggggtggggatatcactcctcaagagagaaggaggccaagcggaataggaccttcgtgctcaactttatcaagatacctgttgttccacataacgagtgctcggaggttatgtcaaacatggtctccgagaacatgctctgtgccgggatactgggggatcgccaggacgcctgtgaaggcgattccggtggcccaatggttgcatcattccatggtacctggttcctagttggactggtgtcctggggcgaaggatgcggcctcctgcataattatggagtgtacaccaaggtgtcaagatacctggactggattcatggtcacatccgcgataaggaggccccccaaaagtcctgggccccctag

SEQ ID NO: 278534 - DNA, 1263 bp, Artificial Sequence
  derived and/or modified sequence
atgtggatgacccactggccatctggaccgtcaaccagtactgtgacctctgcttggagttgcccgtggtcgaccagagcaccggcatgcgccgctggcaccgcacgagcttctaccgcttccgctgctagcgccgctacagcggctgccgctggccgggcagccagtgcaagtgcagtgcggggccgaggagggtgctggaggggcggcgccggcctgggtccaggatggggacgcggaacctctactagttgccccagacccccactgcccgcagaagtgtctttcctcaattgctcattagacaacgggggctgcacccactactgtttggaagaggtcgggtggaggcggtgttcctgcgcccctggatataagcttggagacgacctgcttcagtgccaccccgctgtgaaatttccttgtggacggccctggaagcgtatggagaaaaagcgctctcacctgaagagggacaccgaggatcaggaggatcaagttgaccctcgcctgatcgacggtaaaatgactagacggggcgactctccctggcaagttgtactgcttgatagcaagaagaaactggcttgtggagcagtgctgattcacccctcatgggtgctgactgccgcccattgcatggatgagagcaagaagcttctcgttcgtctgggcgaatacgacctgagaaggtgggagaagtgggagttagacctcgatatcaaggaggtttttgtgcatccaaactatagcaaaagtacgaccgataacgacatcgccttgttgcatttggcccagccagcaacacttagccagacaattgtccctatatgtttgcctgattcaggacttgccgagagggaactgaaccaggctggtcaagaaacactggttaccggctgggggtatcacagcagtcgtgagaaagaggcaaaacgaaaccggacatttgtgctgaactttatcaagatcccggtcgtgccacacaacgagtgtagcgaagtcatgagcaacatggtcagcgaaaatatgctgtgcgccggtatacttggcgaccgacaggatgcatgtgagggcgactccggaggtccaatggttgccagtttccatggcacatggttcctcgtggggcttgtcagctggggagagggctgcggactgcttcacaactacggtgtctatacaaaggttagccgctacctcgattggattcacggccacatcagggataaagaggcaccacagaagtcctgggctccttag

SEQ ID NO: 278535 - DNA, 1488 bp, Artificial Sequence
  derived and/or modified sequence
atgtggcagctgaccagcctgctgctgtttgtggccacctggggcatcagcggcaccccagcccccctggacagcgtcttcagcagcagcgagcgggcccaccaggtgctgcgcatcaggaagagggccaacagcttcctggaggagctgcggcacagcagcctggagcgggagtgcatcgaggagatctgtgactttgaggaggccaaggagatcttccagaatgtggatgacaccctggccttctggagcaagcacgtggatggagaccagtgcctggtgctgcccctggagcacccctgtgccagcctgtgctgcggccacggcacctgcattgatggcatcggcagcttcagctgtgactgccgcagcggctgggagggccgcttctgccagagaggagagggggagcgctggatgctggccggcggcggggccggcctgggccctggctggggccggggcaccagcaccagctgccccaggcctcccctgcctgctgaggtgtccttcctgaactgcagcctggacaatggaggctgcacccactactgcctggaggaggtgggctggaggcgctgcagctgtgcccctggctacaagctgggagatgacctgctgcagtgccaccctgctgtgaagttcccctgtggccggccctggaagaggatggagaagaagaggagccacctgaagagggacacagaggaccaggaggaccaggtggacccccggctgattgatggcaagatgaccaggagaggagacagcccctggcaggtggtgctgctggacagcaagaagaagctggcctgtggggctgtgctgatccaccccagctgggtgctgacagctgcccactgcatggatgagagcaagaagctgctggtgcggctgggggagtatgacctgcggcgctgggagaagtgggagctggacctggacatcaaggaggtgtttgtgcaccccaactacagcaagagcaccacagacaatgacatcgccctgctgcacctggcccagcctgccaccctgagccagaccatcgtgcccatctgcctgcctgattctggcctggccgagcgggagctgaaccaggccggccaggagaccctggtgacaggctggggctaccacagcagccgggagaaggaggccaagaggaacagaacatttgtgctgaacttcatcaagatccctgtggtgccccacaatgaatgttctgaggtgatgagcaacatggtgtctgagaacatgctgtgtgccggcatcctgggggaccggcaggatgcctgtgagggggacagcggcggccccatggtggccagcttccacggcacctggttcctggtgggcctggtgtcctggggcgagggctgcggcctgctgcacaactacggcgtgtacaccaaggtgagccgctacctggactggatccacggccacatccgggacaaggaggccccccagaagtcctgggccccctag

SEQ ID NO: 278536 - DNA, 1551 bp, Artificial Sequence
  derived and/or modified sequence
atggctgctggaagaaggacctgcagcatcagcaccacccggccctgtgccagcgccagcaggatgtggcagctgaccagcctgctgctgtttgtggccacctggggcatcagcggcaccccagcccccctggacagcgtcttcagcagcagcgagcgggcccaccaggtgctgcgcatcaggaagagggccaacagcttcctggaggagctgcggcacagcagcctggagagagaatgtattgaggagatctgtgactttgaggaggccaaggagatcttccagaatgtggatgacaccctggccttctggagcaagcacgtggatggagaccagtgcctggtgctgcccctggagcacccctgtgccagcctgtgctgcggccacggcacctgcattgatggcatcggcagcttcagctgtgactgccgcagcggctgggagggccgcttctgccagagaggagagggggagcgctggatgctggccggcggcggggccggcctgggccctggctggggccggggcaccagcaccagctgcccccggccccccctgcctgctgaggtgtccttcctgaactgcagcctggacaatggaggctgcacccactactgcctggaggaggtgggctggaggcgctgcagctgtgcccctggctacaagctgggagatgacctgctgcagtgccaccctgctgtgaagttcccctgtggccggccctggaagaggatggagaagaagaggagccacctgaagagggacacagaggaccaggaggaccaggtggacccccggctgattgatggcaagatgacccggcggggggacagcccctggcaggtggtgctgctggacagcaagaagaagctggcctgtggggctgtgctgatccaccccagctgggtgctgacagctgcccactgcatggatgagagcaagaagctgctggtgcggctgggggagtatgacctgcggcgctgggagaagtgggagctggacctggacatcaaggaggtgtttgtgcaccccaactacagcaagagcaccacagacaatgacatcgccctgctgcacctggcccagcctgccaccctgagccagaccatcgtgcccatctgcctgcctgacagcggcctggccgagcgggagctgaaccaggccggccaggagaccctggtgacaggctggggctaccacagcagccgggagaaggaggccaagaggaacagaacatttgtgctgaacttcatcaagatccctgtggtgccccacaatgaatgttctgaggtgatgagcaacatggtgtctgagaacatgctgtgtgccggcatcctgggggaccggcaggatgcctgtgagggggacagcggcggccccatggtggccagcttccacggcacctggttcctggtgggcctggtgtcctggggcgagggctgcggcctgctgcacaactatggagtgtacaccaaggtgagccgctacctggactggattcatggccacatccgggacaaggaggccccccagaagtcctgggccccctag

SEQ ID NO: 278537 - DNA, 1263 bp, Artificial Sequence
  derived and/or modified sequence
atgtggatgacccactggcccagcggccccagcaccagcacagtgaccagcgcctggagctgcccctggagcacccgggccccagcctgtgccgccggcacagcccgggccagcacagccagcgctgccagcgctgccacagctgctgctgctggccgggccgccagcgccagcgctgtgcggggccggggcggctgctggaggggcggggccggcctgggccctggctggggccggggcaccagcaccagctgcccccggccccccctgcctgctgaggtgtccttcctgaactgcagcctggacaatggaggctgcacccactactgcctggaggaggtgggctggaggcgctgcagctgtgcccctggctacaagctgggagatgacctgctgcagtgccaccctgctgtgaagttcccctgtggccggccctggaagaggatggagaagaagaggagccacctgaagagggacacagaggaccaggaggaccaggtggacccccggctgattgatggcaagatgacccggcggggggacagcccctggcaggtggtgctgctggacagcaagaagaagctggcctgtggggctgtgctgatccaccccagctgggtgctgacagctgcccactgcatggatgagagcaagaagctgctggtgcggctgggggagtatgacctgcggcgctgggagaagtgggagctggacctggacatcaaggaggtgtttgtgcaccccaactacagcaagagcaccacagacaatgacatcgccctgctgcacctggcccagcctgccaccctgagccagaccatcgtgcccatctgcctgcctgacagcggcctggccgagcgggagctgaaccaggccggccaggagaccctggtgacaggctggggctaccacagcagccgggagaaggaggccaagaggaacagaacatttgtgctgaacttcatcaagatccctgtggtgccccacaatgaatgttctgaggtgatgagcaacatggtgtctgagaacatgctgtgtgccggcatcctgggggaccggcaggatgcctgtgagggggacagcggcggccccatggtggccagcttccacggcacctggttcctggtgggcctggtgtcctggggcgagggctgcggcctgctgcacaactatggagtgtacaccaaggtgagccgctacctggactggattcatggccacatccgggacaaggaggccccccagaagtcctgggccccctag

SEQ ID NO: 278538 - DNA, 1488 bp, Artificial Sequence
  derived and/or modified sequence
atgtggcagctgaccagcctgctgctgttcgtggccacctggggcatcagtggtacccccgcacccctggacagcgtgttcagttcgtcagaaagggcacaccaggtattgcgaatcagaaaaagagccaattcatttctagaggaactccgccacagctcccttgagagggagtgtattgaagagatttgtgattttgaagaagcaaaggaaatatttcagaacgtcgacgataccctggccttctggtccaagcacgtggacggcgaccagtgccttgtgctgccactggagcatccttgcgctagcctctgttgcggtcacggaacctgtatcgatggcataggctcttttagctgtgattgcagatcgggatgggagggccgcttttgccagcgcggagagggcgaaagatggatgctagccggaggaggagccggcctgggaccgggatgggggagaggtacctctacatcttgtcctcgacccccactgcctgctgaagttagctttctgaattgttcactcgataatggtgggtgtacacattattgcctggaggaggtcggctggcggaggtgcagttgtgcaccagggtataagctgggcgatgacctgctgcagtgccacccggccgttaaattcccatgtggacggccttggaagcgcatggaaaagaagcgcagccatctcaaacgagataccgaagaccaggaagatcaagtcgatccacgcctcatcgatggtaaaatgacgaggaggggagacagcccgtggcaggtggtcctgctggacagcaagaagaaactggcatgtggcgccgtgctgatacacccatcatgggtgctcactgcagcacattgcatggatgagtctaagaagttactggtgcgactcggcgaatatgacctccgtcggtgggagaagtgggaacttgacctggatatcaaggaagtgttcgtgcatcctaactattcgaaatccacaactgacaacgacatcgctctgctgcatctggcgcagccagcaacacttagccagacgatcgtgcccatctgtctgcctgacagtggtctcgctgagcgggaattaaaccaggctgggcaggaaaccctggttaccggctggggttatcactcctcgagagagaaggaagcaaaaagaaaccggacctttgtgttgaacttcattaaaatcccggtggttccccataacgaatgcagcgaggtaatgtcaaacatggtgtcagagaatatgttatgtgccggcattctcggagaccgccaggatgcttgcgagggtgacagcggggggccaatggtcgccagcttccacggtacctggttcctcgtgggtttggtctcatggggagaaggttgcggactcctgcataattacggtgtttacaccaaggtcagccgctatctcgactggattcatggccatatccgagacaaggaggcacctcagaagagttgggccccttag

SEQ ID NO: 278539 - DNA, 1551 bp, Artificial Sequence
  derived and/or modified sequence
atggccgccggccggcggacctgcagcatcagcaccacccggccctgcgcaagcgcctctaggatgtggcagctcacatctctgctgctcttcgtagcaacttgggggatttctggtacccctgcccccctcgacagtgtcttcagcagttctgagcgagcacaccaggtgcttcggatcagaaaaagagcaaattcgttcctcgaggagttaagacacagttcactggagagggaatgcatcgaggaaatctgcgatttcgaggaggccaaggaaatctttcagaatgtggatgacactctcgcattctggagtaagcacgtggacggtgaccagtgcctcgttttgcccctggagcatccatgcgccagcctgtgctgcggacacggcacgtgcattgacggcatcggtagcttctcttgcgactgccggtcagggtgggaggggcgcttctgtcagcgcggagagggtgagcgctggatgcttgcaggtgggggggcagggctcgggcccggctggggtcggggtacctcaacatcctgcccacggccacccctgccagctgaagtctcgtttctaaactgttccctagacaacggggggtgcacacattattgtctggaagaagtgggttggcgccgatgtagctgtgcccccggctataagctcggtgacgatctgctccaatgtcaccccgcagttaagttcccttgcgggcggccatggaagagaatggagaaaaaaagatctcacttaaaacgggatactgaggatcaggaggaccaagtggaccccaggctgatcgacggaaagatgactcggaggggggacagtccctggcaggtggtgctgcttgacagcaaaaagaagctcgcgtgtggtgccgtgttgatccacccctcatgggttcttaccgccgctcattgtatggatgagtcaaaaaagctgctcgtgagactgggcgagtacgatctgcgacggtgggaaaaatgggaacttgacttggacattaaagaagtctttgtccatcccaattattccaagtcaaccaccgataatgacatcgccctactccacctcgcccaaccggcgacactgtctcagacgatcgtgcccatctgtctgccagacagcggtctggcggagcgagaacttaatcaagcggggcaagaaacattagtgacaggctggggataccactcttcccgagaaaaagaggccaagagaaaccggacctttgtgttgaatttcataaagataccggtcgtgccccataatgaatgctcagaggtcatgtccaacatggtcagcgagaacatgctttgcgccggcatcctgggagatagacaggacgcatgcgagggcgatagcgggggacccatggtcgcgtcttttcatggcacgtggttcctggtggggctggtgtcctggggcgagggatgcggccttctgcataactacggtgtgtacacaaaggtgagccgatacttggactggattcatggtcacatacgcgacaaagaggcccctcagaagtcttgggctccatag

SEQ ID NO: 278540 - DNA, 1263 bp, Artificial Sequence
  derived and/or modified sequence
atgtggatgacccactggcccagcggccccagcaccagcaccgtgacttcagcctggagctgcccctggagcaccagagcccccgcgtgcgcggcgggcaccgctcgcgctagcactgcctccgccgcatccgcggctactgccgccgctgccggaagagctgcgtctgctagcgccgtccgcggtaggggaggctgttggaggggtggagctggcttaggacccggttggggccgtggcacttcaacctcatgcccacggccaccgcttcctgctgaggtgagcttcttgaactgctccttagacaatggcggttgcacccattattgtcttgaggaggtggggtggcgcaggtgtagttgtgcacccgggtacaagctcggcgatgacctgttgcaatgtcatccagctgttaagttcccttgtgggagaccttggaaaaggatggagaaaaaaaggtcacatttgaagagggacacggaggatcaagaagatcaggtggatccgagacttatcgacggcaaaatgacccgccgtggagactcaccttggcaggtggtgctcctggattccaagaagaagttagcctgcggcgccgttctgatccacccttcatgggttctgaccgctgctcactgcatggacgaatctaaaaagcttctcgttcgactgggggaatatgaccttagacgctgggagaaatgggaactggacctggatattaaggaggtgtttgttcatcctaattactcaaaatccacaaccgacaacgacattgcccttctccacctggcccagcctgctaccctgagccaaaccatagttcccatatgcctgccggacagcggccttgctgagcgggaactcaaccaggcgggccaggaaaccctggttaccggctggggttaccacagcagcagggaaaaagaggccaagcgcaatcgaacctttgtgctgaatttcatcaagattccggtggtgccacacaacgaatgttctgaagttatgtcgaatatggtatcagaaaacatgctgtgcgcgggtattctgggggaccggcaggacgcatgtgagggcgatagtggtggcccaatggtcgcaagcttccacggtacttggttcctggtcggcctggtgtcctggggagaaggctgcggcctgctacacaattatggcgtgtacactaaggttagtcgttacctcgactggattcatggacatataagggataaggaagcacctcagaaatcttgggctccgtag

SEQ ID NO: 278541 - DNA, 1488 bp, Artificial Sequence
  derived and/or modified sequence
atgtggcaactgaccagcctcttactgttcgttgcaacatggggtatttcgggcacccccgcacccttggatagtgtattctcgtcttccgagagagcacatcaagtgctgcggattcggaaacgtgctaattctttccttgaggaactcagacattcctcattggagcgggagtgcattgaggagatctgcgactttgaggaagccaaagagatcttccagaacgtcgacgacaccctggccttctggtctaaacacgtcgatggggaccagtgtctggtactaccacttgaacacccctgcgccagtttatgctgcggtcacgggacatgcattgacggcattgggtcattttcctgcgattgcaggtccggatgggaaggtagattttgccaaagaggggagggcgaacggtggatgctagcagggggaggagccggactggggcctggatgggggcgaggcacctccacgtcctgcccaaggccgccactaccagctgaagtttcattcctgaattgctcgctcgacaatgggggttgcacccattactgtctagaggaagtgggatggcggagatgcagctgcgctccaggttataagctaggtgacgatctgctccagtgccacccagccgttaagtttccatgtggaagaccctggaaacggatggagaagaaaagatcgcatctgaagagagacacagaagaccaggaggatcaggtcgacccccgactgatcgatggtaagatgacacgaaggggcgattcaccatggcaggtggtgctactcgattctaagaagaagttggcgtgtggggcagtcctcatccacccttcctgggttttgaccgctgcgcattgcatggatgagtctaaaaaactgcttgtccggctgggggagtatgatctccgcaggtgggagaagtgggagctggacctggatattaaggaggtctttgtgcacccgaattattctaagagcacgaccgacaacgatatcgctctgcttcacctcgcgcagccagccaccctgagccaaacgatagtacctatctgcctgccagatagcggcttggctgagagagagcttaatcaggccggtcaggaaaccctggtgacaggatggggctatcacagctcccgggagaaggaggccaagcgaaacaggacgtttgtcctgaattttatcaagatccccgtggtgccccacaatgaatgttctgaagtgatgtcaaacatggtatccgagaacatgctttgcgccggaatcctgggagatcggcaggacgcttgtgaaggcgacagcgggggtcccatggtggcaagtttccatgggacttggtttctagtgggcctggtttcatggggagagggatgcggactcttgcataattatggtgtatatacaaaggtgagccgctatttagattggatccatggacatatccgggacaaggaggctccccagaaatcctgggccccatag

SEQ ID NO: 278542 - DNA, 1551 bp, Artificial Sequence
  derived and/or modified sequence
atggccgcaggcaggagaacttgctctatatccactactaggccctgcgcatcggctagtcggatgtggcaacttaccagtctgctattgtttgtcgctacgtggggaatctcaggcacaccagctcccttggacagcgtgttctcatctagtgaacgagcccatcaagtgctccggatcaggaagagggccaactcttttcttgaggagctgcggcacagtagcttagagagagaatgcatcgaggagatctgcgattttgaggaagctaaagagatctttcagaacgtggacgacactctcgccttctggtcaaagcatgtagatggcgaccaatgcctggttctacccttagaacatccatgcgcaagtttgtgctgtgggcatggcacgtgtatagacggcatcggatctttctcttgcgactgccgatccggatgggagggccgtttttgccaacggggtgagggagagagatggatgctggccggtggaggcgctgggctgggtcctggctgggggcgaggcacctccactagctgcccacggccaccactcccggcagaagtctcttttctgaattgctccctggataacggcggatgtacacactactgtttggaagaggtgggatggcgcagatgtagttgcgcgcctggatacaagctgggagacgatctgcttcagtgtcatcctgccgttaagttcccttgcgggaggccctggaagagaatggagaaaaagagatctcacctcaaaagggatactgaggatcaagaggatcaggtagaccctcgccttatagatggtaagatgactcggcgaggggattcaccatggcaggtggtcctgttagattccaagaaaaagctggcctgtggggctgttctaatccatccaagctgggtgcttactgccgctcattgcatggacgagtctaaaaaactcctggtgagattgggtgagtacgatctgagacgttgggagaaatgggagctggacctcgatataaaggaagtgttcgtccacccgaattacagcaagagcactactgacaacgacattgccctgctgcatctggcacaacctgccactttaagtcagaccattgtcccaatctgccttccggatagcggcctggcagaaagggagctgaatcaggccggacaggagactcttgtgacgggctgggggtatcacagctccagagaaaaagaggccaaaaggaaccgcacatttgttcttaattttatcaagattcccgtggtccctcataacgagtgcagcgaagtgatgtccaacatggtgagcgaaaacatgctatgtgctgggatcttgggcgatcgccaggatgcctgtgaaggtgactccggcggacccatggtggcttcgtttcacggaacctggttcttggtgggtcttgtgtcttggggagaaggctgcggactcttgcacaattatggagtttacacgaaggtctcacggtacctcgattggatacacggccatattcgcgataaggaggccccacagaagagctgggcaccgtag

SEQ ID NO: 278543 - DNA, 1263 bp, Artificial Sequence
  derived and/or modified sequence
atgtggatgacacactggcctagcggaccttccacatcaacagtgacctcagcctggagctgcccttggagtacccgagcccctgcctgcgcggcaggcactgcgcgagcttccaccgcctcagcggcatctgcggctactgcggctgcggctggcagggctgctagcgccagtgctgtgcggggaagaggcggatgctggaggggcggtgcgggacttgggccaggttggggacgaggcacttccactagctgcccgagaccacccttaccggcagaagtgtccttcctgaattgttccctggataatggcggatgcacacactactgccttgaagaagttggctggaggagatgttcttgtgcacccggttacaagctcggagatgatctgctgcagtgtcatccggctgttaaattcccgtgcgggcgaccatggaagcgcatggagaagaaaagaagtcacctgaaaagggacaccgaagatcaggaggaccaagtcgatccaagattaattgatggcaagatgacccggaggggcgacagcccgtggcaggtagtcctgctggatagcaagaaaaaactggcatgcggagctgtcctcattcaccctagttgggtcctgaccgccgcacattgcatggatgagtcaaaaaaactactcgtgcgactgggcgagtatgatctgcggagatgggagaagtgggagctggacctcgatatcaaggaggtgttcgtccaccccaactattcaaagagcactaccgacaacgacattgccctcctccatttggcacaacccgctactctcagccaaaccatcgttcctatttgcttgcctgacagcggccttgccgaacgcgagctcaaccaggctggacaggaaacccttgtcaccggttggggttaccactcctcccgagaaaaggaagccaagcgcaaccgcaccttcgtgttgaacttcatcaaaatcccggttgtaccacacaacgagtgttcggaggtcatgtccaatatggtgtctgaaaacatgttatgcgccggtatcctgggggaccggcaggacgcatgtgaaggtgatagtggcggaccaatggttgcctccttccatggaacgtggttcttggtggggctagtgtcatggggagagggctgcggccttctccataactacggagtttacaccaaggtgtccaggtatttagactggatccacggtcacattagggacaaggaagccccacagaagagctgggcgccttag

SEQ ID NO: 278544 - DNA, 1488 bp, Artificial Sequence
  derived and/or modified sequence
atgtggcagctgacttcgctgctgctgtttgtcgctacatggggaatctcaggaacacccgcaccattagactctgtcttttcctcctcagaacgcgcccatcaggtcttgcgtattagaaagcgggccaatagctttttggaggagctccggcatagttctcttgaaagagagtgtatcgaggagatctgcgattttgaggaagctaaggagatattccagaatgtcgatgatacactggccttctggagcaagcacgttgacggagaccagtgtctagtcctgcccttggaacacccctgcgcatctctgtgttgtggccatggtacgtgtattgacggcataggttcgttcagttgtgattgccggtcaggttgggaaggaagattctgccagcgtggagagggggagagatggatgctcgctgggggaggcgcaggactcggtccgggatggggaagaggaacatctacttcatgcccaagacccccgctgccagcagaagtaagctttctcaactgctccttggacaacggcgggtgcacgcattattgcctggaggaagttgggtggcgccgctgttcttgtgctcccgggtacaagctgggggacgatctccttcagtgtcacccagctgttaaatttccgtgtggcagaccgtggaaaaggatggagaagaaaagaagtcatttaaagagggacacggaggatcaggaagaccaggtagaccccagactcattgatggtaaaatgaccagaagaggagactctccgtggcaggtggtcctactcgactccaagaaaaagctggcttgcggggccgtgctgatccacccatcctgggttctgacggctgctcattgtatggatgaaagtaagaagctgttggtgcgcttaggggagtacgatctgcgtcgctgggaaaagtgggagctcgacctggacataaaggaggtgtttgttcatcccaattatagtaagagcaccacagataatgatatagccctgctgcatctagcacagcccgccaccctcagtcagactatagtgcctatttgtctaccagattcagggctcgccgagcgagagctgaatcaggccggccaggaaaccctcgtcacaggttggggatatcattcctcgcgcgaaaaggaagctaaaagaaatcgcaccttcgtcctcaactttataaagatacctgtggttccccacaacgaatgctctgaagtcatgtcaaatatggtcagtgagaacatgctgtgtgcaggcatattgggcgataggcaagacgcatgcgagggagacagtggaggcccaatggtggccagctttcacggaacatggttcctggtggggctggtaagctggggggaaggttgtggtctgttacataattacggcgtgtatacaaaggtgtctagatatctggattggattcacggccatatccgcgacaaggaggcacctcaaaagagttgggcaccttag

SEQ ID NO: 278545 - DNA, 1551 bp, Artificial Sequence
  derived and/or modified sequence
atggcggccggtcgacgcacttgttcaattagcaccacaagaccctgtgcgagcgcttcacgtatgtggcagctgaccagcctgttactgtttgtggccacctggggcatctctggtacgccagcccctctcgactcagtcttctctagctcagagagggcacaccaagtgttacggattcggaaaagggcgaattcattcttagaggagctgcgacattcttcgcttgaaagagagtgtatcgaagaaatctgcgactttgaggaggctaaagagatcttccagaacgtcgacgacaccctggctttttggtcgaagcacgtggacggggatcaatgcctagtcctccccctggagcacccttgtgcatctctgtgctgcgggcacggcacttgcatcgacggaatcggttctttctcctgtgactgcaggagcggctgggaaggcagattctgccagagaggcgagggggagcgatggatgctggctggaggcggagctggactcggccccgggtggggcaggggaaccagcacgtcctgtcctcggcctcctctgcctgctgaggtatcttttttgaactgtagcttggacaacggggggtgtacacactactgtctcgaggaagtgggttggcggcgttgtagctgcgccccgggatacaagctcggagatgacctgttgcagtgccaccccgctgtcaagtttccctgtggtaggccatggaaaaggatggagaaaaaaagatcccacttgaaaagagacactgaggatcaggaggaccaagttgacccaaggctgattgacggaaaaatgacaagacgaggtgattccccatggcaggtagtactcctggattcgaaaaagaaactggcctgcggagcagtgttgatccacccttcatgggtcttgactgccgcccattgtatggatgagtcaaaaaaattactcgtgcggcttggcgaatacgacctgcgtcgctgggagaaatgggagctcgatctggatataaaggaggtctttgtgcatccaaattactcaaaaagtactactgacaatgatattgcccttctccacttggcgcaacctgctactctcagtcagacgatagtgccaatatgtttgcccgactccgggcttgctgaaagagagttaaaccaagccggacaagaaaccctagtaaccggatggggatatcattcttctcgcgaaaaagaagcaaaacgcaaccgtacatttgtgttgaactttattaaaatccctgttgtaccccataatgaatgctcagaagtcatgagcaacatggtttctgaaaacatgctctgtgccggcattctgggcgacagacaggacgcatgcgaaggtgattccggcggccccatggtggcctccttccacggtacctggtttctcgtgggtctcgtgtcctggggggagggatgcggactgctgcacaattatggagtttacacaaaggtgagcaggtaccttgattggatccacgggcacattcgggacaaagaagcaccacagaaatcatgggcgccttag

SEQ ID NO: 278546 - DNA, 1263 bp, Artificial Sequence
  derived and/or modified sequence
atgtggatgactcattggccaagtggaccgtcaacatccacagttacttccgcctggtcctgtccgtggagcacccgagcacccgcttgcgctgctgggaccgcgcgggcttccactgcatccgctgcatctgccgccacagcggccgccgccgggagggccgcatctgcttctgccgtgagaggacggggcggctgctggagggggggggctggcttaggcccaggttgggggcgcggtacctcaacttcatgccctcggcctcccctgcccgctgaagtttcattcttaaattgctcccttgacaatggtggttgcacccattactgtcttgaggaagttggctggcgtagatgcagctgtgcccccggatacaaactgggcgacgacctcttacagtgtcaccccgcggtaaagtttccatgtggccggccctggaaaagaatggagaaaaaacgatcccatctgaagcgcgatactgaggatcaggaggatcaggtggatccacgcttgatcgacgggaaaatgacccgcaggggagatagtccatggcaggtggtgttactggactctaaaaagaagctggcttgcggggcagtattgatacacccctcatgggtgttaaccgcagcgcactgtatggatgaatccaagaaattattagtcaggctgggcgaatatgacctccgacgctgggaaaaatgggaactagacctcgatataaaggaagtgttcgtgcacccaaactattcgaaatctacaacggataatgatattgcactgctgcacttagctcagcctgctactctcagccagacaattgtaccaatatgtcttcccgatagtggtctggccgaaagagaactgaatcaagctggacaggaaactctggttactgggtggggttatcacagctcccgtgagaaggaagccaagcgcaatcggacctttgtgctgaattttattaaaatccccgtcgtgccccataatgaatgtagcgaggtaatgtcaaatatggttagtgagaacatgctctgtgctggaatcctcggcgatcggcaggatgcctgtgagggcgactctggtgggcccatggtggcctcgtttcacggtacttggttccttgtgggccttgttagttggggtgaagggtgcggactcctgcataattacggcgtctataccaaggtctcccgatacctcgactggatccatggtcatattcgcgacaaggaggcccctcagaagtcatgggccccgtag

SEQ ID NO: 278547 - DNA, 1488 bp, Artificial Sequence
  derived and/or modified sequence
atgtggcagcttacatcactgctcctctttgtcgccacctggggcatatccggcacgcctgccccattagatagtgtttttagctcatcagaaagagcacaccaggtacttcggatacgtaaaagagccaattcttttctagaggaactgaggcacagcagtttggaacgtgaatgcattgaagaaatctgtgactttgaggaagcaaaggaaattttccaaaatgtggacgatactctggcgttttggtccaaacacgttgacggagatcaatgcctagtcctgccgctggaacacccctgtgcttctttatgctgcggtcatgggacctgtatagatggaatcgggtcatttagctgcgactgccgatccgggtgggaaggcaggttttgtcagagaggtgaaggtgaaagatggatgctcgcaggaggaggggcaggactgggaccaggatggggaagaggtacatccactagctgtcctcggcctccacttccagctgaagtgtcttttttgaattgctccctggacaatggcgggtgtactcactattgcttggaagaggtagggtggaggcggtgctcctgcgcacccggctacaaacttggggacgacctcctccagtgtcacccagctgtgaaattcccctgtggcagaccctggaaacgcatggagaagaaaagatcacatttgaagagagacaccgaagaccaggaggaccaggtggatcctagactgatagacggtaaaatgacacgtaggggtgatagtccctggcaggtggtgctgctggattcaaagaagaaattagcctgcggcgctgtgctgatccatcccagttgggtcctgactgctgcacactgtatggatgaaagcaagaaattattagttagactgggggaatatgatctgcgtcgctgggaaaaatgggaacttgacctggatataaaggaagtgtttgtccatcccaactattcaaagagtaccacggataacgatattgctctgctacatcttgcacaaccagccacactgtcccaaacaattgtgcctatttgtctccccgatagcggccttgccgaacgcgaacttaaccaggccgggcaggaaacactcgtcactgggtggggttaccattctagccgtgagaaggaagctaaacgcaaccgcacttttgttctcaactttatcaagatacctgtcgtgcctcacaacgaatgctcagaggtgatgtcaaatatggtgtcagagaacatgctgtgtgcagggattttaggagataggcaggacgcctgcgagggcgactcaggcggccccatggtggctagttttcatggtacatggtttcttgtgggcctcgtttcttggggggagggatgtggacttctacataattatggcgtctatacaaaggtgagtagatatcttgattggatccacggacacatcagggacaaggaagctccacagaagagctgggccccgtag

SEQ ID NO: 278548 - DNA, 1551 bp, Artificial Sequence
  derived and/or modified sequence
atggccgctggccgccgtacatgttctatcagtacaaccagaccctgtgcgagcgcatcccgtatgtggcaacttacctctctgctcctctttgtggctacttggggcatttctggaaccccggcacccctggattccgtcttctcctcgtcagaacgagcacaccaggtcctccggatacgcaaacgggcgaactcctttctggaggagctccgccattcctctctcgaacgcgagtgtatcgaagaaatctgtgacttcgaagaagctaaggaaatcttccaaaacgtggatgataccctcgcgttttggtccaagcatgtcgatggtgaccagtgtctcgttctcccgctggaacatccttgcgcgtcactgtgttgtggacatggaacctgtattgacggcatagggagctttagctgcgattgtagatccgggtgggagggcagattttgccagaggggggagggagaaagatggatgcttgctggaggcggggctggtttgggacccggatggggacgcgggacaagcaccagttgcccacgccctccactccccgccgaagtctcatttctgaactgttccctggataacggcggctgtacccactactgcttggaagaagtgggatggagacgttgttcctgtgcaccaggctacaagttgggagatgatctgctgcagtgccaccccgctgtgaagttcccgtgtggacgcccttggaagcgcatggaaaagaaaagatcccatctcaaaagagatacagaagatcaagaagatcaagtcgatccaaggcttattgatggtaagatgacccgtcgtggtgactccccctggcaggtcgttctgcttgattctaagaaaaagctggcttgcggggcagtacttatccacccatcttgggtgctcacagccgcccattgtatggacgaatctaagaagctgctagtccgcctgggagagtatgatttaaggagatgggagaagtgggagttagatctggatatcaaagaggtgttcgtgcatcctaattacagtaaatccacaaccgataatgatattgcccttctgcaccttgcacagccggctactctatctcaaacaattgttccgatttgtctccctgatagtggcctggcggaacgtgaactcaatcaggctgggcaggagaccctagtgacaggttggggctatcactcaagtagggaaaaggaagccaaaagaaatagaacgtttgtgcttaactttattaaaattcctgttgtgcctcataatgaatgctccgaagtgatgtcgaacatggtgtcggaaaatatgctttgcgctgggattctgggcgaccgccaggatgcctgtgaaggcgattcaggggggccgatggttgcatctttccatgggacctggtttttggtgggattggtatcctggggcgaaggttgcggactgcttcataattacggagtttacactaaagtctctagatatctcgattggatacatggacacatcagagataaagaagctccccaaaaatcctgggccccttag

SEQ ID NO: 278549 - DNA, 1263 bp, Artificial Sequence
  derived and/or modified sequence
atgtggatgacccactggccatccggcccctcaacttctacagtcaccagcgcctggagttgtccttggtccactagggcaccagcctgtgccgccggaaccgccagggcatccacggcctccgctgcatcggccgctactgcagctgcagctggaagggcggcgtccgcctcagcagtcagaggaaggggggggtgttggagagggggtgcgggcctagggcctggctgggggagaggaacaagcacatcatgcccacgtccacctttgcctgccgaggtttccttcctgaattgttcgctggataacggaggatgcacccattactgtctggaagaagttggttggagaagatgctcatgtgccccgggctataaactaggggatgatctcctgcaatgccacccggcagtcaaattcccctgcggtcgaccttggaaaagaatggagaagaagagaagtcatcttaagagggatacggaggaccaggaggatcaggttgaccccagattaatagatggtaagatgacccggcgcggtgattctccgtggcaagtggtgcttctcgacagcaaaaagaagttggcctgtggcgcagtattaatacatccatcctgggtgctcaccgctgcgcattgtatggacgagagtaaaaaactcctggttagacttggagaatacgacctgagacgctgggaaaagtgggagctcgatctcgacattaaagaagtctttgtgcatcctaactattcaaagtcaaccacagacaatgacatcgccttgctgcacctcgctcagcccgctactttatctcagactattgtccctatatgcctgccagactccggcctcgctgaacgcgaactcaatcaggcaggtcaagagaccctggttaccgggtgggggtatcattcttctcgggaaaaggaagctaagagaaaccgaaccttcgtgctgaacttcatcaaaattccagtcgtcccccataacgagtgcagcgaggttatgagtaatatggtgtccgaaaatatgctttgcgctggaattttaggagacagacaggatgcatgcgagggagatagcggagggccaatggttgcatcattccatgggacttggtttctggtgggattggttagctggggggagggctgcgggttgctgcacaactacggcgtctatactaaggtgagtagatacctggattggattcacgggcatattagggacaaagaagcaccgcaaaagtcatgggcaccgtag

SEQ ID NO: 278550 - DNA, 1586 bp, Artificial Sequence
  derived and/or modified sequence
cgggggtaggcactgcccggagctcagaagtcctcctcagacaggtgccagtgcctccagaatgtggcagctcacaagcctcctgctgttcgtggccacctggggaatttccggcacaccagctcctcttgactcagtgttctccagcagcgagcgtgcccaccaggtgctgcggatccgcaaacgtgccaactccttcctggaggagctccgtcacagcagcctggagcgggagtgcatagaggagatctgtgacttcgaggaggccaaggaaattttccaaaatgtggatgacacactggccttctggtccaagcacgtcgacggtgaccagtgcttggtcttgcccttggagcacccgtgcgccagcctgtgctgcgggcacggcacgtgcatcgacggcatcggcagcttcagctgcgactgccgcagcggctgggagggccgcttctgccagcgcggtgagggggagaggtggatgctggcgggcggcggggcggggctggggccgggttgggggcgcggcaccagcaccagctgcccgcgccctcccctgcccgcagaggtgagcttcctcaattgctcgctggacaacggcggctgcacgcattactgcctagaggaggtgggctggcggcgctgtagctgtgcgcctggctacaagctgggggacgacctcctgcagtgtcaccccgcagtgaagttcccttgtgggaggccctggaagcggatggagaagaagcgcagtcacctgaaacgagacacagaagaccaagaagaccaagtagatccgcggctcattgatgggaagatgaccaggcggggagacagcccctggcaggtggtcctgctggactcaaagaagaagctggcctgcggggcagtgctcatccacccctcctgggtgctgacagcggcccactgcatggatgagtccaagaagctccttgtcaggcttggagagtatgacctgcggcgctgggagaagtgggagctggacctggacatcaaggaggtcttcgtccaccccaactacagcaagagcaccaccgacaatgacatcgcactgctgcacctggcccagcccgccaccctctcgcagaccatagtgcccatctgcctcccggacagcggccttgcagagcgcgagctcaatcaggccggccaggagaccctcgtgacgggctggggctaccacagcagccgagagaaggaggccaagagaaaccgcaccttcgtcctcaacttcatcaagattcccgtggtcccgcacaatgagtgcagcgaggtcatgagcaacatggtgtctgagaacatgctgtgtgcgggcatcctcggggaccggcaggatgcctgcgagggcgacagtggggggcccatggtcgcctccttccacggcacctggttcctggtgggcctggtgagctggggtgagggctgtgggctccttcacaactacggcgtttacaccaaagtcagccgctacctcgactggatccatgggcacatcagagacaaggaagccccccagaagagctgggcaccttagcgaccctccctgcagggctgggcttttgcatggcaat

SEQ ID NO: 278551 - DNA, 1853 bp, Artificial Sequence
  derived and/or modified sequence
aggctgtcatggcggcaggacggcgaacttgcagtatctccacgacccgcccctgtgccagtgcctccagaatgtggcagctcacaagcctcctgctgttcgtggccacctggggaatttccggcacaccagctcctcttgactcagtgttctccagcagcgagcgtgcccaccaggtgctgcggatccgcaaacgtgccaactccttcctggaggagctccgtcacagcagcctggagcgggagtgcatagaggagatctgtgacttcgaggaggccaaggaaattttccaaaatgtggatgacacactggccttctggtccaagcacgtcgacggtgaccagtgcttggtcttgcccttggagcacccgtgcgccagcctgtgctgcgggcacggcacgtgcatcgacggcatcggcagcttcagctgcgactgccgcagcggctgggagggccgcttctgccagcgcggtgagggggagaggtggatgctggcgggcggcggggcggggctggggccgggttgggggcgcggcaccagcaccagctgcccgcgccctcccctgcccgcagaggtgagcttcctcaattgctcgctggacaacggcggctgcacgcattactgcctagaggaggtgggctggcggcgctgtagctgtgcgcctggctacaagctgggggacgacctcctgcagtgtcaccccgcagtgaagttcccttgtgggaggccctggaagcggatggagaagaagcgcagtcacctgaaacgagacacagaagaccaagaagaccaagtagatccgcggctcattgatgggaagatgaccaggcggggagacagcccctggcaggtggtcctgctggactcaaagaagaagctggcctgcggggcagtgctcatccacccctcctgggtgctgacagcggcccactgcatggatgagtccaagaagctccttgtcaggcttggagagtatgacctgcggcgctgggagaagtgggagctggacctggacatcaaggaggtcttcgtccaccccaactacagcaagagcaccaccgacaatgacatcgcactgctgcacctggcccagcccgccaccctctcgcagaccatagtgcccatctgcctcccggacagcggccttgcagagcgcgagctcaatcaggccggccaggagaccctcgtgacgggctggggctaccacagcagccgagagaaggaggccaagagaaaccgcaccttcgtcctcaacttcatcaagattcccgtggtcccgcacaatgagtgcagcgaggtcatgagcaacatggtgtctgagaacatgctgtgtgcgggcatcctcggggaccggcaggatgcctgcgagggcgacagtggggggcccatggtcgcctccttccacggcacctggttcctggtgggcctggtgagctggggtgagggctgtgggctccttcacaactacggcgtttacaccaaagtcagccgctacctcgactggatccatgggcacatcagagacaaggaagccccccagaagagctgggcaccttagcgaccctccctgcagggctgggcttttgcatggcaatggatgggacattaaagggacatgtaacaagcacaccggcctgctgttctgtccttccatccctcttttgggctcttctggagggaagtaacatttactgagcacctgttgtatgtcacatgccttatgaatagaatcttaactcctagagcaactctgtggggtggggaggagcagatccaagttttgcggggtctaaagctgtgtgtgttgagggggatactctgtttatgaaaaagaataaaaaacacaaccacg

SEQ ID NO: 278552 - DNA, 1828 bp, Artificial Sequence
  derived and/or modified sequence
aactcgaactccaggctgtcatggcggcaggacggcgaacttgcagtatctccacgacccgcccctgtgccagtgcctccagaatgtggcagctcacaagcctcctgctgttcgtggccacctggggaatttccggcacaccagctcctcttggtgctgcggatccgcaaacgtgccaactccttcctggaggagctccgtcacagcagcctggagcgggagtgcatagaggagatctgtgacttcgaggaggccaaggaaattttccaaaatgtggatgacacactggccttctggtccaagcacgtcgacggtgaccagtgcttggtcttgcccttggagcacccgtgcgccagcctgtgctgcgggcacggcacgtgcatcgacggcatcggcagcttcagctgcgactgccgcagcggctgggagggccgcttctgccagcgcggtgagggggagaggtggatgctggcggggcggggcggggctggggccgggttgggggcgcggcaccagcaccagctgcccgcgccctcccctgcccgcagaggtgagcttcctcaattgctcgctggacaacggcggctgcacgcattactgcctagaggaggtgggctggcggcgctgtagctgtgcgcctggctacaagctgggggacgacctcctgcagtgtcaccccgcagtgaagttcccttgtgggaggccctggaagcggatggagaagaagcgcagtcacctgaaacgagacacagaagaccaagaagaccaagtagatccgcggctcattgatgggaagatgaccaggcggggagacagcccctggcaggtggtcctgctggactcaaagaagaagctggcctgcggggcagtgctcatccacccctcctgggtgctgacagcggcccactgcatggatgagtccaagaagctccttgtcaggcttggagagtatgacctgcggcgctgggagaagtgggagctggacctggacatcaaggaggtcttcgtccaccccaactacagcaagagcaccaccgacaatgacatcgcactgctgcacctggcccagcccgccaccctctcgcagaccatagtgcccatctgcctcccggacagcggccttgcagagcgcgagctcaatcaggccggccaggagaccctcgtgacgggctggggctaccacagcagccgagagaaggaggccaagagaaaccgcaccttcgtcctcaacttcatcaagattcccgtggtcccgcacaatgagtgcagcgaggtcatgagcaacatggtgtctgagaacatgctgtgtgcgggcatcctcggggaccggcaggatgcctgcgagggcgacagtggggggcccatggtcgcctccttccacggcacctggttcctggtgggcctggtgagctggggtgagggctgtgggctccttcacaactacggcgtttacaccaaagtcagccgctacctcgactggatccatgggcacatcagagacaaggaagccccccagaagagctgggcaccttagcgaccctccctgcagggctgggcttttgcatggcaatggatgggacattaaagggacatgtaacaagcacaccggcctgctgttctgtccttccatccctcttttgggctcttctggagggaagtaacatttactgagcacctgttgtatgtcacatgccttatgaatagaatcttaactcctagagcaactctgtggggtggggaggagcagatccaagttttgcggggtctaaagctgtgtgtgttgagggggatactctgtttatgaaaaagaataaaaaacacaaccacg

SEQ ID NO: 278553 - RNA, 1488 nt, Artificial Sequence
  derived and/or modified sequence
auguggcagcugacuucgcugcugcuguuugucgcuacauggggaaucucaggaacacccgcaccauuagacucugucuuuuccuccucagaacgcgcccaucaggucuugcguauuagaaagcgggccaauagcuuuuuggaggagcuccggcauaguucucuugaaagagaguguaucgaggagaucugcgauuuugaggaagcuaaggagauauuccagaaugucgaugauacacuggccuucuggagcaagcacguugacggagaccagugucuaguccugcccuuggaacaccccugcgcaucucuguguuguggccaugguacguguauugacggcauagguucguucaguugugauugccggucagguugggaaggaagauucugccagcguggagagggggagagauggaugcucgcugggggaggcgcaggacucgguccgggauggggaagaggaacaucuacuucaugcccaagacccccgcugccagcagaaguaagcuuucucaacugcuccuuggacaacggcgggugcacgcauuauugccuggaggaaguuggguggcgccgcuguucuugugcucccggguacaagcugggggacgaucuccuucagugucacccagcuguuaaauuuccguguggcagaccguggaaaaggauggagaagaaaagaagucauuuaaagagggacacggaggaucaggaagaccagguagaccccagacucauugaugguaaaaugaccagaagaggagacucuccguggcaggugguccuacucgacuccaagaaaaagcuggcuugcggggccgugcugauccacccauccuggguucugacggcugcucauuguauggaugaaaguaagaagcuguuggugcgcuuaggggaguacgaucugcgucgcugggaaaagugggagcucgaccuggacauaaaggagguguuuguucaucccaauuauaguaagagcaccacagauaaugauauagcccugcugcaucuagcacagcccgccacccucagucagacuauagugccuauuugucuaccagauucagggcucgccgagcgagagcugaaucaggccggccaggaaacccucgucacagguuggggauaucauuccucgcgcgaaaaggaagcuaaaagaaaucgcaccuucguccucaacuuuauaaagauaccugugguuccccacaacgaaugcucugaagucaugucaaauauggucagugagaacaugcugugugcaggcauauugggcgauaggcaagacgcaugcgagggagacaguggaggcccaaugguggccagcuuucacggaacaugguuccugguggggcugguaagcuggggggaagguuguggucuguuacauaauuacggcguguauacaaaggugucuagauaucuggauuggauucacggccauauccgcgacaaggaggcaccucaaaagaguugggcaccuuag

SEQ ID NO: 278554 - RNA, 1551 nt, Artificial Sequence
  derived and/or modified sequence
auggcggccggucgacgcacuuguucaauuagcaccacaagacccugugcgagcgcuucacguauguggcagcugaccagccuguuacuguuuguggccaccuggggcaucucugguacgccagccccucucgacucagucuucucuagcucagagagggcacaccaaguguuacggauucggaaaagggcgaauucauucuuagaggagcugcgacauucuucgcuugaaagagaguguaucgaagaaaucugcgacuuugaggaggcuaaagagaucuuccagaacgucgacgacacccuggcuuuuuggucgaagcacguggacggggaucaaugccuaguccucccccuggagcacccuugugcaucucugugcugcgggcacggcacuugcaucgacggaaucgguucuuucuccugugacugcaggagcggcugggaaggcagauucugccagagaggcgagggggagcgauggaugcuggcuggaggcggagcuggacucggccccggguggggcaggggaaccagcacguccuguccucggccuccucugccugcugagguaucuuuuuugaacuguagcuuggacaacgggggguguacacacuacugucucgaggaaguggguuggcggcguuguagcugcgccccgggauacaagcucggagaugaccuguugcagugccaccccgcugucaaguuucccugugguaggccauggaaaaggauggagaaaaaaagaucccacuugaaaagagacacugaggaucaggaggaccaaguugacccaaggcugauugacggaaaaaugacaagacgaggugauuccccauggcagguaguacuccuggauucgaaaaagaaacuggccugcggagcaguguugauccacccuucaugggucuugacugccgcccauuguauggaugagucaaaaaaauuacucgugcggcuuggcgaauacgaccugcgucgcugggagaaaugggagcucgaucuggauauaaaggaggucuuugugcauccaaauuacucaaaaaguacuacugacaaugauauugcccuucuccacuuggcgcaaccugcuacucucagucagacgauagugccaauauguuugcccgacuccgggcuugcugaaagagaguuaaaccaagccggacaagaaacccuaguaaccggauggggauaucauucuucucgcgaaaaagaagcaaaacgcaaccguacauuuguguugaacuuuauuaaaaucccuguuguaccccauaaugaaugcucagaagucaugagcaacaugguuucugaaaacaugcucugugccggcauucugggcgacagacaggacgcaugcgaaggugauuccggcggccccaugguggccuccuuccacgguaccugguuucucgugggucucguguccuggggggagggaugcggacugcugcacaauuauggaguuuacacaaaggugagcagguaccuugauuggauccacgggcacauucgggacaaagaagcaccacagaaaucaugggcgccuuag

SEQ ID NO: 278555 - RNA, 1263 nt, Artificial Sequence
  derived and/or modified sequence
auguggaugacucauuggccaaguggaccgucaacauccacaguuacuuccgccugguccuguccguggagcacccgagcacccgcuugcgcugcugggaccgcgcgggcuuccacugcauccgcugcaucugccgccacagcggccgccgccgggagggccgcaucugcuucugccgugagaggacggggcggcugcuggagggggggggcuggcuuaggcccagguugggggcgcgguaccucaacuucaugcccucggccuccccugcccgcugaaguuucauucuuaaauugcucccuugacaauggugguugcacccauuacugucuugaggaaguuggcuggcguagaugcagcugugcccccggauacaaacugggcgacgaccucuuacagugucaccccgcgguaaaguuuccauguggccggcccuggaaaagaauggagaaaaaacgaucccaucugaagcgcgauacugaggaucaggaggaucagguggauccacgcuugaucgacgggaaaaugacccgcaggggagauaguccauggcaggugguguuacuggacucuaaaaagaagcuggcuugcggggcaguauugauacaccccucauggguguuaaccgcagcgcacuguauggaugaauccaagaaauuauuagucaggcugggcgaauaugaccuccgacgcugggaaaaaugggaacuagaccucgauauaaaggaaguguucgugcacccaaacuauucgaaaucuacaacggauaaugauauugcacugcugcacuuagcucagccugcuacucucagccagacaauuguaccaauaugucuucccgauaguggucuggccgaaagagaacugaaucaagcuggacaggaaacucugguuacugggugggguuaucacagcucccgugagaaggaagccaagcgcaaucggaccuuugugcugaauuuuauuaaaauccccgucgugccccauaaugaauguagcgagguaaugucaaauaugguuagugagaacaugcucugugcuggaauccucggcgaucggcaggaugccugugagggcgacucuggugggcccaugguggccucguuucacgguacuugguuccuugugggccuuguuaguuggggugaagggugcggacuccugcauaauuacggcgucuauaccaaggucucccgauaccucgacuggauccauggucauauucgcgacaaggaggccccucagaagucaugggccccguag

SEQ ID NO: 278556 - RNA, 1488 nt, Artificial Sequence
  derived and/or modified sequence
auguggcagcuuacaucacugcuccucuuugucgccaccuggggcauauccggcacgccugccccauuagauaguguuuuuagcucaucagaaagagcacaccagguacuucggauacguaaaagagccaauucuuuucuagaggaacugaggcacagcaguuuggaacgugaaugcauugaagaaaucugugacuuugaggaagcaaaggaaauuuuccaaaauguggacgauacucuggcguuuugguccaaacacguugacggagaucaaugccuaguccugccgcuggaacaccccugugcuucuuuaugcugcggucaugggaccuguauagauggaaucgggucauuuagcugcgacugccgauccgggugggaaggcagguuuugucagagaggugaaggugaaagauggaugcucgcaggaggaggggcaggacugggaccaggauggggaagagguacauccacuagcuguccucggccuccacuuccagcugaagugucuuuuuugaauugcucccuggacaauggcggguguacucacuauugcuuggaagagguaggguggaggcggugcuccugcgcacccggcuacaaacuuggggacgaccuccuccagugucacccagcugugaaauuccccuguggcagacccuggaaacgcauggagaagaaaagaucacauuugaagagagacaccgaagaccaggaggaccagguggauccuagacugauagacgguaaaaugacacguaggggugauagucccuggcagguggugcugcuggauucaaagaagaaauuagccugcggcgcugugcugauccaucccaguuggguccugacugcugcacacuguauggaugaaagcaagaaauuauuaguuagacugggggaauaugaucugcgucgcugggaaaaaugggaacuugaccuggauauaaaggaaguguuuguccaucccaacuauucaaagaguaccacggauaacgauauugcucugcuacaucuugcacaaccagccacacugucccaaacaauugugccuauuugucuccccgauagcggccuugccgaacgcgaacuuaaccaggccgggcaggaaacacucgucacugggugggguuaccauucuagccgugagaaggaagcuaaacgcaaccgcacuuuuguucucaacuuuaucaagauaccugucgugccucacaacgaaugcucagaggugaugucaaauauggugucagagaacaugcugugugcagggauuuuaggagauaggcaggacgccugcgagggcgacucaggcggccccaugguggcuaguuuucaugguacaugguuucuugugggccucguuucuuggggggagggauguggacuucuacauaauuauggcgucuauacaaaggugaguagauaucuugauuggauccacggacacaucagggacaaggaagcuccacagaagagcugggccccguag

SEQ ID NO: 278557 - RNA, 1551 nt, Artificial Sequence
  derived and/or modified sequence
auggccgcuggccgccguacauguucuaucaguacaaccagacccugugcgagcgcaucccguauguggcaacuuaccucucugcuccucuuuguggcuacuuggggcauuucuggaaccccggcaccccuggauuccgucuucuccucgucagaacgagcacaccagguccuccggauacgcaaacgggcgaacuccuuucuggaggagcuccgccauuccucucucgaacgcgaguguaucgaagaaaucugugacuucgaagaagcuaaggaaaucuuccaaaacguggaugauacccucgcguuuugguccaagcaugucgauggugaccagugucucguucucccgcuggaacauccuugcgcgucacuguguuguggacauggaaccuguauugacggcauagggagcuuuagcugcgauuguagauccgggugggagggcagauuuugccagaggggggagggagaaagauggaugcuugcuggaggcggggcugguuugggacccggauggggacgcgggacaagcaccaguugcccacgcccuccacuccccgccgaagucucauuucugaacuguucccuggauaacggcggcuguacccacuacugcuuggaagaagugggauggagacguuguuccugugcaccaggcuacaaguugggagaugaucugcugcagugccaccccgcugugaaguucccguguggacgcccuuggaagcgcauggaaaagaaaagaucccaucucaaaagagauacagaagaucaagaagaucaagucgauccaaggcuuauugaugguaagaugacccgucguggugacucccccuggcaggucguucugcuugauucuaagaaaaagcuggcuugcggggcaguacuuauccacccaucuugggugcucacagccgcccauuguauggacgaaucuaagaagcugcuaguccgccugggagaguaugauuuaaggagaugggagaagugggaguuagaucuggauaucaaagagguguucgugcauccuaauuacaguaaauccacaaccgauaaugauauugcccuucugcaccuugcacagccggcuacucuaucucaaacaauuguuccgauuugucucccugauaguggccuggcggaacgugaacucaaucaggcugggcaggagacccuagugacagguuggggcuaucacucaaguagggaaaaggaagccaaaagaaauagaacguuugugcuuaacuuuauuaaaauuccuguugugccucauaaugaaugcuccgaagugaugucgaacauggugucggaaaauaugcuuugcgcugggauucugggcgaccgccaggaugccugugaaggcgauucaggggggccgaugguugcaucuuuccaugggaccugguuuuuggugggauugguauccuggggcgaagguugcggacugcuucauaauuacggaguuuacacuaaagucucuagauaucucgauuggauacauggacacaucagagauaaagaagcuccccaaaaauccugggccccuuag

SEQ ID NO: 278558 - RNA, 1263 nt, Artificial Sequence
  derived and/or modified sequence
auguggaugacccacuggccauccggccccucaacuucuacagucaccagcgccuggaguuguccuugguccacuagggcaccagccugugccgccggaaccgccagggcauccacggccuccgcugcaucggccgcuacugcagcugcagcuggaagggcggcguccgccucagcagucagaggaagggggggguguuggagagggggugcgggccuagggccuggcugggggagaggaacaagcacaucaugcccacguccaccuuugccugccgagguuuccuuccugaauuguucgcuggauaacggaggaugcacccauuacugucuggaagaaguugguuggagaagaugcucaugugccccgggcuauaaacuaggggaugaucuccugcaaugccacccggcagucaaauuccccugcggucgaccuuggaaaagaauggagaagaagagaagucaucuuaagagggauacggaggaccaggaggaucagguugaccccagauuaauagaugguaagaugacccggcgcggugauucuccguggcaaguggugcuucucgacagcaaaaagaaguuggccuguggcgcaguauuaauacauccauccugggugcucaccgcugcgcauuguauggacgagaguaaaaaacuccugguuagacuuggagaauacgaccugagacgcugggaaaagugggagcucgaucucgacauuaaagaagucuuugugcauccuaacuauucaaagucaaccacagacaaugacaucgccuugcugcaccucgcucagcccgcuacuuuaucucagacuauugucccuauaugccugccagacuccggccucgcugaacgcgaacucaaucaggcaggucaagagacccugguuaccggguggggguaucauucuucucgggaaaaggaagcuaagagaaaccgaaccuucgugcugaacuucaucaaaauuccagucgucccccauaacgagugcagcgagguuaugaguaauaugguguccgaaaauaugcuuugcgcuggaauuuuaggagacagacaggaugcaugcgagggagauagcggagggccaaugguugcaucauuccaugggacuugguuucuggugggauugguuagcuggggggagggcugcggguugcugcacaacuacggcgucuauacuaaggugaguagauaccuggauuggauucacgggcauauuagggacaaagaagcaccgcaaaagucaugggcaccguag

SEQ ID NO: 278559 - protein, 228 aa, Artificial Sequence
  derived and/or modified sequence
MKQRQSALQWVICVSQPQKTSEMAANKSKGQSSLALHKVIMVGSGGVGKSALTLQFMYDEFVEDYEPTKADSYRKKVVLDGEEVQIDILDTAGQEDYAAIRDNYFRSGEGFLLVFSITEHESFTATAEFREQILRVKAEEDKIPLLVVGNKSDLEERRQVPVEEARSKAEEWGVQYVETSAKTRANVDKVFFDLMREIRTKKMSENKDKNGKKSSKNKKSFKERCCLL

SEQ ID NO: 278560 - DNA, 687 bp, Artificial Sequence
  derived and/or modified sequence
atgaagcagagacagagcgccctgcagtgggtgatctgcgtgagccagccccagaagaccagcgagatggccgccaacaagagcaagggccagagcagcctggccctgcacaaggtgatcatggtgggcagcggcggcgtgggcaagagcgccctgaccctgcagttcatgtacgacgagttcgtggaggactacgagcccaccaaggccgacagctacagaaagaaggtggtgctggacggcgaggaggtgcagatcgacatcctggacaccgccggccaggaggactacgccgccatcagagacaactacttcagaagcggcgagggcttcctgctggtgttcagcatcaccgagcacgagagcttcaccgccaccgccgagttcagagagcagatcctgagagtgaaggccgaggaggacaagatccccctgctggtggtgggcaacaagagcgacctggaggagagaagacaggtgcccgtggaggaggccagaagcaaggccgaggagtggggcgtgcagtacgtggagaccagcgccaagaccagagccaacgtggacaaggtgttcttcgacctgatgagagagatcagaaccaagaagatgagcgagaacaaggacaagaacggcaagaagagcagcaagaacaagaagagcttcaaggagagatgctgcctgctgtag

SEQ ID NO: 278561 - DNA, 687 bp, Artificial Sequence
  derived and/or modified sequence
atgaaacagcgccagagcgcgctgcagtgggttatttgtgtgtcacaaccccagaaaacatctgagatggccgcgaacaaaagtaaaggccaatccagtctggctctacataaagtaatcatggtcgggtctggcggtgtgggcaaatctgccttgactcttcagttcatgtacgacgagtttgtcgaggattatgagccaacgaaagctgacagctacaggaagaaggtggttcttgatggcgaggaggtgcagattgacatcctggatacagctggccaggaagattacgccgccatccgagataactatttccgctccggggaggggttcttgctggtgttctctattaccgagcatgagagcttcactgcaaccgcggagttcagagagcaaatattgcgcgtgaaggcagaggaagacaagatccccctcctcgtggtcgggaacaagagcgatctggaagagcggcgtcaagtgccggttgaagaggctcgttccaaagccgaagaatggggagttcagtacgtggagacctccgccaagactagggccaacgttgataaagtgtttttcgatctgatgagggaaatccggacaaaaaagatgagtgagaacaaagacaagaatgggaagaaatcttctaaaaataagaagtcctttaaagagcggtgctgcttgctgtag

SEQ ID NO: 278562 - DNA, 687 bp, Artificial Sequence
  derived and/or modified sequence
atgaagcagaggcagagcgccctgcagtgggtgatctgtgtgtcccagccccagaagaccagcgagatggccgccaacaagagcaagggccagagcagcctggccctgcacaaggtgatcatggtgggcagcggcggcgtgggcaagagcgccctgaccctgcagttcatgtatgatgaatttgtggaggactatgagcccaccaaggctgacagctacaggaagaaggtggtgctggatggagaggaggtgcagattgacatcctggacacagctggccaggaggactatgctgccatccgggacaactacttccgctctggagagggcttcctgctggtgttcagcatcacagagcacgagagcttcaccgccacagctgagttccgggagcagatcctgcgggtgaaggccgaggaggacaagatccccctgctggtggtgggcaacaagagtgacctggaggagcggcggcaggtgcctgtggaggaggcccggagcaaggccgaggagtggggcgtgcagtatgtggagaccagcgccaagacccgggccaacgtggacaaggtgttctttgacctgatgagggagatccgcaccaagaagatgtctgagaacaaggacaagaatggcaagaagagcagcaagaacaagaagagcttcaaggagcgctgctgcctgctgtag

SEQ ID NO: 278563 - DNA, 687 bp, Artificial Sequence
  derived and/or modified sequence
atgaagcagcggcagagcgccctgcagtgggtgatctgcgtgagccaacctcagaagacatccgagatggcagcaaataagagtaaaggtcagagctccttggccctgcataaagttatcatggtcgggtctggcggcgttgggaaatcagccctgaccttacagtttatgtacgacgagttcgtcgaagactacgaaccgaccaaggccgattcgtatcgtaaaaaggtcgtgctggatggcgaggaggtgcagatcgatatcctcgacacagcgggtcaagaagactatgcagcaatcagggacaattacttccgatctggcgaagggtttcttttagttttctctataactgagcatgaatcttttaccgccacagctgagtttagagaacagattctgcgagtcaaggctgaggaagataagatcccactcctggtcgtgggcaataagtccgacttagaggaaaggaggcaagtacctgtagaagaagcgaggtccaaggccgaggagtggggcgttcaatatgtggagaccagcgccaaaaccagagcgaacgtggataaggtgttttttgatctcatgcgcgagatccgtactaaaaaaatgtccgagaataaagacaagaacggcaaaaaatctagcaaaaacaaaaagtccttcaaagagcggtgctgtctgctttag

SEQ ID NO: 278564 - DNA, 687 bp, Artificial Sequence
  derived and/or modified sequence
atgaaacagagacagtctgccctgcagtgggtaatatgcgtgagccagcctcagaagacaagcgaaatggccgcaaataaatccaagggacagtcatcgttggctcttcataaagttatcatggtgggctccggcggtgtgggcaagtccgccttgactctgcagttcatgtatgacgaattcgtcgaagattacgaaccaaccaaagctgattcctaccgcaagaaggttgtgctggatggggaggaagtacagatcgatatcttagacacggccggtcaggaggactatgcagcaattcgtgacaattatttccgctccggcgagggcttcttgctggtcttctcaatcacagaacacgagtccttcaccgccaccgcagaattccgggagcagatcctaagggtgaaagcagaagaggataagatcccacttctggttgtaggaaacaaatccgatttagaagaacgcaggcaagtgcctgtggaggaagccagaagcaaggccgaggagtggggagttcagtacgtggagaccagtgcaaagactagggctaacgtggataaagtgttctttgatctgatgagggaaattaggactaagaagatgagtgaaaacaaggacaaaaacgggaaaaaatctagcaagaataagaaaagctttaaagagagatgttgtctgttgtag

SEQ ID NO: 278565 - DNA, 2339 bp, Artificial Sequence
  derived and/or modified sequence
gtggcttccgaggagagggcaagaacggaagcgagggcgcgctctcgagaggaggggttgcctaggcgacgccggaggcgcgctcggggggtgggaaagcgagcccggcagctcaatgacaaatcggtggaggacggctggggtccggccccgggagggggcggggcgcgtttaagagctgcgggccgggtgcggacggcggaggcggcgggactggtccctgctcttcagtgggtcatctgtgtgtcacagcctcagaagaccagcgagatggctgccaacaagagtaagggccagagctccttggccctccacaaggtgatcatggttggcagcggaggcgttggcaagtcagccctgacgcttcagttcatgtatgacgagtttgtagaagactatgaacctaccaaagctgacagttatagaaagaaagtggttcttgatggggaagaagttcagatagatattctggacaccgctgggcaagaggactacgcagccattcgagataactactttcggagtggggaagggtttcttcttgtgttctcaatcacagaacatgaatcctttacagcaactgccgaattcagggaacagattctccgtgtgaaggctgaagaagataaaattccactgctcgtcgtgggaaacaagtctgacctagaggagcggaggcaggtgcctgtggaggaggccaggagtaaagccgaagagtggggcgtgcagtacgtggagacgtcagcgaagacccgggccaacgtggacaaggtgttctttgacctaatgagagaaatcagaacaaagaagatgtcagaaaacaaagacaagaatggcaagaaaagcagcaagaacaagaaaagttttaaagaaagatgttgcttactatgagtgtcaaggtgacggatgaagccagctgctcctaaggacacagggctgggttggtaaagagaaggctatggttgacttcttgcttgtgcttcccactctccccgacttcattcactcaaacttctttaaatggggaaaaatatttgtgactctgtggctggcagaagaaataagcccatgcaagtggaagggctgctttgtcaggaggttgtggaatttctttcttctccccttcttccctcccaaaagcttagctatgtataaagtgccacagataggaaacagctgttaattacaaagagaaagaattgtcatagcatcttattttgttcctagttttataacattaccatccttcgttttgaactacagatgttgtagtgggttttggaggagggagtggagtaagatgccctcccacttttatcagtttagtagtagtactgagaaaaatcccttcagctctaagaacactgaaaaatccaccgattttttgggtaagcttcttggcaataccctgtggatctgaaacagctaaaaaaatgaatttgaattgcgccagataggtcaataccaagcttctgattcctcctcacatatgaaaagtgaaagttgtgagttgttttcctcttatttaaacattggcctattataatctgtgttggttatttttctcctgtaagcatcctgatttttctgtaggaacttttctttggcagaccaagtgaagactcaggaatggtgtgcattataaatgacacacattgccacttgtgtagatatttttaagttctttggctaagtcctctcctaactgcctgtcctctggttaggcccctccctctccactagtggtgaatgcatgtgtctgtctgatcagcatcactgcacacggaggtctagtgagcctcttgctaagtgtcacacacactcttcccaaagacgtgatgagttaaagttgtattctgaaatcatgaagccagagcctgtgccagaccttctgctacctctcatagaattgctctgtaattctaaatttaaaattagaagtagagagagataagccatcgcccctttgcctctgagaattggctgctgtttctaatataattattttctaagatagccagatagttagaaaaagattttcattgatgacatatctttaaactttcttgcatcagtattctaaattgagcaaactgaaagattttcatcaggaaaggagcactgtgggaagagcccagtattcacattttttccccatttttcagaagcgacatttcatatataggtgccaaaagtgaatcggggtgcggagagtgggaaccttttgaatttatgattgtcacagagatggtagaaattatgatctgactggaaaacaatcctgtatcccctcccaaagaatcatgggctttttttttgaataaaaaagcagacaaata

SEQ ID NO: 278566 - DNA, 2308 bp, Artificial Sequence
  derived and/or modified sequence
aaagcgagcccggcagctcaatgacaaatcggtggaggacggctggggtccggccccgggagggggcggggcgcgtttaagagctgcgggccgggtgcggacggcggaggcggcgggactggtccctgctcttcagtgggtcatctgtgtgtcacagcctcagaagaccagcgagatggctgccaacaagagtaagggccagagctccttggccctccacaaggtgatcatggttggcagcggaggcgttggcaagtcagccctgacgcttcagttcatgaatgtttcaaaatcattggcatatgacaagaaaaagtatacagcaaacaaaaaagtagaaggtattctagagtttgtagaagactatgaacctaccaaagctgacagttatagaaagaaagtggttcttgatggggaagaagttcagatagatattctggacaccgctgggcaagaggactacgcagccattcgagataactactttcggagtggggaagggtttcttcttgtgttctcaatcacagaacatgaatcctttacagcaactgccgaattcagggaacagattctccgtgtgaaggctgaagaagataaaattccactgctcgtcgtgggaaacaagtctgacctagaggagcggaggcaggtgcctgtggaggaggccaggagtaaagccgaagagtggggcgtgcagtacgtggagacgtcagcgaagacccgggccaacgtggacaaggtgttctttgacctaatgagagaaatcagaacaaagaagatgtcagaaaacaaagacaagaatggcaagaaaagcagcaagaacaagaaaagttttaaagaaagatgttgcttactatgagtgtcaaggtgacggatgaagccagctgctcctaaggacacagggctgggttggtaaagagaaggctatggttgacttcttgcttgtgcttcccactctccccgacttcattcactcaaacttctttaaatggggaaaaatatttgtgactctgtggctggcagaagaaataagcccatgcaagtggaagggctgctttgtcaggaggttgtggaatttctttcttctccccttcttccctcccaaaagcttagctatgtataaagtgccacagataggaaacagctgttaattacaaagagaaagaattgtcatagcatcttattttgttcctagttttataacattaccatccttcgttttgaactacagatgttgtagtgggttttggaggagggagtggagtaagatgccctcccacttttatcagtttagtagtagtactgagaaaaatcccttcagctctaagaacactgaaaaatccaccgattttttgggtaagcttcttggcaataccctgtggatctgaaacagctaaaaaaatgaatttgaattgcgccagataggtcaataccaagcttctgattcctcctcacatatgaaaagtgaaagttgtgagttgttttcctcttatttaaacattggcctattataatctgtgttggttatttttctcctgtaagcatcctgatttttctgtaggaacttttctttggcagaccaagtgaagactcaggaatggtgtgcattataaatgacacacattgccacttgtgtagatatttttaagttctttggctaagtcctctcctaactgcctgtcctctggttaggcccctccctctccactagtggtgaatgcatgtgtctgtctgatcagcatcactgcacacggaggtctagtgagcctcttgctaagtgtcacacacactcttcccaaagacgtgatgagttaaagttgtattctgaaatcatgaagccagagcctgtgccagaccttctgctacctctcatagaattgctctgtaattctaaatttaaaattagaagtagagagagataagccatcgcccctttgcctctgagaattggctgctgtttctaatataattattttctaagatagccagatagttagaaaaagattttcattgatgacatatctttaaactttcttgcatcagtattctaaattgagcaaactgaaagattttcatcaggaaaggagcactgtgggaagagcccagtattcacattttttccccatttttcagaagcgacatttcatatataggtgccaaaagtgaatcggggtgcggagagtgggaaccttttgaatttatgattgtcacagagatggtagaaattatgatctgactggaaaacaatcctgtatcccctcccaaagaatcatgggctttttttttgaataaaaaagcagacaaatag

SEQ ID NO: 278567 - DNA, 981 bp, Artificial Sequence
  derived and/or modified sequence
ctcccgctcgggaccgtccacttcctcagtcctccggccgcggcttgggcagggtcagggctgggaagtgttgcaaaaacttaactgccctcggaacttgcacgcgccgtgaactgggcggtgttcctaaagggcttcggtttgctggttttgttttggtcctgtcttgcaaatgagcataaagttgtttctcccccagcctcctcccctttcctttctgataggggccagcggcgaaggggcttctaaggggaagcgcctggactgggcatcgccgtcccggttcttgccgcctgtgggagtgtgaggttaaccgtgctcggtgcagggttgcggggcgcggagcttgctgcgtccacactgcttgtgtgagcagtgtcctctctgtgctcatttccaacgagaaacgttggaactttggtgttcttatcagctcttcagtgggtcatctgtgtgtcacagcctcagaagaccagcgagatggctgccaacaagagtaagggccagagctccttggccctccacaaggtgatcatggttggcagcggaggcgttggcaagtcagccctgacgcttcagttcatgtatgacgagtttgtagaagactatgaacctaccaaagctgacagttatagaaagaaagtggttcttgatggggaagaagttcagatagatattctggacaccgctgggcaagaggactacgcagccattcgagataactactttcggagtggggaagggtttcttcttgtgttctcaatcacagaacatgaatcctttacagcaactgccgaattcagggaacagattctccgtgtgaaggctgaagaagataaaattccactgctcgtcgtgggaaacaagtctgacctagaggagcggaggcaggtgcctgtggaggaggccaggagtaaagccgaagagtggggcgtgcagtacgtggagacgtcagcgaagacccgggccaacgtggacaag

SEQ ID NO: 278568 - DNA, 1583 bp, Artificial Sequence
  derived and/or modified sequence
gatttcagcagcgggagagcgggtggcaggaggaggtctctgcatgaaacagcggcagtcagctcttcagtgggtcatctgtgtgtcacagcctcagaagaccagcgagatggctgccaacaagagtaagggccagagctccttggccctccacaaggtgatcatggttggcagcggaggcgttggcaagtcagccctgacgcttcagttcatgtatgacgagtttgtagaagactatgaacctaccaaagctgacagttatagaaagaaagtggttcttgatggggaagaagttcagatagatattctggacaccgctgggcaagaggactacgcagccattcgagataactactttcggagtggggaagggtttcttcttgtgttctcaatcacagaacatgaatcctttacagcaactgccgaattcagggaacagattctccgtgtgaaggctgaagaagataaaattccactgctcgtcgtgggaaacaagtctgacctagaggagcggaggcaggtgcctgtggaggaggccaggagtaaagccgaagagtggggcgtgcagtacgtggagacgtcagcgaagacccgggccaacgtggacaaggtgttctttgacctaatgagagaaatcagaacaaagaagatgtcagaaaacaaagacaagaatggcaagaaaagcagcaagaacaagaaaagttttaaagaaagatgttgcttactatgagtgtcaaggtgacggatgaagccagctgctcctaaggacacagggctgggttggtaaagagaaggctatggttgacttcttgcttgtgcttcccactctccccgacttcattcactcaaacttctttaaatggggaaaaatatttgtgactctgtggctggcagaagaaataagcccatgcaagtggaagggctgctttgtcaggaggttgtggaatttctttcttctccccttcttccctcccaaaagcttagctatgtataaagtgccacagataggaaacagctgttaattacaaagagaaagaattgtcatagcatcttattttgttcctagttttataacattaccatccttcgttttgaactacagatgttgtagtgggttttggaggagggagtggagtaagatgccctcccacttttatcagtttagtagtagtactgagaaaaatcccttcagctctaagaacactgaaaaatccaccgattttttgggtaagcttcttggcaataccctgtggatctgaaacagctaaaaaaatgaatttgaattgcgccagataggtcaataccaagcttctgattcctcctcacatatgaaaagtgaaagttgtgagttgttttcctcttatttaaacattggcctattataatctgtgttggttatttttctcctgtaagcatcctgatttttctgtaggaacttttctttggcagaccaagtgaagactcaggaatggtgtgcattataaatgacacacattgccacttgtgtagatatttttaagttctttggctaagtcctctcctaactgcctgtcctctggttaggcccctccctctccactagt

SEQ ID NO: 278569 - protein, 188 aa, Artificial Sequence
  derived and/or modified sequence
MGTPLDGGSRVPIGCPAKLRRVTRKKVAPDLEGWLSLAKARYAMGAKSVGPLQYASHMEPQVCLHASEAQEGLQKFKVVRAGVHAPEEVGPREAGLRRRKGPTKTPEPESSEAPQDPLNWFGILVPHSLRQAQASFRDGVLEAKKRKCFLERVIQCVVSPAAEQEAEDESCPEDWAAAVPAETSAKAI

SEQ ID NO: 278570 - DNA, 567 bp, Artificial Sequence
  derived and/or modified sequence
atgggaacacccttggatggtggttcacgcgtacccatcgggtgtcccgccaagcttaggagggtgactaggaagaaggtggcacctgaccttgaaggctggctgtccctcgccaaggcccgatacgccatgggcgctaaatccgtggggccactgcaatatgcgtcacacatggaaccccaggtctgtcttcatgcctccgaagcacaggagggcttacagaagttcaaagtcgtgcgtgccggggtccacgctccagaggaggtcggtcccagagaggccggactaaggcggagaaagggaccaacaaagactcctgagcctgaaagcagtgaagccccccaggatcctctaaattggttcggaattctagttccgcattccctgcgtcaggcccaggcgtctttccgtgatggcgtgctggaggccaagaaacgaaagtgcttcctcgaacgagttatccagtgtgtagtgtccccagccgcagaacaggaagcggaggacgagtcctgcccggaggactgggctgccgctgtgccagccgagacatctgctaaagccatttag

SEQ ID NO: 278571 - DNA, 567 bp, Artificial Sequence
  derived and/or modified sequence
atgggcacccccctggatggcggcagccgggtgcccatcggctgcccagccaagctgcggcgggtgaccaggaagaaggtggccccagacctggagggctggctgagcctggccaaggcccgctatgccatgggcgccaagtctgtgggccccctgcagtatgccagccacatggagccccaggtgtgcctgcacgccagcgaggcccaggagggcctgcagaagttcaaggtggtgcgggccggcgtgcacgcccctgaggaggtgggcccccgggaggccggcctgcggcggaggaagggccccaccaagaccccagagcctgagagcagcgaggccccccaggaccccctgaactggtttggcatcctggtgccccacagcctgcggcaggcccaggccagcttcagagatggagtgctggaggccaagaagaggaagtgcttcctggagagggtcatccagtgtgtggtgtccccagctgctgagcaggaggctgaagatgagagctgcccagaggactgggccgctgctgtgcctgctgagaccagcgccaaggccatctag

SEQ ID NO: 278572 - DNA, 567 bp, Artificial Sequence
  derived and/or modified sequence
atgggcacccccctggacggcggcagccgggtgcccatcggctgcccagccaagctgcggcgcgtgacaagaaagaaggtcgctccggatctcgaaggttggctgagcttggctaaagcccgctacgctatgggggctaagtccgtggggcctctgcagtatgcaagtcacatggaaccacaggtgtgtcttcacgccagcgaggctcaggaaggattgcagaagtttaaggtggttcgcgcaggtgtgcatgcccccgaggaagtgggcccacgggaggctggattaaggagacgcaaaggcccgacaaagactcccgagcctgagtcctccgaagctccacaggatcccctcaactggtttggtatcctggtaccccatagcctgagacaggcacaggccagtttccgggacggagtcctggaggctaagaagcgaaaatgctttcttgagagggtgatccaatgcgtggttagtcccgccgcggagcaggaggccgaggatgagtcatgtccagaggattgggcagctgccgtacctgcggagacgtccgccaaggcaatttag

SEQ ID NO: 278573 - DNA, 567 bp, Artificial Sequence
  derived and/or modified sequence
atggggactcctcttgatggtgggagtcgggtccccatagggtgtcctgccaaactccgaagggtgacacgcaaaaaggttgcccctgacctcgaaggctggcttagtctcgccaaagctcgatacgccatgggcgcaaagtctgtgggcccacttcaatatgcctctcacatggaaccgcaggtgtgtctgcatgcctccgaagctcaggaagggttacagaagttcaaagttgttcgggctggcgtgcatgcccctgaggaggttgggccacgcgaagctggattacgccgaagaaaaggacccactaagacaccggagcccgaaagctctgaggctccccaggaccctctgaattggttcggaatcctggttccgcatagccttagacaagcccaggcctcctttcgggatggtgtgttagaagctaagaagaggaagtgctttctggagcgggtgatacagtgtgtagtgagccccgctgctgagcaggaagcagaggacgaatcttgccccgaggattgggccgctgccgtgccagccgaaacttcggccaaagctatctag

SEQ ID NO: 278574 - DNA, 1430 bp, Artificial Sequence
  derived and/or modified sequence
aattggagaaaccagttgattggttgcttccgtgctgcttctctaagggcgcttgcccttaaagaagctgacccagaggccttggtgctgccggcgtggggatccccagatgggaacgccccttgatggaggatctcgtgtgcctattggctgtcctgccaaactgcggagggtgacaaggaagaaggtggctccagatctggagggctggctctcgctcgccaaggctcgctacgcgatgggcgccaagtcggtagggcccctgcagtatgcttcccacatggagccccaggtctgcctccacgccagcgaggcccaggagggactccagaagttcaaggtggtgagagctggtgtccacgccccagaggaggtggggcctcgcgaagcaggtctgcggaggcgcaagggccccactaagaccccagaaccggagtcctctgaggcccctcaggaccccctgaactggtttggaatcctagttcctcacagtctacgtcaggctcaagcaagcttccgggatggtgtcctggaggccaagaagagaaagtgtttcctggagcgagtgatccaatgtgtggtcagccctgctgctgaacaggaggccgaagacgagagctgcccggaggactgggcagcagctgttccagcagagacatcagcaaaagccatctagaggtggatccagagtgtggactaacagagaaaagaagtggagggagagcaggcctgcagctggccgcagacatagccagcctccagaaccgcattgactggggtcgaagccagctccggggactccaagagaaactcaagcagctggagcctggggctgcctgacatgcgcgcaaagaggcagggcagcgagcacagctgttctccgacatggctacgtgatctcaggccttcttccttcacaattagctcttgcccctaccccacgccagctaatgccccttctgtgtccctgctctgcatgtttccattttccttaggtgtgaagtttgaagaggcaaacagtaattttgaaagccactactttgaaaccattctaaggcctgagttcccataggacacactcacataggcaggtacacgttagtcaacaattggaactgcctcttggatcactcagctgtgctttcatggctggatgatggaacactgtgcgaagagagatgggggccaggaagtagcgcttcatgcttagtacatcctccaaattgtctttgctggaggagaaaaccgtactcagccaaaagatcaggacaatatgacttgagtccacaaggacacaaacacctgagtagctgggcagcccttggcagggtctaagccaggaagtaaaaatgatctggcctagatatttaagggaactctaggaagaggcctaggtttttaaaatcctgtctctttgtcttaccataaga

SEQ ID NO: 278575 - DNA, 567 bp, Artificial Sequence
  derived and/or modified sequence
atgggcacccccctggacggcggcagcagagtgcccatcggctgccccgccaagctgagaagagtgaccagaaagaaggtggcccccgacctggagggctggctgagcctggccaaggccagatacgccatgggcgccaagagcgtgggccccctgcagtacgccagccacatggagccccaggtgtgcctgcacgccagcgaggcccaggagggcctgcagaagttcaaggtggtgagagccggcgtgcacgcccccgaggaggtgggccccagagaggccggcctgagaagaagaaagggccccaccaagacccccgagcccgagagcagcgaggccccccaggaccccctgaactggttcggcatcctggtgccccacagcctgagacaggcccaggccagcttcagagacggcgtgctggaggccaagaagagaaagtgcttcctggagagagtgatccagtgcgtggtgagccccgccgccgagcaggaggccgaggacgagagctgccccgaggactgggccgccgccgtgcccgccgagaccagcgccaaggccatctag

SEQ ID NO: 278576 - protein, 1155 aa, Artificial Sequence
  derived and/or modified sequence
MWLKPEEVLLKNALKLWVTQKSSCYFILQRRRGHGEGGGRLTGRLVGALDAVLDSNARVAPFRILLQVPGSQVYSPIACGELLNGSDVYWAIATGATLEEINQHWDWLEQNLLHTLSVFDNKDDIASFVKGKVKALIAEETSSRLAEQEEEPEKFREALVKFEARFNFPEAEKLVTYYSCCCWKGRVPRQGWLYLSINHLCFYSFFLGKELKLVVPWVDIQKLERTSNVFLTDTIRITTQNKERDFSMFLNLDEVFKVMEQLADVTLRRLLDNEVFDLDPDLQEPSQITKRDLEARAQNEFFRAFFRLPRKEKLHAVVDCSLWTPFSRCHTTGRMFASDSYICFASREDGCCKIILPLREVVSIEKMEDTSLLPHPIIVSIRSKVAFQFIELRDRDSLVEALLARLKQVHANHPVHYDTSADDDMASLVFHSTSMCSDHRFGDLEMMSSQNSEESEKEKSPLMHPDALVTAFQQSGSQSPDSRMSREQIKISLWNDHFVEYGRTVCMFRTEKIRKLVAMGIPESLRGRLWLLFSDAVTDLASHPGYYGNLVEESLGKCCLVTEEIERDLHRSLPEHPAFQNETGIAALRRVLTAYAHRNPKIGYCQSMNILTSVLLLYTKEEEAFWLLVAVCERMLPDYFNHRVIGAQVDQSVFEELIKGHLPELAEHMNDLSALASVSLSWFLTLFLSIMPLESAVNVVDCFFYDGIKAIFQLGLAVLEANAEDLCSSKDDGQALMILSRFLDHIKNEDSPGPPVGSHHAFFSDDQEPYPVTDISDLIRDSYEKFGDQSVEQIEHLRYKHRIRVLQGHEDTTKQNVLRVVIPEVSILPEDLEELYDLFKREHMMSCYWEQPRPMASRHDPSRPYAEQYRIDARQFAHLFQLVSPWTCGAHTEILAERTFRLLDDNMDQLIEFKAFVSCLDIMYNGEMNEKIKLLYRLHIPPALTENDRDSQSPLRNPLLSTSRPLVFGKPNGDAVDYQKQLKQMIKDLAKEKDKTEKELPKMSQREFIQFCKTLYSMFHEDPEENDLYQAIATVTTLLLQIGEVGQRGSSSGSCSQECGEELRASAPSPEDSVFADTGKTPQDSQAFPEAAERDWTVSLEHILASLLTEQSLVNFFEKPLDMKSKLENAKINQYNLKTFEMSHQSQSELKLSNL

SEQ ID NO: 278577 - DNA, 3468 bp, Artificial Sequence
  derived and/or modified sequence
atgtggctgaagcccgaggaggtgctgctgaagaacgccctgaagctgtgggtgacccagaagagcagctgctacttcatcctgcagagaagaagaggccacggcgagggcggcggcagactgaccggcagactggtgggcgccctggacgccgtgctggacagcaacgccagagtggcccccttcagaatcctgctgcaggtgcccggcagccaggtgtacagccccatcgcctgcggcgagctgctgaacggcagcgacgtgtactgggccatcgccaccggcgccaccctggaggagatcaaccagcactgggactggctggagcagaacctgctgcacaccctgagcgtgttcgacaacaaggacgacatcgccagcttcgtgaagggcaaggtgaaggccctgatcgccgaggagaccagcagcagactggccgagcaggaggaggagcccgagaagttcagagaggccctggtgaagttcgaggccagattcaacttccccgaggccgagaagctggtgacctactacagctgctgctgctggaagggcagagtgcccagacagggctggctgtacctgagcatcaaccacctgtgcttctacagcttcttcctgggcaaggagctgaagctggtggtgccctgggtggacatccagaagctggagagaaccagcaacgtgttcctgaccgacaccatcagaatcaccacccagaacaaggagagagacttcagcatgttcctgaacctggacgaggtgttcaaggtgatggagcagctggccgacgtgaccctgagaagactgctggacaacgaggtgttcgacctggaccccgacctgcaggagcccagccagatcaccaagagagacctggaggccagagcccagaacgagttcttcagagccttcttcagactgcccagaaaggagaagctgcacgccgtggtggactgcagcctgtggacccccttcagcagatgccacaccaccggcagaatgttcgccagcgacagctacatctgcttcgccagcagagaggacggctgctgcaagatcatcctgcccctgagagaggtggtgagcatcgagaagatggaggacaccagcctgctgccccaccccatcatcgtgagcatcagaagcaaggtggccttccagttcatcgagctgagagacagagacagcctggtggaggccctgctggccagactgaagcaggtgcacgccaaccaccccgtgcactacgacaccagcgccgacgacgacatggccagcctggtgttccacagcaccagcatgtgcagcgaccacagattcggcgacctggagatgatgagcagccagaacagcgaggagagcgagaaggagaagagccccctgatgcaccccgacgccctggtgaccgccttccagcagagcggcagccagagccccgacagcagaatgagcagagagcagatcaagatcagcctgtggaacgaccacttcgtggagtacggcagaaccgtgtgcatgttcagaaccgagaagatcagaaagctggtggccatgggcatccccgagagcctgagaggcagactgtggctgctgttcagcgacgccgtgaccgacctggccagccaccccggctactacggcaacctggtggaggagagcctgggcaagtgctgcctggtgaccgaggagatcgagagagacctgcacagaagcctgcccgagcaccccgccttccagaacgagaccggcatcgccgccctgagaagagtgctgaccgcctacgcccacagaaaccccaagatcggctactgccagagcatgaacatcctgaccagcgtgctgctgctgtacaccaaggaggaggaggccttctggctgctggtggccgtgtgcgagagaatgctgcccgactacttcaaccacagagtgatcggcgcccaggtggaccagagcgtgttcgaggagctgatcaagggccacctgcccgagctggccgagcacatgaacgacctgagcgccctggccagcgtgagcctgagctggttcctgaccctgttcctgagcatcatgcccctggagagcgccgtgaacgtggtggactgcttcttctacgacggcatcaaggccatcttccagctgggcctggccgtgctggaggccaacgccgaggacctgtgcagcagcaaggacgacggccaggccctgatgatcctgagcagattcctggaccacatcaagaacgaggacagccccggcccccccgtgggcagccaccacgccttcttcagcgacgaccaggagccctaccccgtgaccgacatcagcgacctgatcagagacagctacgagaagttcggcgaccagagcgtggagcagatcgagcacctgagatacaagcacagaatcagagtgctgcagggccacgaggacaccaccaagcagaacgtgctgagagtggtgatccccgaggtgagcatcctgcccgaggacctggaggagctgtacgacctgttcaagagagagcacatgatgagctgctactgggagcagcccagacccatggccagcagacacgaccccagcagaccctacgccgagcagtacagaatcgacgccagacagttcgcccacctgttccagctggtgagcccctggacctgcggcgcccacaccgagatcctggccgagagaaccttcagactgctggacgacaacatggaccagctgatcgagttcaaggccttcgtgagctgcctggacatcatgtacaacggcgagatgaacgagaagatcaagctgctgtacagactgcacatcccccccgccctgaccgagaacgacagagacagccagagccccctgagaaaccccctgctgagcaccagcagacccctggtgttcggcaagcccaacggcgacgccgtggactaccagaagcagctgaagcagatgatcaaggacctggccaaggagaaggacaagaccgagaaggagctgcccaagatgagccagagagagttcatccagttctgcaagaccctgtacagcatgttccacgaggaccccgaggagaacgacctgtaccaggccatcgccaccgtgaccaccctgctgctgcagatcggcgaggtgggccagagaggcagcagcagcggcagctgcagccaggagtgcggcgaggagctgagagccagcgcccccagccccgaggacagcgtgttcgccgacaccggcaagaccccccaggacagccaggccttccccgaggccgccgagagagactggaccgtgagcctggagcacatcctggccagcctgctgaccgagcagagcctggtgaacttcttcgagaagcccctggacatgaagagcaagctggagaacgccaagatcaaccagtacaacctgaagaccttcgagatgagccaccagagccagagcgagctgaagctgagcaacctgtag

SEQ ID NO: 278578 - DNA, 3468 bp, Artificial Sequence
  derived and/or modified sequence
atgtggttaaagcctgaagaggttctgcttaagaacgccctgaaactgtgggtgacccagaagagctcttgttattttatcctgcagcggcgacgggggcatggtgaaggaggcggacgtttgaccggaagactcgtgggggcacttgacgcagtgctggattcaaacgccagggtcgcaccttttaggattttgctccaggttcctggaagccaagtgtattccccaatcgcatgtggagagctcctaaacggttccgatgtgtattgggccatagccaccggagccacgctggaggaaatcaatcagcactgggattggcttgagcaaaatttactgcataccctttcagtctttgacaataaagacgacatcgctagcttcgtcaaggggaaggtgaaagccctgattgctgaagagacctcgagcagactggctgaacaggaggaggaacccgagaagtttagggaagccctggtgaaattcgaagctaggttcaatttcccagaagcggagaaattggtgacctactattcctgttgctgttggaaggggagagtgcctaggcagggatggttatacttgagcataaaccacctctgcttctattccttcttcttgggcaaggagctgaagctggtggtgccttgggtggatattcagaagcttgagagaaccagtaatgtattcctcaccgacacgattcgaattacaacccagaataaggagcgggacttctctatgttcctgaatctcgatgaagtattcaaagtcatggagcagctggccgatgtcacgctccggcgactgttagacaatgaagtcttcgacctcgaccctgatcttcaggaaccatctcagattaccaaaagggaccttgaagcgcgcgcacagaacgaatttttcagggccttctttaggttacccaggaaggaaaagcttcatgctgtcgttgactgctccctctggacgcctttctcacgctgccatactacaggccgcatgtttgccagtgactcttacatatgctttgcttcaagagaggacggctgctgtaagattatactgccgctgcgagaagttgtctcaattgagaagatggaggatacctcattgctgccccaccctatcattgtgagcatcagaagtaaagtggccttccagttcattgagctgcgagacagggattcattggtggaagcactgctagccaggctgaaacaagtacacgccaaccaccccgtacactatgatacaagtgccgatgatgacatggctagccttgtctttcactctacatctatgtgttccgaccatagatttggggaccttgaaatgatgtctagtcagaactccgaggagtcggaaaaggaaaaatcccccctgatgcatcccgacgccctggtaactgcgttccagcagagcggctctcagtcccctgacagtagaatgtctagagagcaaattaaaatctcactttggaacgaccacttcgtggaatacggccggaccgtttgtatgttccggaccgaaaaaatccgcaaactggttgctatgggcattccggagtctctgagaggacgtctgtggctgttattcagtgacgctgttacggacttggcgtcccaccccggatattatggcaacctagttgaagagtccctgggtaagtgttgtctcgtgacggaggagattgagagggacctgcaccggtctctacccgagcatccagcttttcagaatgagactggtatcgccgccttgcggagagtgctcaccgcctacgcccaccgtaatcccaagataggttactgtcagtcaatgaacattctaacatctgtattgctcctgtacaccaaggaggaagaggctttctggctcctggtggctgtgtgcgagagaatgctgcctgattattttaatcaccgcgttataggggcgcaggtggatcagtcggtgtttgaggagttgatcaaggggcatctacccgaactggccgagcacatgaacgacctgtccgctctggcctccgtgtcactgtcctggtttctgactctcttcctgtccattatgcctttggaatcagccgtgaatgtcgtggattgcttcttctacgatgggatcaaggctatttttcagctggggttggctgtgttggaggcaaacgccgaggatctatgcagttccaaggatgatggccaagctctcatgattctgagccgcttcctcgaccatatcaagaatgaggattcacccggccctcccgtaggatcccatcacgccttttttagcgacgaccaggagccatatcccgttaccgacatctcggatcttatcagagattcgtacgaaaagttcggagaccagagcgttgaacagatcgagcacctacgctacaagcacaggattcgcgttttacagggacatgaagacaccacgaaacagaatgtgttgagggtggtgatccctgaggtcagcattcttcccgaagacttggaagagctatatgatttatttaaacgagaacatatgatgtcatgctactgggagcagcctagaccgatggcgtccagacatgacccctcacgaccttatgctgaacaatatcgcattgatgctcggcagttcgctcacctttttcaattggtgtccccgtggacctgtggagcccacacagaaatcttggccgagcgaacattccgtctactagacgacaacatggatcagctgatagagtttaaagcattcgtatcctgcttggacataatgtacaacggagagatgaacgagaaaatcaagttgctgtaccgcctgcacattccccccgctttgacagagaacgacagagactcccagagccccctccgtaatcccctactgagcacctcccggcctttggtctttggaaagcctaacggggatgctgttgactatcagaagcagcttaagcaaatgattaaggacttagctaaggagaaggataagactgagaaggaattgcccaaaatgtctcagagagaattcatccagttttgcaagaccttatatagcatgtttcacgaggatcccgaggaaaatgatctttatcaggcaatcgctacagtgaccacccttctgttacagatcggcgaggtaggccagagggggtcctcaagcgggtcgtgttcgcaagagtgcggagaagagctgagagctagtgccccatcacctgaggattcagtgttcgcagacacagggaaaacccctcaggactcacaagcctttcctgaggcagccgaacgggattggacggtgtctctggaacacattctggcttctctgttgacagagcagtccctcgtgaatttcttcgaaaaaccactagacatgaagtctaagctcgagaacgccaagatcaatcagtacaatctaaagactttcgagatgtctcaccaatcacagagtgagttgaaacttagtaatctctag

SEQ ID NO: 278579 - DNA, 3468 bp, Artificial Sequence
  derived and/or modified sequence
atgtggctgaagccagaggaggtgctgctgaagaatgccctgaagctgtgggtgacccagaagagcagctgctacttcatcctgcagaggagaagaggccacggggagggcggcggccgcctgaccggccgcctggtgggcgccctggatgctgtgctggacagcaatgcccgggtggcccccttccgcatcctgctgcaggtgcccggcagccaggtgtacagccccatcgcctgtggggagctgctgaatggaagtgatgtgtactgggccatcgccaccggggccaccctggaggagatcaaccagcactgggactggctggagcagaacctgctgcacaccctgtctgtgtttgacaacaaggatgacatcgccagctttgtgaagggcaaggtgaaggccctgattgctgaggagaccagcagccggctggccgagcaggaggaggagcctgagaagttccgggaggccctggtgaagtttgaggcccgcttcaacttccctgaggccgagaagctggtgacctactacagctgctgctgctggaagggccgggtgccccggcagggctggctgtacctgagcatcaaccacctgtgcttctacagcttcttcctgggcaaggagctgaagctggtggtgccctgggtggacatccagaagctggagaggaccagcaatgtgttcctgacagacaccatccgcatcaccacccagaacaaggagcgggacttctccatgttcctgaacctggatgaggtgttcaaggtgatggagcagctggctgatgtgaccctgcggcggctgctggacaatgaggtgtttgacctggaccctgacctgcaggagcccagccagatcaccaagagggacctggaggcccgggcccagaatgagttcttccgggccttcttccggctgcccaggaaggagaagctgcatgctgtggtggactgcagcctgtggacccccttcagccgctgccacaccaccggccgcatgtttgccagtgacagctacatctgctttgccagccgggaggatggctgctgcaagatcatcctgcccctgcgggaggtggtgtccattgagaagatggaggacaccagcctgctgccccaccccatcatcgtgtccatccgcagcaaggtggccttccagttcatcgagctgcgggaccgggacagcctggtggaggccctgctggcccggctgaagcaggtgcacgccaaccaccctgtgcactatgacaccagcgcagatgatgacatggccagcctggtgttccacagcacctccatgtgcagcgaccacagatttggagacctggagatgatgagcagccagaacagcgaggagagcgagaaggagaagagccccctgatgcacccagatgccctggtgacagccttccagcagagcggcagccagagcccagacagcaggatgagccgggagcagatcaagatcagcctgtggaatgaccactttgtggagtatggccgcacagtgtgcatgttcagaacagagaagatcaggaagctggtggccatgggcatccctgagagcctgcggggccgcctgtggctgctcttcagtgatgctgtgacagacctggccagccaccctggctactacggcaacctggtggaggagagcctgggcaagtgctgcctggtgacagaggagattgagcgggacctgcacaggagcctgcctgagcacccagccttccagaatgaaacaggaattgctgccctgcggcgggtgctgacagcctatgcccacaggaaccccaagattggctactgccagagcatgaacatcctgacctctgtgctgctgctgtacaccaaggaggaggaggccttctggctgctggtggccgtgtgtgagaggatgctgcctgactacttcaaccaccgggtgattggagcccaggtggaccagagcgtgtttgaggagctgatcaagggccacctgcctgagctggccgagcacatgaatgacctgagcgccctggcctctgtgtccctgtcctggttcctgaccctcttcctgagcatcatgcccctggagagcgctgtgaatgtggtggactgcttcttctatgatggcatcaaggccatcttccagctgggcctggccgtgctggaggccaatgctgaggacctgtgcagcagcaaggatgatggccaggccctgatgatcctgagccgcttcctggaccacatcaagaatgaagacagccctggcccccctgtgggcagccaccacgccttcttcagtgatgaccaggagccctaccctgtgacagacatcagtgacctgatccgggacagctatgagaagtttggagaccagagcgtggagcagatcgagcacctgcgctacaagcaccgcatccgggtgctgcagggccacgaggacaccaccaagcagaatgtgctgcgggtggtgattcctgaggtgtccatcctgcctgaggacctggaggagctgtatgacctcttcaagcgggagcacatgatgagctgctactgggagcagccccggcccatggccagcagacatgaccccagccggccctatgcagagcagtacagaattgatgcccggcagtttgcccacctgttccagctggtgagcccctggacctgtggggcccacacagagatcctggccgagaggaccttccggctgctggatgacaacatggaccagctgattgagttcaaggcctttgtgtcctgcctggacatcatgtacaatggagagatgaatgagaagatcaagctgctgtaccgcctgcacatccccccagccctgacagaaaatgaccgggacagccagagccccctgaggaaccccctgctgagcaccagccggcccctggtgtttgggaagcccaatggagatgctgtggactaccagaagcagctgaagcagatgatcaaggacctggccaaggagaaggacaagacagagaaggagctgcccaagatgagccagcgggagttcatccagttctgcaagaccctgtacagcatgtttcatgaagatcctgaagaaaatgacctgtaccaggccatcgccaccgtgaccaccctgctgctgcagatcggggaggtgggccagaggggcagcagcagcggcagctgcagccaggagtgtggggaggagctgcgggccagcgcccccagcccagaagattctgtgtttgctgacaccgggaagaccccccaggacagccaggccttccctgaggccgctgagcgggactggacagtgtccctggagcacatcctggccagcctgctgacagagcagagcctggtgaacttctttgagaagcccctggacatgaagagcaagctggagaatgccaagatcaaccagtacaacctgaagacctttgagatgagccaccagagccagagcgagctgaagctgagcaacctgtag

SEQ ID NO: 278580 - DNA, 3468 bp, Artificial Sequence
  derived and/or modified sequence
atgtggctgaagcccgaggaggtgctgctgaagaacgccctgaagttgtgggtgactcagaagtccagttgctatttcattctacagaggaggcgaggacacggagagggaggaggtaggctaacgggccgactggtgggagcacttgacgcggtcctggactccaacgcaagagtggcacctttcagaattttgctccaggttcccggctctcaggtttattcccctattgcctgcggcgagctattgaatgggtctgatgtctactgggctattgccacaggagccactctggaagaaataaatcagcactgggactggctagagcagaacctcctgcatacgctgagtgtatttgacaataaggatgacattgccagcttcgtgaaaggcaaagtcaaagcactgattgccgaggagacttcaagcagactcgcagagcaggaggaggaacccgagaaattccgggaggcgttggtgaagttcgaagcgcgtttcaatttcccagaggctgaaaaacttgtgacctactacagctgctgctgctggaaagggcgcgtgcctcgtcaaggatggctatacctgtctatcaatcatctttgcttttactccttctttctcggcaaagaactgaagctagtagtgccttgggtagacatccagaaactcgaaaggacttctaacgtttttttgacggacaccatccgaattacgacacagaacaaagaacgggacttttcaatgtttctgaatctggatgaagtgttcaaagtcatggaacagctggcagatgtcacacttcgccgcttactggacaatgaagtgttcgatctggatcccgacctgcaggagccctcacagatcacaaaacgggacctcgaggctcgtgcccagaacgagttctttagggcctttttccggctacctagaaaagagaagctgcacgctgtggtggattgctcattatggacccctttcagtaggtgtcataccaccgggcgcatgttcgcctccgattcttatatctgttttgcctcgcgagaggacgggtgttgcaagatcatcttgcctctaagagaagtggtctcgattgagaaaatggaggacacctcccttcttcctcacccaattattgttagcatccgctcaaaagtggccttccagtttattgaactccgggatcgtgatagcctcgtggaggctcttctggccagacttaagcaagtgcacgcgaaccatcctgttcactatgatacttcagcggatgatgacatggcatcacttgtgtttcactctacaagtatgtgtagcgatcatcggttcggcgatctggaaatgatgagcagtcagaactctgaagaaagtgaaaaagagaagtccccactcatgcatcctgatgccctggttaccgcattccagcagagtgggtctcagagtcccgattctcgtatgtctcgtgaacaaattaaaattagtctgtggaatgaccacttcgtcgagtatggacgtacagtgtgtatgtttaggactgagaagatcagaaaactggtagcaatgggcatccctgaatccctgcgcggtcggttgtggctgctgttctcagatgcggtgaccgacttagctagccatccggggtattacggtaacttggtggaggaatctctgggaaagtgttgtcttgtgaccgaggagattgagcgggacctccaccgttcattgcctgaacaccccgcgtttcaaaacgaaactgggattgccgcgcttcgacgggtgctcacggcctacgcccatcggaatccaaagattggatactgccagtcaatgaacatcctcacctcagtacttctcctctacacgaaagaagaggaggccttctggctgctcgtggcagtctgtgaacggatgctgcccgactacttcaaccacagggtgatcggggcccaagtcgatcagtccgtgtttgaagagctaattaagggtcacctccctgagctcgcagagcacatgaacgacctgtctgccttggccagtgttagcctaagttggtttctgacgttgtttctgagtatcatgcccctcgagtctgctgtaaacgtggtggactgtttcttctatgatgggataaaggccattttccagctaggcctagcagtcctggaggcgaatgcagaggatctatgttcttccaaagacgacggccaagccctgatgatccttagtcgttttctggaccacataaaaaatgaagattctccgggtccaccggtgggaagccatcacgccttcttttctgacgaccaggagccttatcccgttaccgatataagcgatttgattagggatagttatgagaagtttggtgaccagtctgttgaacagattgaacaccttcgctacaaacataggattcgggtactccaaggtcacgaggatactactaaacagaacgtgctgcgggtggtcattcctgaggttagcattctcccagaggatctagaagagctctacgatttattcaagagagaacacatgatgtcctgctattgggagcagcctcgccctatggccagccgacatgatccgtctcgtccttacgccgagcagtatcgaatcgacgcacgacagttcgctcacctgttccagctcgtgagcccatggacctgcggggcccacacagagattctggcagaacggaccttccggctcctggacgacaatatggatcagctgatcgagttcaaagcattcgtgtcctgcctcgatatcatgtacaacggggaaatgaatgaaaagatcaagctgctgtaccgcctgcacattccacccgctctaaccgaaaatgatcgggacagccagtccccactgaggaacccactattatctacttcccgccctctcgtctttggcaaaccaaatggcgatgctgttgattaccagaaacagctgaagcagatgatcaaggacctcgctaaagagaaggacaaaaccgaaaaggagttgccaaaaatgagccagcgtgagtttattcagttctgcaaaacactctattccatgtttcatgaggacccagaagagaatgatctttatcaggctatcgccacagtgacaaccctcctacttcaaatcggggaagtcggccagagagggagtagctccggcagctgtagtcaagaatgcggcgaggagctaagggccagtgcccctagtcccgaggacagcgttttcgctgataccggtaagacaccccaagattctcaagcctttcctgaggccgccgagagagactggactgttagccttgagcatatacttgctagcttattgacggaacagagcctcgttaacttcttcgagaaaccactggatatgaagtctaagctagagaacgccaagattaatcaatacaatctgaaaacattcgagatgagtcatcagtcacagtccgagctgaagctctccaacttgtag

SEQ ID NO: 278581 - DNA, 3468 bp, Artificial Sequence
  derived and/or modified sequence
atgtggctgaaacccgaagaggttctgctcaagaacgcgctcaagctgtgggtaacccagaagagttcctgttattttattctccaacgaaggaggggacacggtgaaggaggagggagactgaccggcaggctcgttggtgcactcgatgctgtgctggacagtaacgctagggtggcccctttccgcatattgctccaagtcccaggctcccaggtgtactcccctattgcttgtggcgaattactcaacggatccgatgtgtattgggcgatcgctaccggtgctactctagaggagattaaccagcactgggactggttggagcagaatctgctgcacactctttcagtattcgacaacaaagatgatatagcttctttcgtaaagggcaaggtgaaagcactcattgcggaggaaacatcttcaagattggccgagcaggaggaggaacccgagaaatttagagaggctctggtgaagtttgaggcccgatttaatttcccagaggccgagaagctggtaacctactactcttgttgctgctggaagggccgagtcccgaggcaaggatggctctacctcagtataaaccacctgtgcttctatagcttttttctcggaaaagaactgaagttggtcgtcccctgggtggatatccagaagctcgaacgcacctccaacgtgtttttaacggataccattcggattaccactcaaaataaggagcgggacttctctatgtttctgaatctggacgaagttttcaaagtcatggagcagctggccgacgtcacactgcgtcgcctacttgataacgaagtttttgacttggatcccgacttgcaggagccatctcagatcactaaacgcgaccttgaggccagagctcaaaatgaatttttccgggcattttttcgcctgccgagaaaggagaaattacacgccgttgtcgactgtagcctctggacacccttcagccgttgtcatactactggacgcatgtttgcgagtgattcatatatctgcttcgcgagtagagaggacggttgttgcaaaataattttacccctccgagaggttgttagtattgagaagatggaggacactagcctcttgcctcatcctataatcgtgtcaattcgaagcaaggtcgcatttcagttcatagagcttcgcgatcgcgacagccttgtcgaggccctgctggcacgtcttaaacaggttcatgcaaatcatcctgtccactatgacacatcagctgacgacgacatggcatctttagtgttccactccacttctatgtgttctgaccatagatttggggatctggagatgatgagctcacagaactcagaggagtctgagaaggagaagtctccactcatgcaccccgatgccctcgttaccgcattccaacaaagcgggtctcagtcccccgattctaggatgagcagggaacagatcaagatcagcctatggaacgaccatttcgtggaatacgggagaacagtgtgtatgtttagaactgagaagatccggaaactcgtcgcgatgggaataccagagagtctgagggggaggctgtggctactctttagtgacgccgtgaccgatcttgccagccaccctgggtattatgggaacctcgtcgaagagagcctggggaagtgctgcctggtgacagaggagatcgagcgagacctgcaccgatcattacctgaacaccctgcgttccaaaatgaaaccgggattgccgcactaagacgtgtgcttactgcttacgctcaccgtaacccaaaaatcggctactgccagtcaatgaacatccttacttcagtgctccttctgtataccaaggaagaggaggccttttggcttctggtggcagtctgtgagagaatgctgcctgattatttcaaccaccgcgtgataggagcacaggtagatcaatctgtgttcgaggagctgattaaaggccatctcccggagttagctgaacacatgaacgatctgagtgctctggcgtccgtgtccttatcatggttcttgaccctgttcctgagtatcatgcccctggagtcggcggtgaacgtggttgattgtttcttctatgatggaattaaggctattttccaactggggctggccgttctggaggcaaacgccgaggacctgtgcagctccaaggacgatggtcaggcattgatgatcttaagtcgctttttagatcatataaagaatgaagactcccctggacctcccgtgggatcccaccacgcctttttttcagatgatcaggagccttaccctgtcacggatataagtgatctgatcagagactcctatgagaaattcggggatcagtctgttgaacagatcgagcacctgaggtacaagcaccgcatcagggtcctgcaggggcacgaggacacaaccaaacaaaacgttctcagggttgttatcccagaagtgtccattctgcccgaggatctggaagagctgtatgatctctttaagcgcgagcatatgatgtcctgttactgggaacagccacggccaatggcgtcaaggcatgacccaagcagaccttatgccgaacaatatcgcattgacgcccgacagttcgcccacctctttcaattagtctccccatggacctgcggggcacataccgagatactcgcagagaggacattcagactcttggatgataacatggaccaactgattgaattcaaagcttttgtgagctgtctggatattatgtacaatggcgagatgaacgaaaaaataaagttgctgtacaggctgcatattcccccagccctcaccgagaatgatcgcgactcacagagccctctaaggaacccattgctaagtacctcacggccattggtgttcggtaagcccaacggagatgccgttgattatcagaaacaacttaaacagatgattaaagacctggcaaaagagaaagataagactgaaaaggaactgcccaagatgagccagcgagagtttattcagttttgcaagaccctgtatagcatgttccacgaggacccagaggagaatgacctgtatcaggccattgccacagttactactctccttctgcaaatcggagaggtgggccagaggggatcgagttccggttcgtgcagtcaggagtgcggcgaagaactacgagcctccgcccctagtcctgaggattcggtcttcgccgacaccggaaaaacccctcaggattcccaagcctttccagaggctgccgagcgggattggactgttagtctggagcacatcctggcatccctgctcaccgagcaaagcctagtgaatttcttcgaaaagcccctcgatatgaagtccaaactggagaacgcaaagatcaaccagtacaacctgaagacttttgaaatgagccaccagtcccagagcgagctcaagctatccaatctatag

SEQ ID NO: 278582 - DNA, 3803 bp, Artificial Sequence
  derived and/or modified sequence
tcagagcgctgggcaccggccgggctgtggtccccgcgcgccgccgtcgcctctcgagcgggctcggctcacagcgaccggcggccggggagatgtgagctggggccggcgggcgcggccggaccgccgcgatgtggctcaagcccgaggaggtgctgctgaagaacgcgctgaagctctgggtgacccagaagagcagctgctacttcatcctgcagcggcgccgcgggcacggcgaggggggcggccgcctcaccggtcgcctggtcggcgctctggatgcagtgttggattccaatgcacgggtcgctccatttcgaattctgcttcaagttcccggctcccaggtttattctcccatagcatgtggtgagttactgaatggatcagacgtttactgggccatagccactggtgcaacattagaggaaatcaatcagcactgggactggctggaacaaaatctcctccacaccttgtctgtctttgataataaagatgacattgccagttttgtcaaagggaaggtaaaggctctgatagccgaggagaccagcagcaggctcgccgagcaggaggaggaacccgagaaattccgagaagccctggtgaagttcgaggccaggttcaacttccccgaggcggagaagctggtcacctactactcctgctgctgttggaagggcagggtgccccgccagggctggctgtacctcagcatcaaccacctctgcttctactccttcttcctgggcaaggaacttaaacttgtggttccgtgggttgatatccagaaattagaaagaacgtccaatgtctttctgacggataccatccgaatcaccacgcagaataaggagcgtgacttctccatgttcctgaacctggatgaggtgtttaaggtcatggagcagctggccgacgtgacgctgcgaaggctgctggataatgaggtctttgacctcgaccccgatctgcaggagccgagccagatcaccaagagggacctggaagccagagcacagaatgagttcttccgggctttcttcaggttgccgaggaaggagaagctgcacgcggttgtggactgttcgctctggacgccgttcagtcgctgtcacaccacggggcggatgttcgcctctgacagctacatctgctttgccagcagagaagatggctgctgtaagatcatcctgccactcagagaggtggtgagcatcgagaagatggaggacacgagcctgctgccgcatcccatcattgtcagtatcagaagcaaggtggccttccagttcattgagctccgggaccgagacagcctggtggaggcgctgcttgcgaggttgaagcaggtccacgccaaccaccccgtgcactacgacacctctgcggatgatgacatggcttcactcgtgtttcattcaacaagcatgtgcagtgaccacagatttggggatcttgaaatgatgtcttctcaaaatagcgaggagagtgagaaagagaagagcccgctgatgcaccccgatgccctggtcaccgccttccagcagtcaggcagccagagccctgactcccgaatgtccagagaacagataaaaataagcctgtggaatgaccactttgtggaatacggcagaaccgtgtgtatgtttcgcacagagaagattcggaagctcgtagccatgggcatccctgaatctttgcgagggagactctggcttctcttctcagatgcggtgacggatcttgcctcacaccctggttactacgggaatctggtggaggagtccctggggaaatgctgcctggtaaccgaggagatagaacgagacctgcaccgctccctgccagagcaccccgccttccagaacgaaacgggaattgctgctttgaggagagtcttgacggcctatgcccaccggaaccccaagattggatactgccagtccatgaacatcctgacctccgtgctgctgctgtacaccaaggaggaggaagccttctggctgttggttgctgtgtgtgagcggatgctgcccgattacttcaaccaccgagtgatcggggcacaagttgaccagtctgtcttcgaggagctcatcaagggtcatctcccagagctggcagagcacatgaacgacctctcagccctggcgtccgtctctctctcgtggttcctgaccctgttcctcagcatcatgcctctagagagtgcggtgaatgtggtagactgcttcttctatgatggcatcaaagccatcttccagctgggactggctgtgcttgaggccaatgctgaggacctgtgcagcagcaaggatgatggccaggccttgatgatcctcagcaggtttctagatcacattaagaatgaggacagcccagggcccccagttggcagccaccatgcctttttctccgacgaccaggagccctaccctgtgactgatatttcggacctgatccgggattcctatgagaaatttggagaccagtctgtggagcagatcgagcacctacgttacaagcacaggatcagggtcctccaaggccacgaggacaccacaaagcagaacgtgcttcgagtcgttatcccggaagtctcaattcttcctgaagacctagaggagctctacgacttattcaagagagaacatatgatgagctgttactgggagcagcccaggcccatggcctcacgccacgaccccagccggccctatgctgagcagtaccgcatagatgcccggcagtttgcacacctgtttcagctagtctcgccctggacctgcggggcccacacggagatcctcgccgaaaggacgttcaggctcttggatgacaacatggaccagctcatcgagttcaaagcgtttgtgagctgcctcgatattatgtataatggagaaatgaatgagaagattaaactattatacaggcttcatatccctccagcactcactgaaaatgaccgagacagccagtcgccgttgaggaatcctctgttgtcaacatcgagacccctggttttcgggaaacccaatggtgatgcagttgattatcagaaacagctgaagcagatgattaaggatttagccaaagaaaaagataaaactgagaaagaattgcccaaaatgagccagagagaatttatccagttctgtaaaactctgtacagtatgttccatgaagatccagaagaaaatgatttgtatcaagccatcgccacagtcaccacactgctgctgcagatcggggaggtggggcagcgaggcagcagctctggaagctgctcccaggagtgtggggaggagctgcgggcttcagctccttctcctgaggactcggtttttgcagacactgggaagacgccccaggactcccaggcatttccagaggcggcagaaagggactggactgtctcccttgaacatattttagcttcacttctgactgaacagtcattagtcaacttttttgaaaagccactggacatgaaatccaaacttgaaaatgccaagatcaatcagtacaatctcaaaacttttgaaatgagccaccaatcacaatctgaacttaagctgagtaacttgtagcaagacagcagctgctatgcacactggagtccaccataccaaagcacgaaccagactgtttcttggggtcagccctaaaccgagatttcagtctaccttaccaatggggcatctggctaaacaacctgacaaactgtggccaggggaaccgacacaaccctcaagcatttctatgtattgagaattgtcagtgccctaaggtat

SEQ ID NO: 278583 - protein, 279 aa, Artificial Sequence
  derived and/or modified sequence
MTERFDCHHCNESLFGKKYILREESPYCVVCFETLFANTCEECGKPIGCDCKDLSYKDRHWHEACFHCSQCRNSLVDKPFAAKEDQLLCTDCYSNEYSSKCQECKKTIMPGTRKMEYKGSSWHETCFICHRCQQPIGTKSFIPKDNQNFCVPCYEKQHAMQCVQCKKPITTGGVTYREQPWHKECFVCTACRKQLSGQRFTARDDFAYCLNCFCDLYAKKCAGCTNPISGLGGTKYISFEERQWHNDCFNCKKCSLSLVGRGFLTERDDILCPDCGKDI

SEQ ID NO: 278584 - protein, 389 aa, Artificial Sequence
  derived and/or modified sequence
MTRRGFSRAGAAQRSTRPAAEPQPPAARALQPRPGVPGPLRCREYLQPPAPRREAEGLSHQGSEVGAESGARPKERGAEPELGRLWLRTVSSWRLGWHFDFGVAEKPGVKMTERFDCHHCNESLFGKKYILREESPYCVVCFETLFANTCEECGKPIGCDCKDLSYKDRHWHEACFHCSQCRNSLVDKPFAAKEDQLLCTDCYSNEYSSKCQECKKTIMPGTRKMEYKGSSWHETCFICHRCQQPIGTKSFIPKDNQNFCVPCYEKQHAMQCVQCKKPITTGGVTYREQPWHKECFVCTACRKQLSGQRFTARDDFAYCLNCFCDLYAKKCAGCTNPISGLGGTKYISFEERQWHNDCFNCKKCSLSLVGRGFLTERDDILCPDCGKDI

SEQ ID NO: 278585 - protein, 144 aa, Artificial Sequence
  derived and/or modified sequence
MTRRGFSRAGAAQRSTRPAAEPQPPAARALQPRPGVPGPLRCREYLQPPAPRREAEGLSHQGSEVGAESGARPKERGAEPELGRLWLRTVSSWRLGWHFDFGTESRFVAQAGVQWHDLSSLQALPLGSRHSPAPASQVAGTTGC

SEQ ID NO: 278586 - DNA, 1735 bp, Artificial Sequence
  derived and/or modified sequence
agggtacgggccgggaccgccgcagcccggggcgggggcacggcaaccgcgaggcctgggggcgcccgccccccgcgccccacgcccggtgccagcgagccgaggcgtgcatctccttatatggtcaaatgacacggcggggtttctcgagggcgggagctgcgcagcgctccactcggccggcagcggagccgcagccaccagccgcccgcgccctccagccccgtccgggagtccccggcccgctgcggtgccgtgagtacctccaaccccctgcgccccggagggaggccgaggggcttagccaccagggctcggaagtgggggccgaatccggtgcgagacccaaggagaggggagcagagccggagttggggagactggttgctgaaaagccaggagtcaaaatgactgagcgctttgactgccaccattgcaacgaatctctctttggcaagaagtacatcctgcgggaggagagcccctactgcgtggtgtgctttgagaccctgttcgccaacacctgcgaggagtgtgggaagcccatcggctgtgactgcaaggacttgtcttacaaggaccggcactggcatgaagcctgtttccactgctcgcagtgcagaaactcactggtggacaagccctttgctgccaaggaggaccagctgctctgtacagactgctattccaacgagtactcatccaagtgccaggaatgcaagaagaccatcatgccaggtacccgcaagatggagtacaagggcagcagctggcatgagacctgcttcatctgccaccgctgccagcagccaattggaaccaagagtttcatccccaaagacaatcagaatttctgtgtgccctgctatgagaaacaacatgccatgcagtgcgttcagtgcaaaaagcccatcaccacgggaggggtcacttaccgggagcagccctggcacaaggagtgcttcgtgtgcaccgcctgcaggaagcagctgtctgggcagcgcttcacagctcgcgatgactttgcctactgcctgaactgcttctgtgacttgtatgccaagaagtgtgctgggtgcaccaaccccatcagcggacttggtggcacaaaatacatctcctttgaggaacggcagtggcataacgactgctttaactgtaagaagtgctccctctcactggtggggcgtggcttcctcacagagagggacgacatcctgtgccccgactgtgggaaagacatctgaattcaacacagagaagttgctgcttgtgatctcacacacagatttttatgttttctttctcacccaggcaatcttgccttctggtttcttccagccacattgagactttcttctagtgcttttcagtgatactcacgtttgcttaaaccctttagtgctttgtgatagttcagtcccagggaaagagaaaactcgccctaggccctaggtgggaagatggtttgaaatttttgtaatcgagtaaggcacacccaaatgtaaaaatccttttgaatgatgcctttataaatctttctctcactgtctatttaagtgcaattaacatatgtcacgaacttgaaagttttctaaactcaataaggtaatgaccagttgttatttacagctctgtaacctcccgttgcgtcaagtctaaaccaagattatgtgacttgcaataaagttattcagaacagaaaaaaaaaaaaaaaaaaaaaaaaaaaaaaaaa

SEQ ID NO: 278587 - DNA, 1462 bp, Artificial Sequence
  derived and/or modified sequence
gcagcgctccactcggccggcagcggagccgcagccaccagccgcccgcgccctccagccccgtccgggagtccccggcccgctgcggtgcctggctgagaactgtgtcttcctggagactaggctggcattttgactttggggttgctgaaaagccaggagtcaaaatgactgagcgctttgactgccaccattgcaacgaatctctctttggcaagaagtacatcctgcgggaggagagcccctactgcgtggtgtgctttgagaccctgttcgccaacacctgcgaggagtgtgggaagcccatcggctgtgactgcaaggacttgtcttacaaggaccggcactggcatgaagcctgtttccactgctcgcagtgcagaaactcactggtggacaagccctttgctgccaaggaggaccagctgctctgtacagactgctattccaacgagtactcatccaagtgccaggaatgcaagaagaccatcatgccaggtacccgcaagatggagtacaagggcagcagctggcatgagacctgcttcatctgccaccgctgccagcagccaattggaaccaagagtttcatccccaaagacaatcagaatttctgtgtgccctgctatgagaaacaacatgccatgcagtgcgttcagtgcaaaaagcccatcaccacgggaggggtcacttaccgggagcagccctggcacaaggagtgcttcgtgtgcaccgcctgcaggaagcagctgtctgggcagcgcttcacagctcgcgatgactttgcctactgcctgaactgcttctgtgacttgtatgccaagaagtgtgctgggtgcaccaaccccatcagcggacttggtggcacaaaatacatctcctttgaggaacggcagtggcataacgactgctttaactgtaagaagtgctccctctcactggtggggcgtggcttcctcacagagagggacgacatcctgtgccccgactgtgggaaagacatctgaattcaacacagagaagttgctgcttgtgatctcacacacagatttttatgttttctttctcacccaggcaatcttgccttctggtttcttccagccacattgagactttcttctagtgcttttcagtgatactcacgtttgcttaaaccctttagtgctttgtgatagttcagtcccagggaaagagaaaactcgccctaggccctaggtgggaagatggtttgaaatttttgtaatcgagtaaggcacacccaaatgtaaaaatccttttgaatgatgcctttataaatctttctctcactgtctatttaagtgcaattaacatatgtcacgaacttgaaagttttctaaactcaataaggtaatgaccagttgttatttacagctctgtaacctcccgttgcgtcaagtctaaaccaagattatgtgacttgcaataaagttattcagaacag

SEQ ID NO: 278588 - DNA, 1769 bp, Artificial Sequence
  derived and/or modified sequence
agggtacgggccgggaccgccgcagcccggggcgggggcacggcaaccgcgaggcctgggggcgcccgccccccgcgccccacgcccggtgccagcgagccgaggcgtgcatctccttatatggtcaaatgacacggcggggtttctcgagggcgggagctgcgcagcgctccactcggccggcagcggagccgcagccaccagccgcccgcgccctccagccccgtccgggagtccccggcccgctgcggtgccgtgagtacctccaaccccctgcgccccggagggaggccgaggggcttagccaccagggctcggaagtgggggccgaatccggtgcgagacccaaggagaggggagcagagccggagttggggagactgtggctgagaactgtgtcttcctggagactaggctggcattttgactttggggttgctgaaaagccaggagtcaaaatgactgagcgctttgactgccaccattgcaacgaatctctctttggcaagaagtacatcctgcgggaggagagcccctactgcgtggtgtgctttgagaccctgttcgccaacacctgcgaggagtgtgggaagcccatcggctgtgactgcaaggacttgtcttacaaggaccggcactggcatgaagcctgtttccactgctcgcagtgcagaaactcactggtggacaagccctttgctgccaaggaggaccagctgctctgtacagactgctattccaacgagtactcatccaagtgccaggaatgcaagaagaccatcatgccaggtacccgcaagatggagtacaagggcagcagctggcatgagacctgcttcatctgccaccgctgccagcagccaattggaaccaagagtttcatccccaaagacaatcagaatttctgtgtgccctgctatgagaaacaacatgccatgcagtgcgttcagtgcaaaaagcccatcaccacgggaggggtcacttaccgggagcagccctggcacaaggagtgcttcgtgtgcaccgcctgcaggaagcagctgtctgggcagcgcttcacagctcgcgatgactttgcctactgcctgaactgcttctgtgacttgtatgccaagaagtgtgctgggtgcaccaaccccatcagcggacttggtggcacaaaatacatctcctttgaggaacggcagtggcataacgactgctttaactgtaagaagtgctccctctcactggtggggcgtggcttcctcacagagagggacgacatcctgtgccccgactgtgggaaagacatctgaattcaacacagagaagttgctgcttgtgatctcacacacagatttttatgttttctttctcacccaggcaatcttgccttctggtttcttccagccacattgagactttcttctagtgcttttcagtgatactcacgtttgcttaaaccctttagtgctttgtgatagttcagtcccagggaaagagaaaactcgccctaggccctaggtgggaagatggtttgaaatttttgtaatcgagtaaggcacacccaaatgtaaaaatccttttgaatgatgcctttataaatctttctctcactgtctatttaagtgcaattaacatatgtcacgaacttgaaagttttctaaactcaataaggtaatgaccagttgttatttacagctctgtaacctcccgttgcgtcaagtctaaaccaagattatgtgacttgcaataaagttattcagaacagaatcttttgccaggca

SEQ ID NO: 278589 - DNA, 1872 bp, Artificial Sequence
  derived and/or modified sequence
agggtacgggccgggaccgccgcagcccggggcgggggcacggcaaccgcgaggcctgggggcgcccgccccccgcgccccacgcccggtgccagcgagccgaggcgtgcatctccttatatggtcaaatgacacggcggggtttctcgagggcgggagctgcgcagcgctccactcggccggcagcggagccgcagccaccagccgcccgcgccctccagccccgtccgggagtccccggcccgctgcggtgccgtgagtacctccaaccccctgcgccccggagggaggccgaggggcttagccaccagggctcggaagtgggggccgaatccggtgcgagacccaaggagaggggagcagagccggagttggggagactgtggctgagaactgtgtcttcctggagactaggctggcattttgactttgggacggagtctcgctttgtcgcccaggctggagtgcagtggcacgatctcagctcactgcaagctctacctcttggttcacgccattctcctgccccagcctcccaagtagctgggactacaggttgctgaaaagccaggagtcaaaatgactgagcgctttgactgccaccattgcaacgaatctctctttggcaagaagtacatcctgcgggaggagagcccctactgcgtggtgtgctttgagaccctgttcgccaacacctgcgaggagtgtgggaagcccatcggctgtgactgcaaggacttgtcttacaaggaccggcactggcatgaagcctgtttccactgctcgcagtgcagaaactcactggtggacaagccctttgctgccaaggaggaccagctgctctgtacagactgctattccaacgagtactcatccaagtgccaggaatgcaagaagaccatcatgccaggtacccgcaagatggagtacaagggcagcagctggcatgagacctgcttcatctgccaccgctgccagcagccaattggaaccaagagtttcatccccaaagacaatcagaatttctgtgtgccctgctatgagaaacaacatgccatgcagtgcgttcagtgcaaaaagcccatcaccacgggaggggtcacttaccgggagcagccctggcacaaggagtgcttcgtgtgcaccgcctgcaggaagcagctgtctgggcagcgcttcacagctcgcgatgactttgcctactgcctgaactgcttctgtgacttgtatgccaagaagtgtgctgggtgcaccaaccccatcagcggacttggtggcacaaaatacatctcctttgaggaacggcagtggcataacgactgctttaactgtaagaagtgctccctctcactggtggggcgtggcttcctcacagagagggacgacatcctgtgccccgactgtgggaaagacatctgaattcaacacagagaagttgctgcttgtgatctcacacacagatttttatgttttctttctcacccaggcaatcttgccttctggtttcttccagccacattgagactttcttctagtgcttttcagtgatactcacgtttgcttaaaccctttagtgctttgtgatagttcagtcccagggaaagagaaaactcgccctaggccctaggtgggaagatggtttgaaatttttgtaatcgagtaaggcacacccaaatgtaaaaatccttttgaatgatgcctttataaatctttctctcactgtctatttaagtgcaattaacatatgtcacgaacttgaaagttttctaaactcaataaggtaatgaccagttgttatttacagctctgtaacctcccgttgcgtcaagtctaaaccaagattatgtgacttgcaataaagttattcagaac

SEQ ID NO: 278590 - DNA, 1426 bp, Artificial Sequence
  derived and/or modified sequence
cagctgcacagaaggttggggccatccaaccaggcagtccgcctgcacagcagctgtccctgctcatcgggctggaggacagaagacagaaccctaaaaccacaggttgctgaaaagccaggagtcaaaatgactgagcgctttgactgccaccattgcaacgaatctctctttggcaagaagtacatcctgcgggaggagagcccctactgcgtggtgtgctttgagaccctgttcgccaacacctgcgaggagtgtgggaagcccatcggctgtgactgcaaggacttgtcttacaaggaccggcactggcatgaagcctgtttccactgctcgcagtgcagaaactcactggtggacaagccctttgctgccaaggaggaccagctgctctgtacagactgctattccaacgagtactcatccaagtgccaggaatgcaagaagaccatcatgccaggtacccgcaagatggagtacaagggcagcagctggcatgagacctgcttcatctgccaccgctgccagcagccaattggaaccaagagtttcatccccaaagacaatcagaatttctgtgtgccctgctatgagaaacaacatgccatgcagtgcgttcagtgcaaaaagcccatcaccacgggaggggtcacttaccgggagcagccctggcacaaggagtgcttcgtgtgcaccgcctgcaggaagcagctgtctgggcagcgcttcacagctcgcgatgactttgcctactgcctgaactgcttctgtgacttgtatgccaagaagtgtgctgggtgcaccaaccccatcagcggacttggtggcacaaaatacatctcctttgaggaacggcagtggcataacgactgctttaactgtaagaagtgctccctctcactggtggggcgtggcttcctcacagagagggacgacatcctgtgccccgactgtgggaaagacatctgaattcaacacagagaagttgctgcttgtgatctcacacacagatttttatgttttctttctcacccaggcaatcttgccttctggtttcttccagccacattgagactttcttctagtgcttttcagtgatactcacgtttgcttaaaccctttagtgctttgtgatagttcagtcccagggaaagagaaaactcgccctaggccctaggtgggaagatggtttgaaatttttgtaatcgagtaaggcacacccaaatgtaaaaatccttttgaatgatgcctttataaatctttctctcactgtctatttaagtgcaattaacatatgtcacgaacttgaaagttttctaaactcaataaggtaatgaccagttgttatttacagctctgtaacctcccgttgcgtcaagtctaaaccaagattatgtgacttgcaataaagttattcagaacagaa

SEQ ID NO: 278591 - DNA, 1531 bp, Artificial Sequence
  derived and/or modified sequence
actcggccggcagcggagccgcagccaccagccgcccgcgccctccagccccgtccgggagtccccggcccgctgcggtgccgtgagtacctccaaccccctgcgccccggagggaggccgaggggcttagccaccagggctcggaagtgggggccgaatccggtgcgagacccaaggagaggggagcagagccggagttggggagactggttgctgaaaagccaggagtcaaaatgactgagcgctttgactgccaccattgcaacgaatctctctttggcaagaagtacatcctgcgggaggagagcccctactgcgtggtgtgctttgagaccctgttcgccaacacctgcgaggagtgtgggaagcccatcggctgtgactgcaaggacttgtcttacaaggaccggcactggcatgaagcctgtttccactgctcgcagtgcagaaactcactggtggacaagccctttgctgccaaggaggaccagctgctctgtacagactgctattccaacgagtactcatccaagtgccaggaatgcaagaagaccatcatgccaggtacccgcaagatggagtacaagggcagcagctggcatgagacctgcttcatctgccaccgctgccagcagccaattggaaccaagagtttcatccccaaagacaatcagaatttctgtgtgccctgctatgagaaacaacatgccatgcagtgcgttcagtgcaaaaagcccatcaccacgggaggggtcacttaccgggagcagccctggcacaaggagtgcttcgtgtgcaccgcctgcaggaagcagctgtctgggcagcgcttcacagctcgcgatgactttgcctactgcctgaactgcttctgtgacttgtatgccaagaagtgtgctgggtgcaccaaccccatcagcggacttggtggcacaaaatacatctcctttgaggaacggcagtggcataacgactgctttaactgtaagaagtgctccctctcactggtggggcgtggcttcctcacagagagggacgacatcctgtgccccgactgtgggaaagacatctgaattcaacacagagaagttgctgcttgtgatctcacacacagatttttatgttttctttctcacccaggcaatcttgccttctggtttcttccagccacattgagactttcttctagtgcttttcagtgatactcacgtttgcttaaaccctttagtgctttgtgatagttcagtcccagggaaagagaaaactcgccctaggccctaggtgggaagatggtttgaaatttttgtaatcgagtaaggcacacccaaatgtaaaaatccttttgaatgatgcctttataaatctttctctcactgtctatttaagtgcaattaacatatgtcacgaacttgaaagttttctaaactcaataaggtaatgaccagttgttatttacagctctgtaacctcccgttgcgtcaagtctaaaccaagattatgtgacttgcaataaagttattcagaacagaa

SEQ ID NO: 278592 - DNA, 1367 bp, Artificial Sequence
  derived and/or modified sequence
ctcggccggcagcggagccgcagccaccagccgcccgcgccctccagccccgtccgggagtccccggcccgctgcggtgccgttgctgaaaagccaggagtcaaaatgactgagcgctttgactgccaccattgcaacgaatctctctttggcaagaagtacatcctgcgggaggagagcccctactgcgtggtgtgctttgagaccctgttcgccaacacctgcgaggagtgtgggaagcccatcggctgtgactgcaaggacttgtcttacaaggaccggcactggcatgaagcctgtttccactgctcgcagtgcagaaactcactggtggacaagccctttgctgccaaggaggaccagctgctctgtacagactgctattccaacgagtactcatccaagtgccaggaatgcaagaagaccatcatgccaggtacccgcaagatggagtacaagggcagcagctggcatgagacctgcttcatctgccaccgctgccagcagccaattggaaccaagagtttcatccccaaagacaatcagaatttctgtgtgccctgctatgagaaacaacatgccatgcagtgcgttcagtgcaaaaagcccatcaccacgggaggggtcacttaccgggagcagccctggcacaaggagtgcttcgtgtgcaccgcctgcaggaagcagctgtctgggcagcgcttcacagctcgcgatgactttgcctactgcctgaactgcttctgtgacttgtatgccaagaagtgtgctgggtgcaccaaccccatcagcggacttggtggcacaaaatacatctcctttgaggaacggcagtggcataacgactgctttaactgtaagaagtgctccctctcactggtggggcgtggcttcctcacagagagggacgacatcctgtgccccgactgtgggaaagacatctgaattcaacacagagaagttgctgcttgtgatctcacacacagatttttatgttttctttctcacccaggcaatcttgccttctggtttcttccagccacattgagactttcttctagtgcttttcagtgatactcacgtttgcttaaaccctttagtgctttgtgatagttcagtcccagggaaagagaaaactcgccctaggccctaggtgggaagatggtttgaaatttttgtaatcgagtaaggcacacccaaatgtaaaaatccttttgaatgatgcctttataaatctttctctcactgtctatttaagtgcaattaacatatgtcacgaacttgaaagttttctaaactcaataaggtaatgaccagttgttatttacagctctgtaacctcccgttgcgtcaagtctaaaccaaga

SEQ ID NO: 278593 - DNA, 4881 bp, Artificial Sequence
  derived and/or modified sequence
actttggttttcccgccctggaggggaatccaagatgtctaactagtcttctggccccgagagggagaggtggggataggaccttcctttagtcccctccgtagtggaacgaaggattctttatggtcatctgtggtgttcatttcgtaaagaagcatctgcagggtaagaaggaaaaacgtccaccttgcaaatatatcccaggcacatgcctcctgagaagtgaccccctcctccctccgcctcccccggcacgtcctggggcttctccagtctcccgctcctgggaccaggcagagatcccggcgtgggcagacccctgccaccgcgcccaggcctcgtccgaaactcgcgcccgagagcccacgccggaggcgacgctcccgataactactgtgctcccaagacccggagggcacgaagaaaggagccctggcaaacaaagggttgctgaaaagccaggagtcaaaatgactgagcgctttgactgccaccattgcaacgaatctctctttggcaagaagtacatcctgcgggaggagagcccctactgcgtggtgtgctttgagaccctgttcgccaacacctgcgaggagtgtgggaagcccatcggctgtgactgcaaggacttgtcttacaaggaccggcactggcatgaagcctgtttccactgctcgcagtgcagaaactcactggtggacaagccctttgctgccaaggaggaccagctgctctgtacagactgctattccaacgagtactcatccaagtgccaggaatgcaagaagaccatcatgccaggtacccgcaagatggagtacaagggcagcagctggcatgagacctgcttcatctgccaccgctgccagcagccaattggaaccaagagtttcatccccaaagacaatcagaatttctgtgtgccctgctatgagaaacaacatgccatgcagtgcgttcagtgcaaaaagcccatcaccacgggaggggtcacttaccgggagcagccctggcacaaggagtgcttcgtgtgcaccgcctgcaggaagcagctgtctgggcagcgcttcacagctcgcgatgactttgcctactgcctgaactgcttctgtgacttgtatgccaagaagtgtgctgggtgcaccaaccccatcagcggacttggtggcacaaaatacatctcctttgaggaacggcagtggcataacgactgctttaactgtaagaagtgctccctctcactggtggggcgtggcttcctcacagagagggacgacatcctgtgccccgactgtgggaaagacatctgaattcaacacagagaagttgctgcttgtgatctcacacacagatttttatgttttctttctcacccaggcaatcttgccttctggtttcttccagccacattgagactttcttctagtgcttttcagtgatactcacgtttgcttaaaccctttagtgctttgtgatagttcagtcccagggaaagagaaaactcgccctaggccctaggtgggaagatggtttgaaatttttgtaatcgagtaaggcacacccaaatgtaaaaatccttttgaatgatgcctttataaatctttctctcactgtctatttaagtgcaattaacatatgtcacgaacttgaaagttttctaaactcaataaggtaatgaccagttgttatttacagctctgtaacctcccgttgcgtcaagtctaaaccaagattatgtgacttgcaataaagttattcagaacagaatcttttgccaggcacagagtgtgaaatcatgattacaggtcgaggcactgagtctaagtaacactttattgcatggtcccatggtcactgtatgaagtgcagttccaatgttccaatggcctggggcattgccaactggaacagcatcacaccctttaaaggaagccttcggctgggcacggtggctcacgcctgtaatcccagcactttgggaggccaaggcgggtggatcatgaggtcaggagatcaagaccatcctggctaacatggtgaaaccccgtctctacgaaaaatacaaaaaattagccgggtgtggtggtgagcgcctgtagtcccagctactcgggaggctgaggcaggagaatggcatgaacccgggaggcagagcttgcagtgagctgagatggcaccactgaactccagcctggaagacaaagagactccgtctcaaaaaaaaaaagccttcagtcagcaccaggcacctcttccttgctaccttctctcccttttttttttttttttttgagacagagtctcgctctgtcgcccaggctaaagtgcaatggcacaatctcagctcactgcaacctccacttcccgcgttcaagcgattctcctgccctcagcctcctgagtagctgggattacaggcacccaccattatgcccggctaatttttgtatttttagtagagatggggtttcaccatgttaggctggtcttgaactcctgacctcaggtgatccacctgcctcggtcccccaaagtgctgggattataggcatgagccaccgcacccagctaccttctctgtctttcccatactctttctcttggaatgtaatcctctgcatttgacacagtaacataaactgacagtgaagccaattttcaggtcatttttcttggcagagcttatcggctctgtcccagtgttatggatccacatcttacaccgacttccataaagtgaaagattgcacaaggacataagcaacttgaggccagagacgacatcctgttcatctttatgttctcaacaccctcgcaactgagggcacactgggagccttcagtgtttctgaaaagggcagtaaagcaggagagacacacagtcattacagtaaaaataacattctgagctactagtgtggcagtagtctgtggaataatctcagatagcagtatacagttgggaagcacggagccaatgtatgggatagaacattgcacagttctctttagaatgggagcatcagtgacctttttgtccttagttttctaagacaatgcaatataataaaatgataggctgagcaacagaaaaatttggtggaaatcaagtctgatatatgctgagcatatgtgaaatcagtttcttaatctgagtgttagtcactgttagaatgtttgataatgtctggaatgagtcttttggttttatagttgacttgaggttttgcttaaaaagaataatttcatcctttgttagttgttttgctgttttctacttcataatataaaagtaaaagcactccaaatttcattttggaacatcttacttgttcctcattaaaaccatagactctcccaaccttaaattacccattctaaaattaatggttagggggaattccacttctagtaaatagctccaattggactaattctcctccaaattaacagtcattctggacaaaatatttatttaattgttaagaacactggagcacgatccaaagcaggcagatattggagggcagtagacacttggaagaagagaacgacactgggtgattttcctgtttcggccttttatccaatggcaggcccccgccagggatctaaaactctgttaggaaacctgcagtcttactggcctgaggaaccagaggccagagttcgggacaaacagcctctggaaagtgaggaagaaaatcctgaaaaggagagccccaagttcgtcgcatgaacttagaaatttctggctgacaactgaaccgtgtatacttaggccagactccaagcagcccagccaaggctaaaagcattgactgacaggactttacagatagtggtttgcagggcttagctgaccgaccctcttcctactgaaggaaattacttgtatataaaccacacaacacaaagtctctgaaaatttccccagaagcatacaacaaataaacattcattcaggaaaatccactactaagtcttagaaagaacagtgagtctgtggcatttgagccacagcctcatcctatcccatccccactccccagcttcatgtgacaaactctattctggaccaatgcagccaaaaattaaggggtctctcttcctccagctaccagtctagggctttgccccaggtgcgacaggctgagaatcgtagagctccaattgcccctaccctagcctgcttagtgcggaggctccacattgggaggggcaatctgagaagaccagcggctatcaacccactcacagagaagggatgtcagtcctggagaagcaggctgctgtccagcccccagaggagatccaggctctgagactggtaacccagcagttatgcccaaggggactggtatttggtacggagaacgagaaatctttgcctaaggggattgtcaaaaacaataagacatcttaccagtgagccattaaggaaggggctggtaactccatgctattagtagcaaaaagcaaaatgacagaccagccagaagtttaacacagaaaaccagagaaagagatagccaagaagagccctcctggaatctggtttatccttgaggttcgggaagtatgtatggacagggctgtatccactcaggagcaatcagatgtgaaacaaacttgaaagcattctctaaggcatacacagatccatcagcaaagagcagaaatcttattagctcaaagtgcttaagcagaacctctgaccaaacactggctgaacacataaatgtgtttgttcaaagaactaaaggaaatcatatttaaaaaaggaaggtaaaggaacaattacagttgttcctccatatccatggattcctcatctgtggattcaaccaactgtggatcaaaagtatttaggaaaaaaaa

SEQ ID NO: 278594 - DNA, 1601 bp, Artificial Sequence
  derived and/or modified sequence
tcagcctcagtgactcaggcagcctcctttgtcagcaccgggcctgagtcgctaagcggctctctgactcagatgccctgaggtacaaagttccttgagcttgggtgaatggaaacattagacattgggttcttctgtgcggttttattatgagaatttgatcaaagccacatttattaagtgtccatctcaagttgcattatactgagttcgcttcctcaagatgaccatctgaaacaaaacacgtgtgctttctctagtggctgagaactgtgtcttcctggagactaggctggcattttgactttggggttgctgaaaagccaggagtcaaaatgactgagcgctttgactgccaccattgcaacgaatctctctttggcaagaagtacatcctgcgggaggagagcccctactgcgtggtgtgctttgagaccctgttcgccaacacctgcgaggagtgtgggaagcccatcggctgtgactgcaaggacttgtcttacaaggaccggcactggcatgaagcctgtttccactgctcgcagtgcagaaactcactggtggacaagccctttgctgccaaggaggaccagctgctctgtacagactgctattccaacgagtactcatccaagtgccaggaatgcaagaagaccatcatgccaggtacccgcaagatggagtacaagggcagcagctggcatgagacctgcttcatctgccaccgctgccagcagccaattggaaccaagagtttcatccccaaagacaatcagaatttctgtgtgccctgctatgagaaacaacatgccatgcagtgcgttcagtgcaaaaagcccatcaccacgggaggggtcacttaccgggagcagccctggcacaaggagtgcttcgtgtgcaccgcctgcaggaagcagctgtctgggcagcgcttcacagctcgcgatgactttgcctactgcctgaactgcttctgtgacttgtatgccaagaagtgtgctgggtgcaccaaccccatcagcggacttggtggcacaaaatacatctcctttgaggaacggcagtggcataacgactgctttaactgtaagaagtgctccctctcactggtggggcgtggcttcctcacagagagggacgacatcctgtgccccgactgtgggaaagacatctgaattcaacacagagaagttgctgcttgtgatctcacacacagatttttatgttttctttctcacccaggcaatcttgccttctggtttcttccagccacattgagactttcttctagtgcttttcagtgatactcacgtttgcttaaaccctttagtgctttgtgatagttcagtcccagggaaagagaaaactcgccctaggccctaggtgggaagatggtttgaaatttttgtaatcgagtaaggcacacccaaatgtaaaaatccttttgaatgatgcctttataaatctttctctcactgtctatttaagtgcaattaacatatgtcacgaacttgaaagttttctaaactcaataaggtaatgaccagttgttatttacagctctgtaacctcccgttgcgtcaagtctaaaccaagattat

SEQ ID NO: 278595 - DNA, 1876 bp, Artificial Sequence
  derived and/or modified sequence
agggtacgggccgggaccgccgcagcccggggcgggggcacggcaaccgcgaggcctgggggcgcccgccccccgcgccccacgcccggtgccagcgagccgaggcgtgcatctccttatatggtcaaatgacacggcggggtttctcgagggcgggagctgcgcagcgctccactcggccggcagcggagccgcagccaccagccgcccgcgccctccagccccgtccgggagtccccggcccgctgcggtgccgtgagtacctccaaccccctgcgccccggagggaggccgaggggcttagccaccagggctcggaagtgggggccgaatccggtgcgagacccaaggagaggggagcagagccggagttggggagactgtggctgagaactgtgtcttcctggagactaggctggcattttgactttgggacggagtctcgctttgtcgcccaggctggagtgcagtggcacgatctcagctcactgcaagctctacctcttggttcacgccattctcctgccccagcctcccaagtagctgggactacaggttgctgaaaagccaggagtcaaaatgactgagcgctttgactgccaccattgcaacgaatctctctttggcaagaagtacatcctgcgggaggagagcccctactgcgtggtgtgctttgagaccctgttcgccaacacctgcgaggagtgtgggaagcccatcggctgtgactgcaaggacttgtcttacaaggaccggcactggcatgaagcctgtttccactgctcgcagtgcagaaactcactggtggacaagccctttgctgccaaggaggaccagctgctctgtacagactgctattccaacgagtactcatccaagtgccaggaatgcaagaagaccatcatgccaggtacccgcaagatggagtacaagggcagcagctggcatgagacctgcttcatctgccaccgctgccagcagccaattggaaccaagagtttcatccccaaagacaatcagaatttctgtgtgccctgctatgagaaacaacatgccatgcagtgcgttcagtgcaaaaagcccatcaccacgggaggggtcacttaccgggagcagccctggcacaaggagtgcttcgtgtgcaccgcctgcaggaagcagctgtctgggcagcgcttcacagctcgcgatgactttgcctactgcctgaactgcttctgtgacttgtatgccaagaagtgtgctgggtgcaccaaccccatcagcggacttggtggcacaaaatacatctcctttgaggaacggcagtggcataacgactgctttaactgtaagaagtgctccctctcactggtggggcgtggcttcctcacagagagggacgacatcctgtgccccgactgtgggaaagacatctgaattcaacacagagaagttgctgcttgtgatctcacacacagatttttatgttttctttctcacccaggcaatcttgccttctggtttcttccagccacattgagactttcttctagtgcttttcagtgatactcacgtttgcttaaaccctttagtgctttgtgatagttcagtcccagggaaagagaaaactcgccctaggccctaggtgggaagatggtttgaaatttttgtaatcgagtaaggcacacccaaatgtaaaaatccttttgaatgatgcctttataaatctttctctcactgtctatttaagtgcaattaacatatgtcacgaacttgaaagttttctaaactcaataaggtaatgaccagttgttatttacagctctgtaacctcccgttgcgtcaagtctaaaccaagattatgtgacttgcaataaagttattcagaacagaa

SEQ ID NO: 278596 - DNA, 1170 bp, Artificial Sequence
  derived and/or modified sequence
atgactcgaagaggcttctcgagggccggagcagcccagcgtagcacacggccagctgcagaaccccaaccacctgccgcacgcgcactgcagccaaggcccggcgtgcccggtcccctcagatgcagagagtatctacagccacccgccccacggagggaggctgaaggactatctcaccaaggatctgaagtcggcgccgagagcggagcaaggcccaaggagcggggcgcagagcccgagctggggaggctttggctacgcactgttagctcctggagactaggttggcactttgacttcggagtagccgagaagcccggagtaaagatgacagagcgctttgattgtcatcactgtaacgaaagcctcttcggtaaaaaatacatcctcagggaagaatcaccatactgcgtcgtctgttttgaaacacttttcgctaatacctgcgaagagtgtggaaagccaattggctgtgactgtaaagacttaagctacaaggaccgccattggcacgaggcgtgcttccattgttctcagtgcaggaatagtctggttgataaaccgttcgcagccaaagaggatcagcttttgtgcactgactgctactctaatgaatacagttcaaaatgccaggagtgcaagaagacaatcatgcccggaacaaggaaaatggaatacaagggatcttcctggcacgaaacctgcttcatctgccaccggtgtcagcaacccatcggtacaaaatccttcattcccaaggacaaccagaacttctgcgtgccatgctacgagaagcaacacgcaatgcagtgtgttcaatgtaagaagccgatcaccacagggggcgtcacttacagagaacagccatggcacaaggaatgcttcgtgtgtaccgcttgcaggaagcagctgagcggacaaaggttcaccgccagagatgatttcgcttactgtctcaactgtttttgcgacctgtacgctaaaaaatgcgccggatgtaccaaccctatctctgggttgggtgggaccaaatatattagttttgaggaacgtcagtggcacaacgactgctttaattgcaagaagtgcagtctgagtctggtgggacggggatttctgacagaacgtgatgacattctttgtcctgattgcggaaaggatatatag

SEQ ID NO: 278597 - DNA, 435 bp, Artificial Sequence
  derived and/or modified sequence
atgacccggaggggtttctcaagggcgggtgcagcccagcggtctacaaggcctgctgccgagcctcagcctccggccgccagagccctgcagccgcgacctggggtccccgggcctctgagatgtcgtgagtacttacagccacccgctccccgtcgcgaagctgaaggtttgtctcatcaggggagtgaagtcggcgccgaaagcggcgcgcgcccaaaagaacgcggagccgagcccgagctgggcagactctggttacggaccgttagctcttggcgcttgggttggcactttgacttcggaaccgagtcccggttcgtcgcccaagccggcgttcagtggcatgatctatccagcttacaggcactgccgttaggctctagacatagtcccgcccctgcctcgcaggtggccggaaccaccggatgctag

SEQ ID NO: 278598 - DNA, 1170 bp, Artificial Sequence
  derived and/or modified sequence
atgacccggcggggcttcagcagagctggagctgcccagaggagcaccaggcctgctgctgagccccagcccccagctgcccgggccctgcagcccaggcctggggtgcccggccccctgcgctgccgggagtacctgcagcccccagccccccggcgggaggccgagggcctgagccaccagggcagcgaggtgggcgctgagagcggggcccggcccaaggagagaggagctgagcctgagctgggccgcctgtggctgaggacagtgtcctcctggaggctgggctggcactttgattttggagtggccgagaagccaggagtgaagatgacagaaagatttgactgccaccactgcaatgaaagcctgtttgggaagaagtacatcctgcgggaggagagcccctactgtgtggtgtgctttgagaccctgtttgccaacacctgtgaggagtgtgggaagcccatcggctgtgactgcaaggacctgagctacaaggacagacactggcatgaggcctgcttccactgcagccagtgcaggaacagcctggtggacaagccctttgctgccaaggaggaccagctgctgtgcacagactgctacagcaatgagtacagcagcaagtgccaggagtgcaagaagaccatcatgcctggcaccaggaagatggagtacaagggcagctcctggcatgagacctgcttcatctgccaccgctgccagcagcccatcggcaccaagagcttcatccccaaggacaaccagaacttctgtgtgccctgctatgagaagcagcacgccatgcagtgtgtgcagtgcaagaagcccatcaccactggaggagtgacctaccgggagcagccctggcacaaggagtgctttgtgtgcacagcctgcaggaagcagctgagcggccagcgcttcaccgccagagatgactttgcctactgcctgaactgcttctgtgacctgtatgccaagaagtgtgccggctgcaccaaccccatcagcggcctgggcggcaccaagtacatcagctttgaggagcggcagtggcacaatgactgcttcaactgcaagaagtgcagcctgagcctggtgggccggggcttcctgacagaaagagatgacatcctgtgcccagactgtgggaaggacatctag

SEQ ID NO: 278599 - DNA, 435 bp, Artificial Sequence
  derived and/or modified sequence
atgacccggcggggcttcagcagagctggagctgcccagaggagcaccaggcctgctgctgagccccagcccccagctgcccgggccctgcagcccaggcctggggtgcccggccccctgcgctgccgggagtacctgcagcccccagccccccggcgggaggccgagggcctgagccaccagggcagcgaggtgggcgctgagagcggggcccggcccaaggagagaggagctgagcctgagctgggccgcctgtggctgaggacagtgtcctcctggaggctgggctggcactttgattttggaacagagagcagatttgtggcccaggccggcgtgcagtggcatgacctgagcagcctgcaggccctgcccctgggcagccgccacagccctgccccagccagccaggtggccggcaccaccggctgctag

SEQ ID NO: 278600 - DNA, 1170 bp, Artificial Sequence
  derived and/or modified sequence
atgacccggcggggcttcagccgggccggcgccgcccagcggagcaccagacctgccgccgaacctcagcctccggcggctcgcgccctccagccaagaccaggcgtccccggacccctgcgttgtcgggagtaccttcagccgcccgcaccccgccgagaagcagagggcctatcccaccagggctccgaagttggcgcggagtcaggcgctagaccaaaggagcgcggggccgagccagagctcggtcggctgtggctgcgcacggtaagcagttggcgcttggggtggcattttgatttcggcgtcgccgagaaacccggagtcaaaatgaccgagcgcttcgactgccatcactgcaacgaaagcctcttcgggaagaaatatatactgcgggaggaatccccttactgcgtggtatgtttcgaaacattgtttgctaacacatgtgaggaatgcgggaagcccatcggctgcgattgtaaagatctttcttacaaagaccgccactggcacgaagcatgtttccattgctcacagtgccgtaactccctggtcgacaagcccttcgcagccaaggaagaccagctgctatgcacggactgctactctaacgagtattcaagtaagtgtcaggagtgcaagaagacaatcatgcccggcacccgcaaaatggagtataagggatcttcatggcacgagacatgttttatatgccaccgctgtcagcagccgatagggactaaaagtttcatcccgaaggacaaccagaatttctgtgtaccctgctacgaaaagcagcacgccatgcagtgtgtccagtgcaagaaaccgatcacaacagggggcgtcacttaccgggagcaaccatggcataaagagtgtttcgtgtgtaccgcatgcagaaaacagttaagtggccagagattcaccgcaagagatgattttgcttactgcctgaactgtttctgcgacttatacgccaagaaatgcgcggggtgcaccaatcctatttcaggactgggcggcacaaaatatatcagctttgaggaaagacagtggcacaatgactgcttcaattgtaaaaagtgctcactctctctggtgggccgcggctttctgacggagagggacgacattttgtgtccagactgtggaaaggacatttag

SEQ ID NO: 278601 - DNA, 435 bp, Artificial Sequence
  derived and/or modified sequence
atgacccggcggggcttcagccgggccggcgccgcccagcggagcacgcgtcccgccgcggaaccacagcctccagccgcgcgtgctctacagccaagaccaggcgttcccggcccactgcgctgccgagagtacttgcaacctcctgcgccccgccgcgaagctgagggactgtcacatcagggaagtgaagtgggcgcagaaagtggagctaggccaaaagagaggggagcagagcccgagctgggcaggctgtggcttagaaccgtttcgtcatggcgactgggctggcacttcgattttggtacggaatcacgtttcgtcgctcaggccggcgtgcagtggcacgatctctcgtcacttcaggccctacccttagggtctaggcactctcctgcccccgcgagtcaggtcgctggaaccaccggatgttag

SEQ ID NO: 278602 - DNA, 1170 bp, Artificial Sequence
  derived and/or modified sequence
atgaccaggcggggattcagtagagcgggtgccgcacagagatctactcgccctgccgcagaaccccagcctcctgcagctcgggcactgcagcccagaccaggcgtccccggacccctgaggtgtcgtgaatatctacagccccctgcgcctaggcgggaggccgaaggcctctcacaccagggaagcgaagtgggcgcagaaagtggcgctaggcccaaggaaagaggcgcagagcctgaattgggcaggctttggctgcgaacagtgagcagttggcgcctgggatggcacttcgacttcggggtagcagagaaacccggtgtcaagatgaccgagagattcgactgccatcactgtaacgagtcattgtttggaaaaaaatatatcctgcgggaagaaagcccatattgtgtggtttgctttgagacactctttgcaaacacctgcgaagaatgtggaaagccgattggttgtgactgtaaggatctctcctacaaagacaggcactggcacgaagcatgttttcactgttcccaatgcagaaactctttagtcgacaagccttttgcagccaaagaggatcagctgttatgtaccgattgctattccaacgagtattcctctaaatgccaggaatgcaagaagacaatcatgccaggaaccaggaagatggaatataagggttcaagttggcatgagacctgcttcatttgccacaggtgtcagcaacccatcggcacgaagagttttataccaaaggataatcaaaatttttgtgtgccctgctacgagaagcagcatgctatgcagtgtgtccagtgtaagaagcccatcactaccggcggtgttacctaccgcgaacagccctggcataaggagtgctttgtatgtaccgcttgcagaaagcagctgtctggccagcgttttacagcaagagatgactttgcatactgcctgaattgcttctgcgacttgtatgctaaaaaatgcgctggttgcacaaatccgatttcaggcttaggcggtactaagtatataagttttgaggaaagacaatggcacaacgactgcttcaactgcaagaagtgttctctatcactggttgggagaggctttcttaccgaaagggacgatattctctgtccagattgtgggaaagacatttag

SEQ ID NO: 278603 - DNA, 435 bp, Artificial Sequence
  derived and/or modified sequence
atgaccaggcggggtttcagtagggctggcgcagcgcagcgcagcacacgtcccgcagccgaaccccagccacctgcggctagagctctgcagccgcgaccaggagtccccggacccctgcgatgtcgagagtatcttcagccccctgcgcctagacgggaggccgaaggactaagccatcagggaagcgaggtgggtgcagagagcggtgcccgacccaaggagcggggagccgagcccgagttgggtcgcctatggctccgcacagtctcatcgtggagattgggttggcacttcgatttcgggaccgagagcaggttcgttgcacaagcaggagtgcaatggcatgacctctccagtctgcaagctctccctctaggatctcgccactccccggctcccgcatcccaggtcgccggaacgactggctgttag

SEQ ID NO: 278604 - DNA, 1170 bp, Artificial Sequence
  derived and/or modified sequence
atgaccagaagaggcttcagcagagccggcgccgcccagagaagcaccagacccgccgccgagccccagccccccgccgccagagccctgcagcccagacccggcgtgcccggccccctgagatgcagagagtacctgcagccccccgcccccagaagagaggccgagggcctgagccaccagggcagcgaggtgggcgccgagagcggcgccagacccaaggagagaggcgccgagcccgagctgggcagactgtggctgagaaccgtgagcagctggagactgggctggcacttcgacttcggcgtggccgagaagcccggcgtgaagatgaccgagagattcgactgccaccactgcaacgagagcctgttcggcaagaagtacatcctgagagaggagagcccctactgcgtggtgtgcttcgagaccctgttcgccaacacctgcgaggagtgcggcaagcccatcggctgcgactgcaaggacctgagctacaaggacagacactggcacgaggcctgcttccactgcagccagtgcagaaacagcctggtggacaagcccttcgccgccaaggaggaccagctgctgtgcaccgactgctacagcaacgagtacagcagcaagtgccaggagtgcaagaagaccatcatgcccggcaccagaaagatggagtacaagggcagcagctggcacgagacctgcttcatctgccacagatgccagcagcccatcggcaccaagagcttcatccccaaggacaaccagaacttctgcgtgccctgctacgagaagcagcacgccatgcagtgcgtgcagtgcaagaagcccatcaccaccggcggcgtgacctacagagagcagccctggcacaaggagtgcttcgtgtgcaccgcctgcagaaagcagctgagcggccagagattcaccgccagagacgacttcgcctactgcctgaactgcttctgcgacctgtacgccaagaagtgcgccggctgcaccaaccccatcagcggcctgggcggcaccaagtacatcagcttcgaggagagacagtggcacaacgactgcttcaactgcaagaagtgcagcctgagcctggtgggcagaggcttcctgaccgagagagacgacatcctgtgccccgactgcggcaaggacatctag

SEQ ID NO: 278605 - DNA, 435 bp, Artificial Sequence
  derived and/or modified sequence
atgaccagaagaggcttcagcagagccggcgccgcccagagaagcaccagacccgccgccgagccccagccccccgccgccagagccctgcagcccagacccggcgtgcccggccccctgagatgcagagagtacctgcagccccccgcccccagaagagaggccgagggcctgagccaccagggcagcgaggtgggcgccgagagcggcgccagacccaaggagagaggcgccgagcccgagctgggcagactgtggctgagaaccgtgagcagctggagactgggctggcacttcgacttcggcaccgagagcagattcgtggcccaggccggcgtgcagtggcacgacctgagcagcctgcaggccctgcccctgggcagcagacacagccccgcccccgccagccaggtggccggcaccaccggctgctag

SEQ ID NO: 278606 - DNA, 1241 bp, Artificial Sequence
  derived and/or modified sequence
cagaaggttggggccatccaaccaggcagtccgcctgcacagcagctgtccctgctcatcgggctggaggacagaagacagaaccctaaaaccacaggttgctgaaaagccaggagtcaaaatgactgagcgctttgactgccaccattgcaacgaatctctctttggcaagaagtacatcctgcgggaggagagcccctactgcgtggtgtgctttgagaccctgttcgccaacacctgcgaggagtgtgggaagcccatcggctgtgactgcaaggtacccgcaagatggagtacaagggcagcagctggcatgagacctgcttcatctgccaccgctgccagcagccaattggaaccaagagtttcatccccaaagacaatcagaatttctgtgtgccctgctatgagaaacaacatgccatgcagtgcgttcagtgcaaaaagcccatcaccacgggaggggtcacttaccgggagcagccctggcacaaggagtgcttcgtgtgcaccgcctgcaggaagcagctgtctgggcagcgcttcacagctcgcgatgactttgcctactgcctgaactgcttctgtgacttgtatgccaagaagtgtgctgggtgcaccaaccccatcagcggacttggtggcacaaaatacatctcctttgaggaacggcagtggcataacgactgctttaactgtaagaagtgctccctctcactggtggggcgtggcttcctcacagagagggacgacatcctgtgccccgactgtgggaaagacatctgaattcaacacagagaagttgctgcttgtgatctcacacacagatttttatgttttctttctcacccaggcaatcttgccttctggtttcttccagccacattgagactttcttctagtgcttttcagtgatactcacgtttgcttaaaccctttagtgctttgtgatagttcagtcccagggaaagagaaaactcgccctaggccctaggtgggaagatggtttgaaatttttgtaatcgagtaaggcacacccaaatgtaaaaatccttttgaatgatgcctttataaatctttctctcactgtctatttaagtgcaattaacatatgtcacgaacttgaaagttttctaaactcaataaggtaatgaccagttgttatttacagctctgtaacctcccgttgcgtcaagtctaaaccaagattatgtgacttgcaataaagttattcagaacag

SEQ ID NO: 278607 - DNA, 840 bp, Artificial Sequence
  derived and/or modified sequence
atgacagagcggtttgactgtcatcattgcaatgagtccctcttcggaaagaaatacatcctcagggaagaaagtccctattgcgttgtttgtttcgaaaccctgttcgccaatacctgcgaggagtgtggaaagcccatcggttgtgactgcaaagatctgagctacaaagaccgtcactggcatgaggcgtgcttccattgctctcagtgtcgcaacagcttggtggataaaccattcgctgccaaggaggatcagctcctgtgtaccgattgctacagtaacgagtatagctctaaatgccaggagtgtaaaaagacaataatgcccgggactcgaaagatggagtataagggctcgagctggcacgagacctgctttatctgccaccgatgccaacagcccataggtaccaagtcattcatccctaaggacaaccaaaatttctgcgtgccgtgttatgaaaagcaacacgctatgcagtgcgtccagtgtaagaagccaattaccaccggtggagtgacttacagagaacagccctggcacaaagaatgtttcgtgtgtacggcttgccgtaagcagttgtccggccagcgctttaccgctcgagacgatttcgcctattgcctcaattgtttttgtgacctgtacgcaaagaagtgtgcgggctgcaccaatccaatctccggtctgggtggaacaaagtacatttccttcgaagaacgtcagtggcacaatgattgcttcaattgcaagaaatgctccctgagcttggtgggcagggggttcctgaccgaacgcgatgacattctgtgccccgactgtgggaaagacatctag

SEQ ID NO: 278608 - DNA, 840 bp, Artificial Sequence
  derived and/or modified sequence
atgacagagagatttgattgccaccactgtaatgagtcactgttcggtaaaaagtacatactgcgggaggagagtccatactgcgtggtctgttttgagacgcttttcgctaatacgtgtgaagaatgcggtaagccgatcggctgcgactgtaaagaccttagctacaaggaccgtcactggcacgaggcatgtttccactgctcacagtgtagaaacagtttggtggataaaccattcgcagcgaaggaggatcagttgctgtgtactgactgctacagcaacgagtacagctctaagtgtcaagaatgcaagaagactattatgccgggcacaaggaaaatggaatacaagggttcttcatggcatgagacatgtttcatatgtcacagatgtcagcagcccattggaaccaaaagtttcatcccaaaggataatcaaaatttctgcgtgccttgttacgagaaacagcacgcaatgcagtgcgtgcaatgtaagaagcctattacgacagggggcgttacatatcgagagcagccctggcataaggagtgctttgtctgtaccgcgtgcagaaagcaattgagcggccagaggttcactgcccgggatgacttcgcttactgtctaaattgtttctgtgacctctacgccaagaagtgtgccggatgcaccaaccccatatccggtctagggggcacgaaatacatctcattcgaggagcggcaatggcacaacgattgcttcaactgtaaaaaatgttcgctgagtttggtggggaggggtttcctgactgagagggatgatatcttgtgtccagactgtggaaaagatatctag

SEQ ID NO: 278609 - DNA, 840 bp, Artificial Sequence
  derived and/or modified sequence
atgactgaacggttcgactgccatcactgtaacgagtctctgtttggaaaaaaatacatactgagagaggagagtccctattgcgtggtatgcttcgagaccctattcgccaatacttgcgaagagtgcggaaaacctatcggatgtgactgtaaggatcttagctacaaggatagacactggcacgaggcctgcttccactgttcccaatgccggaattctctggtagataaacccttcgccgctaaagaggatcagctcctttgcacggactgttactcaaatgaatatagctctaaatgtcaggaatgtaagaagacgatcatgcccgggactcggaagatggagtataaggggtcatcttggcatgagacatgctttatctgtcatcgatgtcagcaacccatcggcaccaagtcatttatccccaaggacaatcagaatttttgcgtgccatgttatgaaaaacaacacgccatgcagtgcgttcaatgtaagaaacctattacgacaggcggggtgacctacagagagcagccctggcataaagaatgcttcgtgtgcactgcatgtaggaagcaattatcagggcaaaggttcacggcacgcgacgacttcgcctattgcctcaactgtttctgcgacttgtacgcgaaaaagtgtgccggatgcactaatccgatttctgggctgggggggacaaaatatatcagcttcgaggaacgacaatggcataacgattgctttaactgcaagaagtgctcactgagcctggtaggccggggattcctgactgagcgcgatgacatcctatgccccgactgtgggaaggatatctag

SEQ ID NO: 278610 - DNA, 840 bp, Artificial Sequence
  derived and/or modified sequence
atgactgaaagatttgactgccaccactgtaacgaatccttattcggtaagaaatatattttacgcgaagagtcaccatattgtgtggtctgcttcgaaacactgttcgccaacacttgcgaggaatgtgggaaacctattggctgcgattgtaaagacctctcctataaggacagacactggcacgaggcttgcttccactgttcccaatgcagaaattccctggttgataagccatttgcagccaaagaggatcagctgctgtgtaccgactgttattccaatgaatactcctcaaaatgtcaagaatgtaagaagactatcatgcccggtaccaggaagatggaatacaaaggttcctcgtggcacgagacctgcttcatctgtcatcgatgccaacaacccataggaactaaaagctttatcccaaaagataatcagaacttttgcgtaccttgctatgaaaagcaacatgcaatgcagtgcgtgcaatgcaaaaaacctattaccaccggtggcgtcacataccgagagcagccatggcacaaggaatgcttcgtctgtactgcttgtaggaagcaactctcaggacagaggttcaccgcccgagacgacttcgcctattgcctcaattgtttttgcgatctttatgcaaaaaagtgtgccggctgcactaacccaatttccggcctgggcggaactaagtacatctcatttgaggagaggcagtggcacaacgattgcttcaattgcaaaaagtgtagcctaagtctggtgggacgcggctttcttacagagcgggatgacatcctttgccctgactgtgggaaagacatatag

SEQ ID NO: 278611 - DNA, 840 bp, Artificial Sequence
  derived and/or modified sequence
atgactgagcggtttgattgccaccactgcaacgaatcactgttcggaaaaaagtatatcttacgcgaggagtccccttactgcgtcgtgtgttttgaaaccttatttgcgaatacatgcgaggagtgtggtaagcccattggttgtgactgcaaagatcttagttataaggaccgccactggcacgaagcgtgcttccattgctcacaatgtcggaattcactggtggacaagcccttcgcagccaaagaggatcagctactctgcaccgactgctattctaacgaatatagttcaaagtgccaggagtgtaagaaaaccatcatgcctgggaccaggaagatggaatacaaaggctcttcctggcatgagacatgttttatttgtcacaggtgtcagcagccaattggcaccaagtcatttataccaaaagataaccagaatttctgcgtgccgtgctatgaaaaacagcacgcgatgcagtgtgttcagtgcaagaaacctattacaactgggggagtcacatatcgagagcagccttggcataaggagtgcttcgtgtgtaccgcctgcaggaaacagctgtccgggcagcgatttactgcgcgggacgactttgcctattgcctgaattgcttctgtgacctctacgccaagaagtgtgcaggatgcaccaaccctatctccggcctggggggcaccaaatatatcagtttcgaggagagacagtggcacaacgactgtttcaactgcaagaaatgctccctttcactcgtaggccgtgggtttttgaccgagcgggacgatattctgtgcccagactgcggtaaggatatctag

SEQ ID NO: 278612 - DNA, 840 bp, Artificial Sequence
  derived and/or modified sequence
atgaccgagcggtttgactgccatcactgcaatgagtctctattcggtaaaaagtacatcctgagggaagaatcgccctactgcgtggtgtgttttgagacccttttcgcgaatacctgcgaagagtgtgggaaacctatcggctgcgattgcaaggacctctcatacaaggaccgacactggcatgaggcctgctttcattgtagtcagtgtaggaattctctggtggataaaccgttcgccgcaaaagaagaccagctgttgtgtacagattgctattctaatgagtatagttctaaatgtcaggagtgcaaaaagacaattatgcctggcacccgaaagatggaatacaaaggaagctcctggcacgagacgtgcttcatttgccaccgctgtcagcagccaattggcactaagtctttcatccccaaagataaccaaaatttctgtgtcccatgttacgagaaacaacacgccatgcaatgcgtccagtgtaagaagcctatcacaaccggcggggtaacataccgagaacagccatggcacaaagaatgcttcgtgtgtacagcctgtagaaaacagctttctggccaacggttcacagctcgcgacgactttgcctactgtctcaattgcttttgcgacttatatgcgaaaaaatgcgccggctgcaccaatcctatcagcggactagggggcactaagtacatctcatttgaagaaagacagtggcataacgactgttttaactgcaagaaatgttccttaagcctggttgggcgcgggttcttgaccgaacgggatgacattctgtgtccagactgcggaaaggacatctag

SEQ ID NO: 278613 - DNA, 840 bp, Artificial Sequence
  derived and/or modified sequence
atgactgagaggttcgactgccaccactgcaacgaatcactgtttggaaaaaaatatattcttcgagaagagagcccttactgcgtcgtgtgcttcgagacgttgtttgccaacacctgcgaggaatgtggcaagccaattggctgcgactgcaaagacctgagctacaaagacagacactggcatgaggcatgttttcattgttcccaatgcagaaattccctagtggataaaccctttgctgccaaagaggatcaattattatgtacggactgctatagcaacgagtactcatcgaagtgccaggagtgtaagaaaactatcatgcccggaactcgcaaaatggaatataagggttcctcatggcacgaaacatgttttatatgtcacaggtgccagcaaccgattggtacaaagtcgtttattcctaaggacaatcaaaatttctgtgtaccttgctatgaaaagcagcacgctatgcagtgcgttcagtgcaagaaacctatcacaaccgggggcgtgacctatagagagcagccgtggcacaaagaatgtttcgtgtgcacggcctgccggaagcagctgtctggccaaaggtttactgctagggacgactttgcatactgtctcaactgcttttgtgatctgtacgccaaaaagtgcgccggctgcacaaacccaatcagcggattgggtggtactaaatatatcagcttcgaagaacgccaatggcataacgactgctttaactgcaaaaaatgctcactgagtctggtcggccggggcttcctcaccgagcgggatgatatactctgccctgattgcggaaaggatatctag

SEQ ID NO: 278614 - DNA, 840 bp, Artificial Sequence
  derived and/or modified sequence
atgacagaaagatttgactgccaccactgcaatgaaagcctgtttgggaagaagtacatcctgcgggaggagagcccctactgtgtggtgtgctttgagaccctgtttgccaacacctgtgaggagtgtgggaagcccatcggctgtgactgcaaggacctgagctacaaggacagacactggcatgaggcctgcttccactgcagccagtgcaggaacagcctggtggacaagccctttgctgccaaggaggaccagctgctgtgcacagactgctacagcaatgagtacagcagcaagtgccaggagtgcaagaagaccatcatgcctggcaccaggaagatggagtacaagggcagctcctggcatgagacctgcttcatctgccaccgctgccagcagcccatcggcaccaagagcttcatccccaaggacaaccagaacttctgtgtgccctgctatgagaagcagcacgccatgcagtgtgtgcagtgcaagaagcccatcaccactggaggagtgacctaccgggagcagccctggcacaaggagtgctttgtgtgcacagcctgcaggaagcagctgagcggccagcgcttcaccgccagagatgactttgcctactgcctgaactgcttctgtgacctgtatgccaagaagtgtgccggctgcaccaaccccatcagcggcctgggcggcaccaagtacatcagctttgaggagcggcagtggcacaatgactgcttcaactgcaagaagtgcagcctgagcctggtgggccggggcttcctgacagaaagagatgacatcctgtgcccagactgtgggaaggacatctag

SEQ ID NO: 278615 - DNA, 840 bp, Artificial Sequence
  derived and/or modified sequence
atgaccgagcggttcgactgccaccactgcaacgagagcctgttcggaaaaaagtacattttgagggaggaaagtccctattgcgtggtgtgctttgagactcttttcgccaacacctgtgaggaatgtggcaaaccaattgggtgcgattgcaaagatttgagctacaaagacaggcactggcacgaggcctgtttccattgctctcagtgtaggaacagtcttgtcgataaacctttcgctgctaaagaagatcagctattatgtacagattgttacagcaacgaatatagcagcaaatgccaggaatgcaagaagacaatcatgcccgggacacggaaaatggagtataaaggttcttcctggcatgagacatgctttatttgtcatcgctgccagcagccgattggaaccaagtctttcataccgaaggataaccagaacttttgcgtgccctgttatgagaaacagcacgctatgcagtgcgttcagtgcaagaagcccattaccactgggggcgtgacctatcgggaacagccatggcacaaagagtgctttgtgtgtacagcttgcagaaaacagctctccggccagcgatttaccgccagggatgattttgcctactgcctcaactgtttttgcgacctgtacgccaaaaagtgtgccggctgtactaacccaatctcaggtctcgggggcacaaagtacatatcatttgaagaaaggcagtggcacaacgactgctttaattgcaaaaagtgtagcttatctttggtcggccggggattccttacagaaagggacgacatcctatgtccagattgcgggaaggacatttag

SEQ ID NO: 278616 - DNA, 840 bp, Artificial Sequence
  derived and/or modified sequence
atgaccgagcggttcgactgccaccactgcaacgagagcctgttcggtaagaaatacatcttgcgggaagaatcgccttattgcgtcgtatgtttcgaaactctatttgcgaatacctgcgaagagtgcgggaagccaatcggttgcgactgcaaggatttgtcctataaagaccgacactggcacgaggcctgctttcattgtagtcaatgccgtaactcgttggtcgataaaccctttgcagccaaggaggatcaattgctgtgcacggattgttacagtaacgaatacagcagcaagtgccaggaatgtaagaagaccataatgccagggacccgaaagatggagtacaaagggtctagctggcatgaaacatgctttatctgtcacagatgtcagcaacctataggcaccaagtccttcatccccaaggataaccagaacttttgtgtgccttgttacgagaagcagcacgcgatgcaatgcgtgcagtgcaagaagcctatcaccacaggcggggtcacttacagagagcagccgtggcataaagagtgctttgtgtgtactgcttgtaggaagcaactgagtggacagcgttttaccgcccgtgatgattttgcatattgtctcaactgcttttgtgacctgtacgccaaaaagtgcgccggatgcaccaaccctatcagcggtctagggggcaccaaatatatcagttttgaggagaggcagtggcacaatgattgctttaattgcaagaagtgtagtctgagcctggtgggcagaggattcctcactgaaagggacgacatcttatgtccggactgcgggaaggacatttag

SEQ ID NO: 278617 - DNA, 840 bp, Artificial Sequence
  derived and/or modified sequence
atgaccgagcggttcgactgccaccactgcaacgagagcctgttcggtaagaagtatatcctacgggaagaatctccatactgtgtggtttgctttgaaacactgttcgctaatacgtgtgaggaatgcggaaaaccaatcggctgcgattgtaaggacttgtcctataaagatcgccactggcatgaagcgtgtttccattgctcccagtgtcggaactccttagtcgacaagccattcgccgccaaagaggaccaacttctctgcaccgattgctattccaatgaatattcgagcaaatgtcaagaatgcaaaaagaccattatgccaggcactcgcaaaatggagtataagggttcatcatggcacgagacttgctttatctgccatcgatgccagcagcccatcggcacgaaatcctttatcccaaaggataaccagaacttttgcgtcccgtgttatgaaaagcagcacgccatgcagtgcgtgcaatgcaagaagcctattactacaggcggagtgacataccgggagcagccttggcataaggagtgttttgtgtgtactgcctgccgcaaacaactgtcaggacaaagatttacggcaagggatgatttcgcatactgccttaattgtttctgtgacctgtacgccaagaaatgtgcaggctgcactaatcctatctctggccttggaggaaccaagtatatcagcttcgaagagcggcagtggcataacgattgttttaactgcaaaaagtgttcgctttctctagtgggccgcggcttcttgactgagcgcgacgatattctctgtccagattgtggcaaagatatatag

SEQ ID NO: 278618 - DNA, 840 bp, Artificial Sequence
  derived and/or modified sequence
atgaccgagcggttcgactgccaccactgcaacgagagcctgttcgggaagaagtatattttgcgcgaggaatcaccctattgcgttgtgtgcttcgaaaccctgttcgctaacacctgtgaggagtgcggaaaaccgattggctgcgactgcaaagatttaagctataaagacagacattggcatgaagcatgtttccattgttcccagtgccggaattccctcgtcgataagccatttgcggctaaggaagatcaactgctgtgcacagactgttattcaaacgaatattcatccaagtgtcaagagtgtaagaagacgattatgcctggaacccggaaaatggaatacaagggctcttcatggcacgagacatgttttatctgccaccggtgtcaacagcccataggaacaaagtcctttatccctaaagataatcaaaatttttgcgtgccttgctacgagaagcaacacgcgatgcagtgtgtgcagtgcaaaaagccgatcacaacggggggcgtgacctaccgcgaacagccctggcacaaagagtgctttgtctgcactgcatgccgaaagcagctgagcggacagcgctttacagcccgtgatgattttgcatactgtctgaactgtttttgcgacctgtatgctaagaagtgcgcaggttgtacgaatcctattagcggtctgggtgggactaaatatatctctttcgaggagagacagtggcacaacgactgtttcaattgcaagaagtgctccctatcactggtgggccgcgggttcctcacagagagagacgacatactctgccctgattgcggcaaggacatttag

SEQ ID NO: 278619 - DNA, 840 bp, Artificial Sequence
  derived and/or modified sequence
atgaccgagcggttcgactgccaccactgcaacgagagcctgttcggtaaaaagtacattctgagagaggaaagcccatattgtgtggtctgctttgagacactgttcgccaatacttgcgaagagtgcggaaagcccatagggtgcgattgcaaagacctcagctataaagatcgacattggcacgaggcatgtttccattgtagccaatgtcggaactcccttgtggataagccatttgcagctaaagaggatcagctgttgtgtacagactgttacagcaacgaatactcaagcaaatgccaggagtgtaagaagaccattatgccaggcaccagaaagatggaatataagggatcatcatggcacgagacttgtttcatctgtcatcggtgtcaacagcccattggcaccaagtcttttatacctaaagataatcagaacttctgtgtgccgtgctacgaaaaacagcacgcaatgcagtgtgtacagtgcaagaagccaattaccacaggaggcgtgacatatcgggaacagccttggcacaaagagtgcttcgtttgtacagcttgccgcaaacagctgtctgggcaacgatttacagccagggacgatttcgcctattgcctcaactgcttctgtgacctctatgctaaaaaatgcgccggctgtactaatccaattagtggtttgggtggcacaaagtatatctcttttgaggagaggcaatggcacaatgattgcttcaactgcaaaaagtgcagcctgtccttagtgggaagagggttccttaccgaacgcgatgacatcctctgtccagattgcggaaaggatatctag

SEQ ID NO: 278620 - DNA, 840 bp, Artificial Sequence
  derived and/or modified sequence
atgaccgagcggttcgactgccaccactgcaacgagagcctgttcggcaaaaaatatatcctgagggaagagtctccctattgcgtcgtctgcttcgaaacactgttcgcaaacacctgcgaagaatgtgggaagccaatagggtgcgactgcaaagatctcagttacaaggaccgtcattggcatgaagcatgctttcattgttctcagtgcaggaactcactagttgacaagccgtttgccgcaaaagaagaccaattgctttgcaccgactgttactcaaacgagtactcaagtaaatgccaggaatgtaagaagacaataatgcccggtacccggaaaatggaatacaagggcagcagttggcacgagacctgctttatttgccatagatgccagcagcccattggaacaaaatctttcatccccaaagataatcagaacttttgcgtcccttgttacgaaaagcagcacgctatgcagtgtgtgcagtgcaaaaagcctatcacaacagggggcgtgacttaccgagagcaaccctggcataaggagtgctttgtgtgtactgcctgtcggaaacaactttctggccagcgttttactgcaagagacgactttgcatattgtctcaattgtttttgtgacctctacgctaagaaatgtgcagggtgtaccaatcctatttcggggcttggtggtacgaagtacattagtttcgaggagaggcagtggcacaacgactgtttcaattgtaagaagtgcagcctgagccttgtggggcgcggctttctgactgagcgcgatgatatactgtgtccggactgcggaaaggacatctag

SEQ ID NO: 278621 - DNA, 840 bp, Artificial Sequence
  derived and/or modified sequence
atgaccgagcggttcgactgccaccactgcaacgagagcctgttcgggaagaaatacatcctgcgggaggagtccccatattgtgtggtgtgtttcgaaacactgtttgcgaatacatgtgaggaatgtggaaagccgatcggttgtgactgtaaggacttgtcatataaagatcggcactggcatgaggcctgcttccactgtagccagtgccggaatagccttgtggacaaacccttcgccgcaaaagaggaccagctgttgtgtacagactgttatagcaatgagtactcaagcaagtgccaagagtgtaaaaagacaatcatgccagggacccgcaaaatggagtacaagggctccagctggcacgaaacttgttttatctgtcaccgatgccagcagcccatcggcactaagtctttcatccccaaggataaccagaacttctgcgtcccatgctacgagaagcagcacgcgatgcagtgcgtccaatgtaaaaagccaattacgacaggcggagtgacctaccgcgagcaaccttggcataaagagtgctttgtgtgtacagcatgcaggaaacagctgagtggacagcggttcactgccagggatgatttcgcttactgtttgaactgtttttgtgacctctatgctaaaaagtgcgccggctgtacaaaccccataagcggtttgggaggtacaaagtacatctcatttgaggagcgacagtggcacaatgactgttttaactgtaaaaagtgttcactgtctctggtgggaaggggttttcttaccgagcgggacgacattctctgtccagactgcgggaaagacatttag

SEQ ID NO: 278622 - DNA, 840 bp, Artificial Sequence
  derived and/or modified sequence
atgacagagaggttcgattgccaccactgcaatgaatcactgtttggcaaaaaatacatcctcagagaggagtccccatactgcgtcgtgtgtttcgaaactttgtttgccaatacttgcgaggaatgcggcaaacctatcggttgtgactgcaaggacttgtcttataaggatagacactggcacgaagcctgcttccattgctcccagtgccggaattcactcgtcgataaaccatttgcagccaaagaggatcagttgttatgtactgattgctactctaacgagtactcctctaagtgccaggaatgcaaaaagaccataatgccaggcacaaggaaaatggagtacaaagggtcctcctggcatgagacctgctttatctgccacaggtgccaacagcccatcggaaccaagtcttttatccccaaggataaccagaacttctgtgtgccatgctacgagaagcagcacgccatgcagtgcgtgcagtgtaagaagccgatcacaacgggaggggtgacatatcgagagcagccttggcacaaggagtgctttgtctgcactgcctgccgtaagcagctctccggtcagagattcaccgcaagggacgattttgcctactgtctgaactgcttttgcgatttgtatgccaagaagtgcgccggttgtacaaatcctattagcggactgggcggaactaagtatatcagctttgaagaaaggcagtggcacaacgactgcttcaactgcaagaaatgttctctgagcttggttgggcgaggcttcttgaccgaaagagatgacatactgtgccccgattgcggaaaggacatctag

SEQ ID NO: 278623 - DNA, 840 bp, Artificial Sequence
  derived and/or modified sequence
atgaccgagcggtttgactgccatcactgcaacgagagcctgttcggcaaaaagtacattctaagggaagagagcccctactgcgtcgtttgtttcgaaactttgttcgctaatacttgtgaggaatgcggcaaacctattggctgcgactgtaaagaccttagctacaaagaccgccactggcacgaggcctgctttcactgttctcagtgccggaatagcctcgtcgataagcccttcgcagctaaagaggaccagctattgtgtacagattgctactctaatgagtactctagtaagtgccaggaatgcaaaaagactattatgcctggcaccagaaagatggagtacaaaggttcctcttggcatgagacttgcttcatttgccaccgttgccagcaacctatcggtacaaagagttttattcctaaagacaaccagaatttttgcgtgccttgctatgaaaaacagcacgccatgcagtgtgtgcagtgcaagaaacccattacaacaggcggagtcacttatcgggagcaaccgtggcataaggagtgtttcgtgtgtactgcatgtagaaaacagctgtccggccagcgtttcacggccagagatgattttgcctattgcctgaactgcttctgcgacctgtacgcaaagaaatgtgccggatgcacgaatcccatatccggtctcggaggaaccaagtacataagctttgaggagaggcagtggcacaacgactgtttcaactgtaaaaagtgttctctttccctggtggggagggggttcctgactgaacgcgatgatattctgtgtcccgactgtgggaaagatatctag

SEQ ID NO: 278624 - DNA, 840 bp, Artificial Sequence
  derived and/or modified sequence
atgaccgaacggtttgactgtcaccactgtaacgagtccttgtttggaaagaaatacatactgagagaagaatcaccttactgtgtggtgtgcttcgagaccctttttgcaaacacctgtgaagaatgtggtaagcctatcggctgtgactgcaaagacttgagctacaaggacagacactggcatgaggcatgctttcactgctctcagtgtcgaaactctttggtcgacaagccctttgctgccaaggaagaccagctcctgtgtacagactgctatagcaatgaatattcctcaaagtgtcaggagtgcaagaagactatcatgcccggaactaggaagatggaatacaagggaagtagttggcacgaaacctgctttatttgtcacaggtgccagcagcccatagggaccaagagctttatcccaaaagataaccagaacttttgcgtgccgtgctatgagaaacagcacgctatgcagtgtgtgcagtgcaaaaagcccatcacgactgggggagtgacctatagggaacagccttggcataaggagtgctttgtatgcactgcctgtaggaagcaactgtctgggcagaggttcaccgccagagacgacttcgcctattgcctgaattgtttctgtgacttgtatgccaagaagtgtgctggctgcactaaccctatttctggcctgggaggtaccaagtatatttcctttgaggagagacagtggcacaacgactgctttaattgtaaaaaatgcagtttgtctctcgtcgggagaggctttctcaccgagagggatgatattctgtgcccggattgcggaaaagatatctag

SEQ ID NO: 278625 - DNA, 840 bp, Artificial Sequence
  derived and/or modified sequence
atgaccgagaggtttgattgtcaccattgcaatgaatctctgtttggaaaaaagtacatcttgagggaggagtctccttactgcgtggtgtgcttcgaaacactttttgctaatacctgtgaagaatgtggaaagccaataggatgcgattgcaaagacctgagttataaggacagacattggcatgaggcatgtttccactgctcacagtgccgcaactctttggtggataagccatttgccgctaaggaggatcagctcctatgtaccgactgctactccaacgaatattcctctaaatgtcaggagtgtaagaagaccataatgcctggtaccaggaagatggagtataaaggctctagctggcatgagacttgctttatttgtcaccgctgtcagcagcccataggcacaaaatccttcatcccaaaagataatcagaacttttgtgtgccatgctacgagaagcagcacgcaatgcagtgcgtccaatgcaagaagcccattactaccggaggcgtaacctaccgggaacagccttggcacaaagagtgctttgtctgtaccgcttgtagaaagcagctctcaggccagagattcactgcaagagacgatttcgcatactgtcttaactgtttttgcgacctgtacgccaaaaagtgtgccggatgtactaacccaatctcaggacttgggggaacaaaatacatatctttcgaggagcgccagtggcataacgattgctttaactgtaagaagtgtagcctcagtctagtgggaagaggatttttaactgaaagagatgacattttatgtcctgactgcgggaaagatatctag

SEQ ID NO: 278626 - DNA, 840 bp, Artificial Sequence
  derived and/or modified sequence
atgactgagcgattcgactgccaccattgtaatgagtcactgttcggcaagaagtacattttgagagaggaatctccctactgcgttgtttgctttgaaaccctgttcgctaacacttgtgaggaatgtggcaagccgatcggatgtgactgcaaggatctgtcctataaggacagacattggcatgaggcgtgctttcactgtagccagtgtcggaacagcctggtggacaagccttttgctgctaaagaagaccagcttctctgtacagactgttatagcaatgaatactcctccaagtgccaagagtgcaagaagactattatgcccggtacacgcaagatggagtataaaggcagctcctggcacgaaacctgcttcatctgccaccggtgtcaacaacctatcggaacaaaaagttttatacccaaggacaaccaaaacttctgtgtgccatgttatgaaaagcagcacgccatgcagtgtgtgcaatgtaaaaaaccaattacaaccgggggagtcacataccgggagcaaccctggcataaggagtgcttcgtctgcacagcctgtagaaaacagttgtcagggcagcggttcactgcacgcgatgatttcgcctattgtctcaactgcttctgcgatctgtatgccaagaaatgcgcaggttgtaccaatccaatctcaggactaggaggaacaaaatatattagcttcgaggagaggcaatggcataatgactgcttcaattgtaagaagtgctccctgagcctcgtaggtcgtggcttcttaaccgaacgtgacgatatcctttgccccgactgcgggaaggacatttag

SEQ ID NO: 278627 - DNA, 840 bp, Artificial Sequence
  derived and/or modified sequence
atgaccgagcggttcgattgccatcactgcaatgaaagcctgttcggaaagaaatatattctgcgggaggagagtccatactgcgtggtgtgcttcgaaacactgttcgccaacacctgcgaggaatgcggaaaaccaatcggatgtgattgcaaagatcttagttataaggaccgccattggcacgaagcttgctttcactgctcacagtgtcgcaacagccttgttgacaagcccttcgcggctaaagaggatcagctcctgtgcactgattgctatagtaatgagtacagctcaaagtgtcaggagtgcaaaaaaacaatcatgcctggcaccagaaagatggagtacaaggggtcatcctggcacgaaacttgtttcatctgtcaccgttgccagcagcctattgggacaaagtctttcattccaaaggataaccagaatttttgcgtcccatgctatgagaagcagcacgctatgcaatgtgtacagtgtaaaaagcccatcacaacaggtggcgtgacttaccgcgagcagccttggcacaaagaatgttttgtatgcaccgcctgccgcaaacaactgagcgggcagcgcttcacagcgagggatgactttgcctattgtctgaattgcttttgtgatttgtacgccaaaaaatgtgcagggtgcaccaaccccatctctggactggggggaaccaagtacatcagctttgaggagcgccaatggcataacgattgttttaactgcaagaaatgctccttgtctctggttggacgcggtttcctcaccgagagggacgatatcctgtgccccgattgtggaaaagatatctag

SEQ ID NO: 278628 - DNA, 840 bp, Artificial Sequence
  derived and/or modified sequence
atgacagagcggttcgactgccatcactgtaatgagagcttatttggtaagaagtacattctgcgggaagagtccccttactgtgtcgtatgttttgaaactctgtttgcaaacacatgtgaagaatgcgggaagcctatcgggtgtgactgcaaggatctgtcctataaagatagacactggcacgaggcttgctttcactgttctcagtgccggaactcactagtggataaaccattcgctgccaaagaggaccagctgctgtgcaccgactgctacagcaatgagtattcctccaaatgtcaagaatgcaagaagacaataatgcctggtacaagaaagatggagtacaagggaagcagctggcatgagacgtgctttatctgccaccggtgtcaacaacccattggaactaagtcgtttatccccaaggataatcagaatttttgcgtcccctgctatgagaaacagcacgcaatgcagtgtgtgcaatgcaaaaaacctataaccacaggaggcgttacctaccgggaacagccttggcacaaggagtgctttgtgtgcacagcctgccgcaaacagctgagtgggcagcgattcactgctagggatgattttgcttattgtttaaattgcttctgtgacctgtacgcgaaaaaatgtgcaggatgcacaaacccaatctctggcctaggaggcaccaagtacattagttttgaagagcggcagtggcacaacgactgcttcaattgtaaaaagtgctcccttagccttgtagggcgtggattcctgactgagcgggatgacatcctgtgcccggactgcgggaaagacatctag

SEQ ID NO: 278629 - DNA, 840 bp, Artificial Sequence
  derived and/or modified sequence
atgaccgagagattcgactgccaccactgcaacgagagcctgttcggcaagaagtacatcctgagagaggagagcccctactgcgtggtgtgcttcgagaccctgttcgccaacacctgcgaggagtgcggcaagcccatcggctgcgactgcaaggacctgagctacaaggacagacactggcacgaggcctgcttccactgcagccagtgcagaaacagcctggtggacaagcccttcgccgccaaggaggaccagctgctgtgcaccgactgctacagcaacgagtacagcagcaagtgccaggagtgcaagaagaccatcatgcccggcaccagaaagatggagtacaagggcagcagctggcacgagacctgcttcatctgccacagatgccagcagcccatcggcaccaagagcttcatccccaaggacaaccagaacttctgcgtgccctgctacgagaagcagcacgccatgcagtgcgtgcagtgcaagaagcccatcaccaccggcggcgtgacctacagagagcagccctggcacaaggagtgcttcgtgtgcaccgcctgcagaaagcagctgagcggccagagattcaccgccagagacgacttcgcctactgcctgaactgcttctgcgacctgtacgccaagaagtgcgccggctgcaccaaccccatcagcggcctgggcggcaccaagtacatcagcttcgaggagagacagtggcacaacgactgcttcaactgcaagaagtgcagcctgagcctggtgggcagaggcttcctgaccgagagagacgacatcctgtgccccgactgcggcaaggacatctag

SEQ ID NO: 278630 - protein, 263 aa, Artificial Sequence
  derived and/or modified sequence
MYTDNRSRKRVSEKNKRDFSAFKDADNELKVKISPQLLLAAHRFLATEVSQFSPSLISEKILLRLLKYPDVIQELKFDEHNKYYARHYLYTRNKPADYFILILQGKVEVEAGKENMKFETGAFSYYGTMALTSVPSDRSPAHPTPLSRSASLSYPDRTDVSTAATLAGSSNQFGSSVLGQYISDFSVRALVDLQYIKPQSWPCFSRPGDRVCLPAPPSMNSSLPHADHSAAVPERAAGFSHGEQPSVSHRRVHHPHGELGREV

SEQ ID NO: 278631 - DNA, 792 bp, Artificial Sequence
  derived and/or modified sequence
atgtataccgacaacagatctcggaaaagagtctcagagaagaataagagggactttagtgctttcaaagatgctgataatgaactgaaggtcaagattagccctcaactgctgctggcagctcaccgattcctggccaccgaggttagccagttttctcccagtttaatctccgagaagatccttttgcgactgctgaaatatcccgacgtgatacaagagctcaaattcgatgaacacaacaagtactacgctaggcactacctgtacactcgaaacaagcctgccgattattttatccttatactgcagggtaaggtggaggtggaagctggtaaggaaaatatgaaatttgagaccggagcattcagctactatggaaccatggctctgacatcggtgcccagcgaccgctcccccgctcaccctacaccgctatcacgaagtgcctccctcagctacccagaccggaccgacgtgtctacggcagctactcttgcaggaagtagcaaccagttcggcagtagcgtactaggacagtacatatcagatttcagcgttagggccctggtggacttacagtacattaagccccagtcctggccctgcttctcacggccaggtgatcgagtgtgcttacccgcacccccgtctatgaatagctccctaccgcacgcagaccactctgccgcggtaccagagagagccgccggattttcccacggagaacagcctagcgtcagtcaccgcagagtacatcatccgcatggagagcttgggagggaagtgtag

SEQ ID NO: 278632 - DNA, 792 bp, Artificial Sequence
  derived and/or modified sequence
atgtacacagacaacagaagcaggaagagggtgtctgagaagaacaagagggacttcagcgccttcaaggatgctgacaatgagctgaaggtgaagatcagcccccagctgctgctggccgcccaccgcttcctggccacagaggtgtcccagttcagccccagcctcatcagcgagaagatcctgctgcggctgctgaagtacccagatgtgatccaggagctgaagtttgatgagcacaacaagtactatgcccggcactacctgtacaccaggaacaagccagctgactacttcatcctgatcctgcagggcaaggtggaggtggaggccggcaaggagaacatgaagtttgagaccggggccttctcctactacggcaccatggccctgacctctgtgcccagcgacaggagccctgcccaccccacccccctgagccgcagcgccagcctgagctacccagacagaacagatgtgtccacagctgccaccctggccggcagcagcaaccagtttggcagctctgtgctgggccagtacatcagtgacttctctgtgcgggccctggtggacctgcagtacatcaagccccagagctggccctgcttcagcaggcctggggacagagtgtgcctgcctgccccacccagcatgaacagcagcctgccccacgccgaccacagcgctgctgtgcctgagagagctgctggcttcagccatggagagcagcccagcgtgagccaccggcgggtgcaccacccccacggggagctgggccgggaggtgtag

SEQ ID NO: 278633 - DNA, 792 bp, Artificial Sequence
  derived and/or modified sequence
atgtacaccgacaaccggagccggaagcgggtgagcgagaagaacaagagggacttctccgccttcaaagacgccgacaacgaattgaaggtcaaaatcagccctcagttactgctggccgcacacaggtttctcgcaacggaggtatcccaattcagtcctagtctaatcagtgaaaagattctgctgcgtctcctgaagtacccagatgtgatccaggagctgaagtttgacgaacataataagtattatgcacggcactacttgtataccaggaataaacccgctgactattttattctcattcttcagggtaaggtagaagtggaggctgggaaagaaaacatgaagtttgaaactggcgcattctcttactacggaacaatggccttgacttcagtgcccagcgacagaagtcctgctcacccgacacctctcagcaggagtgcctcgttatcataccccgatcgaacggacgtaagcactgccgctacactggctggcagctcaaatcagtttggttctagcgtgcttggccagtatatatctgacttctctgtccgcgcgctggtcgatctgcagtatatcaagccacagtcttggccctgcttttcccgtccgggagacagagtctgtcttccagcccccccatccatgaacagcagtttacctcatgccgatcactctgccgcagtccctgagagagcggccggattttcacatggtgaacagcccagtgtttctcatcgtagggtccatcatccgcacggcgagctgggaagagaagtttag

SEQ ID NO: 278634 - DNA, 792 bp, Artificial Sequence
  derived and/or modified sequence
atgtacaccgacaacagatcacggaaacgggttagtgagaaaaataaaagagacttttcagcattcaaggatgccgataacgagctgaaggtgaagatatcccctcagctcctgctggccgctcaccgtttcctcgcaacggaagtttcccagtttagcccatccctcatttctgaaaagatcctcctcagactgttgaagtaccctgacgtcatccaggaattgaagttcgatgagcataacaaatattatgctcgacattatttgtacaccagaaacaagcctgccgactacttcattctcatccttcagggcaaagttgaggtagaagctggtaaggaaaacatgaagtttgagacaggcgctttctcctactatggaaccatggcactgacatccgttccatcagatcgaagcccagcacacccaacacctcttagccgttctgcgagtctaagctatcccgaccgcacggatgtgagtacagccgctacccttgctggatctagcaaccagtttggtagcagtgtgctcggccagtacatcagcgattttagtgtgcgcgctctggttgatcttcagtatatcaaacctcaaagttggccttgtttttctagacctggggatcgcgtgtgcttgcccgctccaccgtcaatgaatagttcactgcctcacgccgaccactccgcggcagtacccgagcgcgctgctgggttctctcatggagagcagccatctgtctcccaccgcagagtgcaccatcctcatggcgagctgggcagggaagtgtag

SEQ ID NO: 278635 - DNA, 1591 bp, Artificial Sequence
  derived and/or modified sequence
agcttaatcctgcgggagcttgggtgaagggaggaaagagcagagaatcgccaagaaatcagggtgctcagctatctgcaggtgtggacccagggcccaagcctgtggcttccagtcagtccagcccgcacctctcccatgggagggcctgagagcgcgggaacatcctgggcccctgggatctcagaggctggaccttcctgggagactcattgagtaagatgcagaggactccttcttgggtggtgggagtccctggtctgctctggggcccctggcttttccccatgagaaaaagcagctggagctgggaagtcccacctggccatcgtgcagaaggtaaacaacgagggtgagggtgaccccttctacgaggtcctgggcctggtcaccctggaggacgtgatcgaggagatcatcaagtcggagatcctggacgagtccgacatgtacactgacaaccgaagccggaagcgggtgtctgagaagaacaagcgtgacttctctgccttcaaggatgcggacaatgagctcaaagtgaaaatctccccgcagctcctcctggccgctcatcgcttcctagccacagaggtctctcagtttagcccctccctgatatcagagaagatcctgctgcggctactcaagtacccagatgtcattcaggaactcaagtttgacgagcacaataagtactacgcccgccattacctgtacacccgaaataagccggccgactacttcatcctcatcctgcaggggaaggtggaggtggaggcagggaaggagaacatgaagtttgagacgggcgccttctcctactatgggactatggccctgacctcggtcccctccgaccgttccccagcacaccccaccccactcagccgctcagcctccctcagttacccagaccgcacagacgtctcaactgcagcaaccttggcaggcagcagcaaccagtttggcagctctgtcctgggccagtacatctctgacttcagcgtccgggcactcgtggacttgcagtacatcaagcctcaatcctggccctgtttctccaggcctggtgatagggtctgcctcccagcccctccctccatgaactcatcccttcctcatgcagatcactcggcagcagtaccagaacgggctgctggcttctcgcatggagaacagccctcagtttcccatagacgggtgcaccacccacatggagaacttggccgagaagtctgagctgcctgtggtggacgagaccacaactcttctcaacgagcgtaactccttgctgcacaaagcctcccacgagaatgccatctgacaggagggcccggggccccctgcccaccctgcgggggcctccccagtgggcccacatgaagagagggaacctgttagtccagaaaggatacggatagatagcctgtctgactgaacagccagatggcccccagcctatgggggatctggcctctgccagggacctctgagtagctctgaggtggcactgtccagccctggatagggggggcagtgggccagctaccgtaagcaaaggctgttttttactgagagaatttctaaagta

SEQ ID NO: 278636 - DNA, 792 bp, Artificial Sequence
  derived and/or modified sequence
atgtacaccgacaacagaagcagaaagagagtgagcgagaagaacaagagagacttcagcgccttcaaggacgccgacaacgagctgaaggtgaagatcagcccccagctgctgctggccgcccacagattcctggccaccgaggtgagccagttcagccccagcctgatcagcgagaagatcctgctgagactgctgaagtaccccgacgtgatccaggagctgaagttcgacgagcacaacaagtactacgccagacactacctgtacaccagaaacaagcccgccgactacttcatcctgatcctgcagggcaaggtggaggtggaggccggcaaggagaacatgaagttcgagaccggcgccttcagctactacggcaccatggccctgaccagcgtgcccagcgacagaagccccgcccaccccacccccctgagcagaagcgccagcctgagctaccccgacagaaccgacgtgagcaccgccgccaccctggccggcagcagcaaccagttcggcagcagcgtgctgggccagtacatcagcgacttcagcgtgagagccctggtggacctgcagtacatcaagccccagagctggccctgcttcagcagacccggcgacagagtgtgcctgcccgccccccccagcatgaacagcagcctgccccacgccgaccacagcgccgccgtgcccgagagagccgccggcttcagccacggcgagcagcccagcgtgagccacagaagagtgcaccacccccacggcgagctgggcagagaggtgtag

SEQ ID NO: 278637 - protein, 962 aa, Artificial Sequence
  derived and/or modified sequence
MISTRVMDIKLREAAEGLGEDSTGKKKSKFKTFKKFFGKKKRKESPSSTGSSTWKQSQTRNEVIAIESGPVGYDSEDELEESRGTLGSRALSHDSIFIPESGQDATRPVRVFSQENVCDRIKALQLKIQCNVKMGPPPPPGGLPAKRGEDAGMSSEDDGLPRSPPEMSLLHDVGPGTTIKVSVVSPDHVSDSTVSARISDNSLAPVADFSYPAESSSCLDNSAAKHKLQVKPRNQRSSKMRRLSSRAQSESLSDLTCTPEEEENEEKPLLEVSPEERPSSGQQDVAPDRGPEPGPPAPLPPPGGARARRARLQHSSALTASVEEGGVPGEDPSSRPATPELAEPESAPTLRVEPPSPPEGPPNPGPDGGKQDGEAPPAGPCAPATDKAEEVVCAPEDVASPFPTAIPEGDTTPPETDPAATSEAPSARDGPERSVPKEAEPTPPVLPDEEKGPPGPAPEPEREAETEPERGAGTEPERIGTEPSTAPAPSPPAPKSCLKHRPAAASEGPAASPPLAAAESPPVEPGPGSLDAEAAAPERPKAERAEAPPAGAERAAPERKAERGGAELRGAKKFSVSSCRARPRPGVSRPLERASGRLPLARSGPVWRSEAALDDLQGLPEPQHAKPGPRKLAERGPQDSGDRAASPAGPRKSPQEAAAAPGTREPCPAAQEPAPSEDRNPFPVKLRSTSLSLKYRDGASQEVKGVKRYSAEVRLERSLTVLPKEEKCPLGTAPALRGTRAPSDQGKGKARPPEPLSSKPPLPRKPLLQSFTLPHQPAPPDAGPGEREPRKEPRTAEKRPLRRGAEKSLPPAATGPGADGQPAPPWITVTRQKRRGTLDQPPNQEDKPGARTLKSEPGKQAKVPERGQEPVKQADFVRSKSFLITPVKPAVDRKQGAKLNFKEGLQRGISLSHQNLAQSAVMMEKELHQLKRASYASTDQPSWMELARKKSQAWSDMPQIIK

SEQ ID NO: 278638 - DNA, 3907 bp, Artificial Sequence
  derived and/or modified sequence
aggggagctgagcggcgtccgcccccgccgagccgagcggagccgagcgaagccggcgcgcctgcagctgggagctgggagctgggagcgcgccgggcgcagggccgggccggccgcgggagggtagtgtcagcgcccgcgtccagctcttcggccgcagacccgggctgtctggaggccgcgcggccacctgctgcgtcgccccggctttgggctggggctagacgcgcaccgcggcgggagcagccccggctcgccgcaccccgcggaaggtgcccttctctgcgcgtctcgccgagcccgggccacgctcctgtcccagcgagcttgacatgatttccacaagggtgatggacattaagcttcgggaggctgcagaaggccttggggaggacagcacaggaaagaaaaaatctaaattcaaaacttttaagaagttttttgggaagaagaagagaaaagaatcgccgtcgtccacaggaagtagcacctggaaacaaagtcagacgaggaatgaggtcattgccatcgaatccgggccagtgggctacgactccgaggatgagctggaggagtcgaggggcacgctgggcagccgggccctttctcacgacagtattttcattcctgagtccggacaggacgctactcggcctgtgcgggtgttttcccaagaaaatgtgtgtgatcggattaaagctctgcagttaaaaatacagtgtaatgtgaaaatggggccaccacctcctccaggggggcttcctgccaagcggggagaggatgccggcatgagctctgaggacgacgggctgcccaggagccccccagagatgtctctgctgcacgacgtgggtcctggtaccaccataaaggtctctgtcgtgtctccagaccacgtgagcgacagcaccgtctctgcccggatctcagacaacagcctggcaccagtggctgacttcagttatcctgcagaatcctcctcctgcctggacaactctgcagctaagcacaagctccaggtcaagccccgcaaccagcggtcgagtaagatgaggcggctctcatcgcgcgctcagtctgaatccctgagcgacctgacgtgcaccccagaggaggaggaaaacgaggagaagccacttttggaagtcagcccagaagagcgccccagctctgggcagcaggacgtggcgccagacagaggccctgagcctgggccaccggcgcccttgccgccacccggaggggcccgtgccagacgcgcccgcctgcagcactcctccgcgctcacggccagcgtggaggaggggggcgtccccggggaggacccctcaagccgcccggccaccccggagctcgccgagcccgagtcggcccccactctccgcgtggagcccccgtccccgccggagggccccccgaatcccggtcccgacggcggaaagcaggatggggaggcgccccccgcaggcccgtgtgccccggccacggacaaggcggaggaggtggtctgtgctcccgaagacgtcgcgagcccgtttcccaccgccatccctgagggggacacgactccccccgagactgaccccgccgccacctcagaggcgccctctgctcgcgacgggccagaacgcagtgtcccgaaggaagcggagccgacgccgcccgtgctcccggatgaggagaaggggcccccagggccggcgcctgagcccgagagagaagcggagacggagcccgagagaggagcggggaccgagcccgagagaattgggaccgagccctccacggcgcccgccccgagcccgccggcgcccaagagctgcctgaaacaccggcccgcggccgccagcgagggccccgccgcgtccccgccgcttgccgctgcggagtctcccccggtggagcccggccccggttccctcgacgcagaggccgccgccccggagcgccccaaggccgagcgagccgaggcgccaccggcgggcgccgagagggcggcgccagagcggaaggcggagaggggcggtgccgagctgcgaggcgcgaagaagttctcggtgtcctcgtgccgagcgcggcctcgtccgggcgtctcccgcccgctggaacgggccagcggccgcctgcccctcgcgaggagcggcccggtctggaggagcgaggcggctcttgacgacctccagggtctccccgagccccagcacgcgaaacctggccctcggaagctggcggagcgcggccctcaggactcgggggacagggcggccagcccggccgggccgcgcaagagccctcaggaggcggccgccgcgcccggcacgagagagccctgcccagccgcccaggagccggccccgagtgaggacagaaaccccttccccgtcaagctccggtccacctccctctcgctcaaatacagggatggcgcctctcaggaggtgaagggtgtgaagaggtacagtgccgaggtccggttagaaaggtcgctgaccgtgctcccgaaggaggagaagtgtcccctcgggacggcccccgcccttcgaggcaccagggcccccagcgaccaaggaaaggggaaggcccggccccccgagccgctcagctccaagccgcccctgccccggaagccgcttctgcagagcttcacgctcccgcaccagcccgcgccccccgacgccggcccgggagagcgggaacccaggaaggagcccaggacggcggagaaaaggccgctgcgcaggggagctgaaaagagtctgccgcctgcagcaacagggcctggagctgatgggcagcctgcgccaccctggatcaccgtcactcggcagaagcggagggggaccttggaccagccacccaaccaggaagacaagcctggggcacggaccctgaagtctgaaccaggaaagcaagccaaggtgcccgagagaggccaggagcctgtgaagcaagctgactttgttcgcagcaagtctttcctgataacccctgtgaagcccgctgtggaccggaagcagggggcaaagctcaacttcaaggaggggctgcaaagaggaatctcattgtcccatcagaacttggctcagtctgcagtgatgatggagaaggaactgcatcagctgaagagagccagttatgccagtacagatcagccatcctggatggaacttgccagaaagaaatctcaagcttggagtgacatgccccagattataaaataggtgggcagtgtgctgataaagcatgtccactaccctgacaagccacttagttaaaaactgccagtgtattgtggcaaacaaactgtgaaacttaaagattgattttatcatcaagttatgacgaacttggggaagaggaaggaaccaggcaaaacaaagaggataaacacacagccatactcctgggccagagggcccagaaacaagaacaacattgaaaaagtccaggaaccagttcctgtgcccaaaggtacgaatgtgtcttttcgaattcccttgataaagaagcctcagacaaggaagaaaatagaaatgaaattggacacataaataggacacccagcaaaggccagaagagaagcccttctaggagaagggacatctgtgcttccagctgagatcagcccatgtctctggtcgctctcttgcctgtggatcctgtcttctttcatgtttactacgaggcatgacattcatggcaaaacagggatgccgtttccaagagcagctataaaacaatctgttttcctaaagacagccactctgagaaggagatgaaggaacacggcagggttcatcaattcatagactgtttccaaaaataatttttaaacttttccactaggcatctgtgtctttaaccactgcacaatgcattgcctgtttaataaaaggtttcaaacatg

SEQ ID NO: 278639 - DNA, 2889 bp, Artificial Sequence
  derived and/or modified sequence
atgatcagcaccagagtgatggacatcaagctgagagaggccgccgagggcctgggcgaggacagcaccggcaagaagaagagcaagttcaagaccttcaagaagttcttcggcaagaagaagagaaaggagagccccagcagcaccggcagcagcacctggaagcagagccagaccagaaacgaggtgatcgccatcgagagcggccccgtgggctacgacagcgaggacgagctggaggagagcagaggcaccctgggcagcagagccctgagccacgacagcatcttcatccccgagagcggccaggacgccaccagacccgtgagagtgttcagccaggagaacgtgtgcgacagaatcaaggccctgcagctgaagatccagtgcaacgtgaagatgggccccccccccccccccggcggcctgcccgccaagagaggcgaggacgccggcatgagcagcgaggacgacggcctgcccagaagcccccccgagatgagcctgctgcacgacgtgggccccggcaccaccatcaaggtgagcgtggtgagccccgaccacgtgagcgacagcaccgtgagcgccagaatcagcgacaacagcctggcccccgtggccgacttcagctaccccgccgagagcagcagctgcctggacaacagcgccgccaagcacaagctgcaggtgaagcccagaaaccagagaagcagcaagatgagaagactgagcagcagagcccagagcgagagcctgagcgacctgacctgcacccccgaggaggaggagaacgaggagaagcccctgctggaggtgagccccgaggagagacccagcagcggccagcaggacgtggcccccgacagaggccccgagcccggcccccccgcccccctgcccccccccggcggcgccagagccagaagagccagactgcagcacagcagcgccctgaccgccagcgtggaggagggcggcgtgcccggcgaggaccccagcagcagacccgccacccccgagctggccgagcccgagagcgcccccaccctgagagtggagccccccagcccccccgagggcccccccaaccccggccccgacggcggcaagcaggacggcgaggccccccccgccggcccctgcgcccccgccaccgacaaggccgaggaggtggtgtgcgcccccgaggacgtggccagccccttccccaccgccatccccgagggcgacaccaccccccccgagaccgaccccgccgccaccagcgaggcccccagcgccagagacggccccgagagaagcgtgcccaaggaggccgagcccaccccccccgtgctgcccgacgaggagaagggcccccccggccccgcccccgagcccgagagagaggccgagaccgagcccgagagaggcgccggcaccgagcccgagagaatcggcaccgagcccagcaccgcccccgcccccagcccccccgcccccaagagctgcctgaagcacagacccgccgccgccagcgagggccccgccgccagcccccccctggccgccgccgagagcccccccgtggagcccggccccggcagcctggacgccgaggccgccgcccccgagagacccaaggccgagagagccgaggccccccccgccggcgccgagagagccgcccccgagagaaaggccgagagaggcggcgccgagctgagaggcgccaagaagttcagcgtgagcagctgcagagccagacccagacccggcgtgagcagacccctggagagagccagcggcagactgcccctggccagaagcggccccgtgtggagaagcgaggccgccctggacgacctgcagggcctgcccgagccccagcacgccaagcccggccccagaaagctggccgagagaggcccccaggacagcggcgacagagccgccagccccgccggccccagaaagagcccccaggaggccgccgccgcccccggcaccagagagccctgccccgccgcccaggagcccgcccccagcgaggacagaaaccccttccccgtgaagctgagaagcaccagcctgagcctgaagtacagagacggcgccagccaggaggtgaagggcgtgaagagatacagcgccgaggtgagactggagagaagcctgaccgtgctgcccaaggaggagaagtgccccctgggcaccgcccccgccctgagaggcaccagagcccccagcgaccagggcaagggcaaggccagaccccccgagcccctgagcagcaagccccccctgcccagaaagcccctgctgcagagcttcaccctgccccaccagcccgccccccccgacgccggccccggcgagagagagcccagaaaggagcccagaaccgccgagaagagacccctgagaagaggcgccgagaagagcctgccccccgccgccaccggccccggcgccgacggccagcccgcccccccctggatcaccgtgaccagacagaagagaagaggcaccctggaccagccccccaaccaggaggacaagcccggcgccagaaccctgaagagcgagcccggcaagcaggccaaggtgcccgagagaggccaggagcccgtgaagcaggccgacttcgtgagaagcaagagcttcctgatcacccccgtgaagcccgccgtggacagaaagcagggcgccaagctgaacttcaaggagggcctgcagagaggcatcagcctgagccaccagaacctggcccagagcgccgtgatgatggagaaggagctgcaccagctgaagagagccagctacgccagcaccgaccagcccagctggatggagctggccagaaagaagagccaggcctggagcgacatgccccagatcatcaagtag

SEQ ID NO: 278640 - DNA, 2889 bp, Artificial Sequence
  derived and/or modified sequence
atgatttcaacgagggtgatggatataaagctgagggaggccgcagaaggcctgggggaggactctacagggaagaaaaagagcaagttcaagacttttaagaaatttttcggtaaaaaaaagcgtaaggaatccccatcctctaccggatccagtacttggaagcagtcgcagacgcgcaatgaggtgatcgccatagaatctgggccggtaggatacgacagcgaggatgaactggaggaatctaggggtacactcgggtctcgggccctgtctcacgattctatctttatccccgaaagcggccaagacgccacccggcctgtgagagtgttctcccaggaaaatgtgtgtgataggatcaaggctctccagctgaagatccagtgtaacgttaagatgggaccacctccaccaccaggcggcttgcctgccaagcgaggggaggacgctggtatgagctctgaagatgatgggctgcctcgttcaccacccgagatgagtctgctgcacgacgtcgggcccggcacgacaataaaggtgagcgtggtgtcaccagatcatgtgagcgattctaccgtgtcagcccgtataagcgacaactcactggccccagtggccgacttttcatacccggcggagagctcctcctgcctggataatagcgccgccaagcataagctccaggtcaagccccgaaatcagcgctcatctaaaatgcggcggctgagttctcgggcacaaagtgaaagcctgagtgatttaacctgtaccccagaagaggaggagaacgaggagaaacctcttctggaagtgtcaccggaggaaagacccagctcgggacagcaggacgtagcccctgacagaggccctgagcccggcccccctgcccccttgccacctccgggcggcgcgcgagcccgaagagcccgactacaacattcatctgctctgacggcgtcagtggaagaggggggagtgccaggcgaagatcccagctcaagacccgcaactccagagctcgccgaacctgagtctgcgcccacactgcgcgtggagccacctagcccccctgaaggtccgcccaatcccggtcctgacggcggcaaacaggacggagaagcacctccagccgggccttgtgcacccgctacggacaaagccgaggaagtagtttgtgcaccagaggacgtcgctagcccgttccctaccgccatcccagagggtgatacaaccccccccgaaacggaccccgccgctaccagcgaagcaccctccgccagagacggccccgagaggtcagtccctaaggaggccgagcctacaccccccgtgctgcctgatgaagagaagggtcctcctgggcctgcacccgaacccgagcgggaagcagaaaccgaacctgaacgaggtgcaggtaccgaacccgaacggatcgggactgagcccagcacagcgccagccccatcacccccagctcctaagtcgtgcctgaagcataggcccgctgccgcgtctgaaggcccagctgcttcccctccactcgcagctgctgaatcaccaccagtggagcctgggccaggttcactggatgccgaggccgctgcccccgaaaggcctaaggcagagcgggccgaggcgccacctgctggagcagagcgcgctgctccggagaggaaagccgaaagggggggagctgagctcaggggggccaagaagttctccgtgtctagttgccgcgctcggcccaggccaggcgtctcccggccactggaaagggcttccggtcgactgcccctcgccaggtccgggcccgtgtggcgatctgaggcagctctggatgacctgcagggcctgccggagccacaacacgccaagccgggcccgagaaagctcgccgagcgcgggccccaggacagtggcgatagggctgcttccccagctgggccccggaagagcccccaagaggctgcagcggcccctggcacccgcgaaccctgccccgccgcccaggagccagctccttcagaggatcgcaatcctttcccagtgaagctgagatccacatcactctcgctgaagtaccgtgatggggcttcccaggaggtcaagggcgttaagagatactcagccgaggttagattggagcgatctctgaccgtactgccaaaagaggagaaatgtcctcttggcaccgcgcctgctctccggggaaccagagcaccctccgaccaagggaaagggaaagcgcgcccacctgagcctctgtcaagcaaaccccccctgccccgcaagccactccttcagtcattcacgctacctcatcagcccgcaccgcctgatgccgggcccggggagagagaacctaggaaagagccacggactgccgagaaacgaccactacgccggggtgctgagaaatctctgccccccgcagcaactggccccggggctgacggccaaccagctcctccttggatcactgtgacaagacagaaacgacgtgggacgttggatcagcctccaaatcaggaggacaaaccgggcgccaggaccctcaagtcagaacctggcaagcaggctaaagtgccagaacgaggtcaagagccagtcaaacaagctgatttcgtgagatccaaaagcttcctaattactcccgtaaaacccgctgtagatcggaagcagggcgccaaactgaacttcaaagaaggactgcaacggggaatcagtttgtctcaccagaatctcgcgcaatcagcagtgatgatggagaaagaactgcatcaactgaaacgggctagttatgccagtactgaccaacctagctggatggagctagcacgcaagaagtctcaagcctggtctgatatgccacagattatcaaatag

SEQ ID NO: 278641 - DNA, 2889 bp, Artificial Sequence
  derived and/or modified sequence
atgatcagcaccagggtgatggacatcaagctgcgggaggccgctgagggcctgggggaggacagcacaggcaagaagaagagcaagttcaagaccttcaagaagttcttcggcaagaagaagaggaaggagagccccagcagcacaggcagcagcacctggaagcagagccagaccagaaatgaagtcatcgccatcgagagcggccctgtgggctatgattctgaagatgagctggaggagagccggggcaccctgggcagccgggccctgagccatgacagcatcttcatccctgagagcggccaggatgccaccaggcctgtgcgggtcttcagccaggagaatgtgtgtgaccgcatcaaggccctgcagctgaagatccagtgcaatgtgaagatgggccccccacctcctcctgggggcctgcctgccaagagaggagaagatgctggcatgagcagtgaagatgatggcctgcccaggagccccccagagatgagcctgctgcatgatgtgggccctggcaccaccatcaaggtgtctgtggtgtccccagaccacgtgtctgacagcacagtgtctgcccgcatcagtgacaacagcctggcccctgtggccgacttctcctacccagctgagagcagcagctgcctggacaacagcgctgccaagcacaagctgcaggtgaagcccaggaaccagaggagcagcaagatgaggcggctgagcagccgggcccagagcgagagcctgagtgacctgacctgcaccccagaggaggaggagaatgaggagaagcccctgctggaggtgtccccagaggagcggcccagcagcggccagcaggatgtggccccagaccggggccctgagcccggccccccagcccccctgcccccacctgggggcgcccgggcccggcgggcccggctgcagcacagcagcgccctgacagcctctgtggaggagggcggcgtgcctggagaggaccccagcagcaggcctgccaccccagagctggccgagcctgagagcgcccccaccctgcgggtggagccccccagccccccagagggcccccccaaccctggcccagatggcggcaagcaggatggagaggcccccccagctggcccctgtgccccagccacagacaaggccgaggaggtggtgtgtgccccagaagatgtggccagccccttccccacagccatccctgagggggacaccaccccacctgagacagatcctgctgccaccagcgaggcccccagcgccagagatggccctgagaggtctgtgcccaaggaggccgagcccaccccacctgtgctgcctgatgaggagaagggccccccaggccctgcccctgagcctgagcgggaggccgagacagagcctgagcggggggccggcacagagcctgagagaattggaacagagcccagcacagccccagcccccagccccccagcccccaagagctgcctgaagcacaggcctgctgctgccagcgagggccctgctgccagcccccccctggccgctgctgagagcccccctgtggagcccggccctggcagcctggatgctgaggccgccgcccctgagcggcccaaggccgagagagctgaggcccccccagctggagctgagagagctgcccctgagaggaaggccgagcggggcggcgctgagctgcggggggccaagaagttctctgtgagcagctgccgggcccggcccaggcctggggtgtcccggcccctggagcgggccagcggccgcctgcccctggcccggagcggccctgtgtggaggtctgaggccgccctggatgacctgcagggcctgcctgagccccagcacgccaagccaggccccaggaagctggccgagcggggcccccaggacagcggggaccgggccgccagccctgctggccccaggaagagcccccaggaggccgctgctgcccctggcacccgggagccctgcccagctgcccaggagcccgcccccagtgaagatagaaaccccttccctgtgaagctgcggagcaccagcctgagcctgaagtacagagatggagccagccaggaggtgaagggcgtgaagcgctacagcgctgaggtgcggctggagaggagcctgactgtgctgcccaaggaggagaagtgccccctgggcacagccccagccctgcggggcacccgggcccccagcgaccagggcaagggcaaggcccggcccccagagcccctgagcagcaagccacccctgcccaggaagcccctgctgcagagcttcaccctgccccaccagcctgcccccccagatgctggccctggagagcgggagcccaggaaggagcccaggacagctgagaagaggcccctgcggagaggagctgagaagagcctgcccccagctgccaccggccctggagcagatggccagcctgccccaccctggatcaccgtgacccggcagaagaggcggggcaccctggaccagccccccaaccaggaggacaagccaggggcccggaccctgaagtctgagcccgggaagcaggccaaggtgcctgagcggggccaggagcctgtgaagcaggccgactttgtgcgcagcaagagcttcctgatcacccctgtgaagccagctgtggacaggaagcagggcgccaagctgaacttcaaggagggcctgcagaggggcatcagcctgagccaccagaacctggcccagagcgctgtgatgatggagaaggagctgcaccagctgaagagggccagctatgccagcacagaccagcccagctggatggagctggccaggaagaagagccaggcctggagcgacatgccccagatcatcaagtag

SEQ ID NO: 278642 - DNA, 2889 bp, Artificial Sequence
  derived and/or modified sequence
atgatcagcacccgggtgatggacatcaagctgcgggaggccgccgaaggtctgggcgaagactccacaggcaagaaaaaatctaaatttaagacctttaagaagttcttcgggaagaagaagcggaaggagagcccatccagtaccggcagcagcacctggaaacaatcccagactcgtaacgaggtcatcgcgatcgagtccggacctgtgggctatgatagcgaagatgaattggaggagagtcgaggcactctcggctcccgtgcactgagccatgactccattttcatcccagagtccgggcaggatgccacccgccctgttcgagtcttctctcaggagaacgtatgcgatcggatcaaagcgttacagctcaagatccagtgcaacgtgaagatgggcccccccccccctcccggaggcctgccagcaaaacgcggggaggatgccggcatgtcaagtgaggacgacggcttaccacgatctccacccgagatgtcacttctgcatgacgtgggacctggaaccaccattaaggtgtcagtggtaagtcccgatcacgtttcagatagcactgtaagcgctcgaatttccgataatagcctggcacctgtcgctgacttttcttaccctgcagagtcttcaagttgtctggataactctgctgccaagcacaaattacaggtcaagcctcggaaccaacggagctcaaaaatgaggaggctctcatctcgcgcacaatccgaaagcctcagcgaccttacgtgtacccctgaggaagaggagaacgaggagaagcccctgctggaagtcagccccgaagaacgcccgtcctcaggccagcaggacgtagctccagatcgaggcccagaacccggcccccccgcaccgctccctcctcccggcggagcccgggcgaggagggcccgtttacaacattcaagtgccctaactgcttcagttgaggagggaggcgtacctggggaggaccccagctcacgccccgcgacacccgagctcgccgagcctgaatccgcacctacactccgcgtggagccaccttctccaccggaggggccaccaaacccaggccccgatggcgggaaacaggatggagaggccccacccgcgggcccatgcgctccagctaccgacaaggccgaggaagtggtctgcgcaccagaggacgtcgctagcccctttcccaccgctatccccgagggcgataccaccccacctgaaaccgacccagctgctacctccgaagcaccgtctgctcgcgatggcccggagaggagcgtgccaaaagaggcagaaccaaccccccccgtcctgcccgacgaagagaaaggaccgcccggccctgcacccgagcctgaaagggaagccgagacggaacccgaaagaggggctggcacagaaccggaacggatcggcaccgagccgtctaccgcgcccgctccttctccgccagcgccgaaatcgtgcctaaagcacagacccgctgcggcatcagagggtcccgccgcttcaccaccattagctgcagcagaatctccacccgttgagcctgggccaggttctctggacgccgaggcggccgcaccagaacgccccaaagctgaacgagccgaagcacctcccgcaggagcggagcgcgctgctcccgaaaggaaagctgagcgaggaggcgcagaactgagaggcgctaaaaagttctccgtcagttcctgccgagccagaccacggcccggggtctcaaggccactcgaacgggcaagtggtcgacttccattggcgaggtctggccccgtgtggagatccgaggccgccttggacgatctgcaggggctgcccgaaccacagcacgccaaaccaggcccaaggaaactcgccgagagagggccgcaagatagtggggaccgcgctgccagcccagcgggaccccgaaaaagtccccaggaagccgccgccgcacccggaactcgtgagccttgtcctgctgctcaggagccggcaccttcggaagatcggaatcccttccctgtgaaactgagatcaacgtctctgagtctaaagtaccgcgacggggcttcccaagaagtgaaaggagtcaagcggtactctgccgaagtcagactggagaggtcacttaccgtacttccgaaggaggagaagtgtcctcttggaactgctccagccctccgcggcaccagggctccatccgaccagggaaaaggcaaggcgagacccccggagcccctgagctccaaacctccactgccccgcaaacccctactgcaaagctttacattgccccaccaacctgcccctcctgacgccggaccaggcgaacgagaaccccgaaaggaaccccggacggccgagaaacgccccttgaggaggggggccgagaaatcactaccaccagctgccacgggacctggagccgatggtcagccagcgccgccttggatcacagtcacaaggcaaaaaaggcgtggcactctagaccaaccccctaaccaggaagacaagcctggtgccagaaccttaaaaagcgagcctggaaagcaggcaaaggtcccagagaggggccaggaaccagttaagcaggcagattttgtgagaagtaagagctttttgattacaccagtgaagccagccgtcgatagaaaacagggcgctaaactgaacttcaaggaggggctgcagcggggtatttctctgtcccaccaaaatctggctcagtctgcggtgatgatggagaaggagctgcatcaacttaaacgtgccagttatgctagcactgatcagccatcgtggatggaactggctcgcaagaaatcccaggcctggtccgatatgccgcagatcattaaatag

SEQ ID NO: 278643 - DNA, 2889 bp, Artificial Sequence
  derived and/or modified sequence
atgatctctaccagggtgatggacattaagttgagagaggctgcagagggactcggagaggattccacgggtaaaaaaaagtccaaatttaaaactttcaaaaagttcttcgggaaaaagaagagaaaggagtctccgtcatctactggcagctctacttggaagcagagtcagacccggaacgaagtcatagccatagaaagcggccctgtggggtacgattccgaagatgagcttgaggaaagcagaggcaccctggggtctcgcgcactgtcacatgatagcatttttattccggaatctggccaggatgccacccgtccagttagggtgttcagtcaggagaatgtctgcgatcgtataaaggcactccagctgaagatccagtgcaatgtcaagatgggccctccgcctcctcccggagggctccccgcaaagaggggagaggacgccggaatgagtagtgaagacgatgggttgccccgtagcccccctgagatgtcactcttgcatgacgtaggccctgggaccacgatcaaggtgagtgtggtaagtcctgatcacgtgagcgacagtactgtgagcgcgagaatatcggacaactctctcgcccctgttgctgatttcagttatcctgccgaatcgtcttcttgtctggacaactccgccgcaaagcataagttacaggtgaagcccaggaatcagaggagttcaaagatgcggaggctcagcagccgggctcaaagtgaatctctgtcagacctgacctgcactccagaagaagaagagaacgaggaaaagcctcttctggaggtaagtcccgaagaacgacccagttctggtcagcaggacgtagccccagaccgtggccctgaacccggtcctcctgcccctctgcctcccccagggggagccagggcccgaagggcgcgactccagcacagctccgcactgactgcttctgtagaggagggcggagtgcccggtgaggacccttctagtcggccagccacccctgagctggccgaacctgagtctgcgccaactctgagagtcgaacccccaagcccacctgaaggcccacccaatcccggtcccgacggcggaaaacaagacggagaggctccacccgctgggccttgcgctcctgccacggacaaggccgaggaagtcgtgtgtgcccctgaagatgtcgcatctccatttcccacagccattcccgaaggtgatacgacgccccctgaaactgacccagccgctacgtccgaggccccatccgccagagacgggccagaacgctccgtccccaaagaggctgagcccacacctccagtgctcccagacgaagagaaggggccacccggaccggctcccgagccggagagggaggcggagacagaaccggagcggggagctggtaccgagcccgagcgaatcggtactgagccctcaactgcacctgccccaagtccccctgcacctaagagttgcctgaaacaccgcccagcagcagcctctgagggcccagccgcttcgccacccctggctgcagcagagtctccaccagtcgagcctggccctggatccctagacgctgaggccgcagctcccgaacgaccaaaagcggagcgggctgaggcccctcctgcaggagctgagagagcggctcctgaaagaaaggctgagagaggcggtgcagagctacgtggggctaagaagttctccgtgagtagctgccgggctcgaccacgcccaggcgttagtaggccactggagcgggcttcaggcagattgccacttgcgagatctgggccagtttggagaagtgaggcagcgctggatgacctgcagggcctgcctgaaccccaacacgcgaaaccagggcctcgtaagctggccgaacggggaccgcaggatagtggggacagggctgcgtcaccagccggaccgagaaaatctccccaagaggctgccgctgcgccaggaactagggagccatgcccagccgctcaggagccagcaccttctgaagaccgcaatcctttccccgtgaaacttagatccactagtttatcgctgaagtatcgggatggggctagtcaagaggttaaaggagtcaagcgctactctgccgaagttcgtctggaacggtctctcaccgttctgccaaaagaggagaaatgtcctctggggactgctcctgcactaagaggaacaagggcacccagcgatcaggggaagggtaaagcgaggccgcctgagccactctcctctaagccccctctgccgaggaagcctctactgcagagcttcactctgccgcatcagcccgcaccacctgacgctggacccggtgagcgagagcccagaaaagaacccagaaccgccgaaaagcgccctctgaggcgcggtgcagaaaagagcctccccccagctgccacaggacctggtgccgacggccagcccgcaccaccatggattactgtgactcggcagaagcgtagaggcacactggaccagccacctaaccaggaggataagccaggtgcgcgaaccctgaagagcgagcccggtaaacaggcgaaggtacccgagcgaggtcaggaaccagtcaagcaagccgacttcgtgcggtcaaaaagctttcttatcactcctgtgaaaccggctgtagaccgcaagcagggagcaaaattgaacttcaaagaaggtctgcaacggggaattagcctcagtcaccaaaacctggcacagagtgccgtcatgatggagaaggaactgcatcagttgaagagagccagctatgcttctaccgaccaaccctcttggatggagctcgctcggaagaaaagtcaggcatggagcgatatgccacaaataataaagtag

SEQ ID NO: 278644 - protein, 889 aa, Artificial Sequence
  derived and/or modified sequence
MYAYGFVGRCAPFPAEEGRTFDLSEELGRSVTREGTGTTRLNSEPVPLLCLPLLNCSRKNCIENLMDEDEKDRAKRASRNKSEKKRRDQFNVLIKELSSMLPGNTRKMDKTTVLEKVIGFLQKHNEVSAQTEICDIQQDWKPSFLSNEEFTQLMLEALDGFIIAVTTDGSIIYVSDSITPLLGHLPSDVMDQNLLNFLPEQEHSEVYKILSSHMLVTDSPSPEYLKSDSDLEFYCHLLRGSLNPKEFPTYEYIKFVGNFRSYNNVPSPSCNGFDNTLSRPCRVPLGKEVCFIATVRLATPQFLKEMCIVDEPLEEFTSRHSLEWKFLFLDHRAPPIIGYLPFEVLGTSGYDYYHIDDLELLARCHQHLMQFGKGKSCCYRFLTKGQQWIWLQTHYYITYHQWNSKPEFIVCTHSVVSYADVRVERRQELALEDPPSEALHSSALKDKGSSLEPRQHFNTLDVGASGLNTSHSPSASSRSSHKSSHTAMSEPTSTPTKLMAEASTPALPRSATLPQELPVPGLSQAATMPAPLPSPSSCDLTQQLLPQTVLQSTPAPMAQFSAQFSMFQTIKDQLEQRTRILQANIRWQQEELHKIQEQLCLVQDSNVQMFLQQPAVSLSFSSTQRPEAQQQLQQRSAAVTQPQLGAGPQLPGQISSAQVTSQHLLRESSVISTQGPKPMRSSQLMQSSGRSGSSLVSPFSSATAALPPSLNLTTPASTSQDASQCQPSPDFSHDRQLRLLLSQPIQPMMPGSCDARQPSEVSRTGRQVKYAQSQTVFQNPDAHPANSSSAPMPVLLMGQAVLHPSFPASQPSPLQPAQARQQPPQHYLQVQAPTSLHSEQQDSLLLSTYSQQPGTLGYPQPPPAQPQPLRPPRRVSSLSESSGLQQPPR

SEQ ID NO: 278645 - DNA, 2670 bp, Artificial Sequence
  derived and/or modified sequence
atgtatgcatatggattcgtgggccggtgtgccccgttccccgccgaggagggacggacgtttgatctttcagaggaattgggccgttcggtgacccgcgaggggacagggactactcgattaaattccgagccggttccgcttctgtgtttgccccttctgaactgctcccggaagaactgcatcgagaatctaatggatgaagacgagaaagatagggcaaaaagggcctcaagaaataagtctgaaaagaagcgaagggatcagttcaacgtactgatcaaagaattgtccagtatgttacccggaaacacaaggaagatggacaaaaccactgtcctggaaaaggtgatcggtttcctgcagaaacacaacgaggttagcgctcagaccgagatttgtgatatccagcaggattggaagccgtcctttctgtcaaatgaggaattcacacagttaatgctcgaagcgctcgacgggtttatcattgccgtcaccacagatggaagtataatttacgtatctgactccatcaccccgcttctaggacatctgcccagtgacgtgatggaccaaaatcttctcaacttcctcccagaacaggagcactccgaagtgtataagatacttagctcacacatgcttgtcaccgatagtccttcccccgagtatctcaagagcgactccgacttggaattttactgccacctgctgcgcggttcgctcaacccgaaagagttccctacatacgagtacatcaagtttgtagggaactttaggtcttacaataatgtgccatccccaagctgcaacgggttcgacaacactctcagccggccttgcagggttcccctcggtaaagaagtgtgctttattgcaaccgtacggctggcaactccccagttcctgaaggaaatgtgcattgtggatgaaccacttgaggaatttacctcccgtcatagcttggaatggaagtttttgttcctggatcatagagcaccgccgattattggatacctgcctttcgaagtgctgggcactagcggttatgactattatcacattgatgacctggagctcctggctagatgtcaccagcatctcatgcagtttggtaagggcaaatcgtgctgctatcgctttctgaccaagggccagcagtggatttggctccaaactcattactacatcacgtaccaccagtggaatagcaaacctgagtttatcgtttgtacccacagtgtggttagctatgccgatgtccgtgtcgagcgtcgtcaggaactggcccttgaggatccaccttctgaagccttacactctagcgcgctgaaggacaagggctccagtctggagcctcgccagcactttaacaccttggacgtcggggcgtccggattgaatacaagccattcccccagcgcgtcatccagatccagtcacaagagcagtcacacagctatgagcgaaccaactagtacacccacaaagctgatggccgaggctagtactcccgcgctgcccagaagcgccaccttaccgcaagaattaccagtacccgggctcagccaggccgccacaatgcccgcaccattgccatccccctccagttgcgacttgactcagcagttactgccgcagacagtactgcagagcaccccagcccctatggcccagttctcagcgcagtttagcatgttccagaccataaaggatcagctggaacaaagaactaggattttgcaggcaaatattaggtggcagcaggaggaacttcataagattcaagagcagctgtgtctggtccaggactccaacgtgcaaatgttcctgcaacagcctgccgtatcactgtccttttccagtacacaacgtcccgaggctcagcagcagttgcaacaaaggtcagcagcggtgactcaacctcagttgggcgcaggcccccagttgccaggacagatctcttcagcccaagtgacatcccagcatctcttaagggagtccagtgtgatttcaacccagggccctaagcctatgcggtcgagtcagcttatgcagtcctctggacgctcaggcagtagcttggtatcaccattcagttccgcaaccgcggcattgccaccctccctgaatcttacaactcctgcatcgacgagccaggatgcaagccaatgccaaccttcccctgatttttcccacgacagacaactgagactactcttgtctcaaccaatacagcccatgatgccaggtagctgtgatgcacgccaaccctccgaggtgagccggacaggaaggcaggtgaagtatgcgcagtctcagacagtcttccagaaccctgatgctcacccggccaatagctcctcggccccaatgccagtgcttttaatgggacaggctgttctgcaccctagtttcccagcctctcagcccagtcccctgcagcccgctcaagcccggcagcagcccccccagcactacttgcaggtgcaggctccgaccagcttgcacagcgaacagcaagactctctactcttgtcgacctacagccagcagcctggcacccttggctacccccaaccaccccccgcacagcctcagccattgcgcccccccagacgggtgagctccctttccgaaagtagtggattgcaacagcctccccggtag

SEQ ID NO: 278646 - DNA, 2670 bp, Artificial Sequence
  derived and/or modified sequence
atgtatgcctacggctttgtgggccgctgtgcccccttccctgctgaggagggccgcacctttgacctgtctgaggagctgggccgctctgtgacccgggagggcaccggcaccacccggctgaacagcgagcctgtgcccctgctgtgcctgcccctgctgaactgcagcaggaagaactgcatcgagaacctgatggatgaagatgagaaggaccgggccaagagggccagcaggaacaagtctgagaagaagaggcgggaccagttcaacgtgctgatcaaggagctgagctccatgctgcccggcaacaccaggaagatggacaagaccaccgtgctggagaaggtgattggcttcctgcagaagcacaatgaggtgtctgcccagacagagatctgtgacatccagcaggactggaagcccagcttcctgagcaatgaggagttcacccagctgatgctggaggccctggatggcttcatcatcgctgtgaccacagatggcagcatcatctacgtgtctgacagcatcacccccctgctgggccacctgcccagtgatgtgatggaccagaacctgctgaacttcctgcctgagcaggagcacagcgaggtgtacaagatcctgagcagccacatgctggtgacagacagccccagccctgagtacctgaagagtgacagcgacctggagttctactgccacctgctgcggggcagcctgaaccccaaggagttccccacctatgagtacatcaagtttgtgggcaacttccgcagctacaacaacgtgcccagccccagctgcaatggatttgacaacaccctgagccggccctgccgggtgcccctgggcaaggaggtgtgcttcatcgccaccgtgcggctggccaccccccagttcctgaaggagatgtgcatcgtggatgagcccctggaggagttcaccagccgccacagcctggagtggaagttcctgttcctggaccaccgggccccacccatcatcggctacctgccctttgaggtgctgggcaccagcggctatgactactaccacattgatgacctggagctgctggcccgctgccaccagcacctgatgcagtttgggaagggcaagagctgctgctaccgcttcctgaccaagggccagcagtggatctggctgcagacccactactacatcacctaccaccagtggaacagcaagccagagttcatcgtgtgcacccacagcgtggtgtcctatgcagatgtgcgggtggagcggcggcaggagctggccctggaggacccccccagcgaggccctgcacagcagcgccctgaaggacaagggcagcagcctggagccccggcagcacttcaacaccctggatgtgggcgccagcggcctgaacaccagccacagccccagcgccagcagccgcagcagccacaagagcagccacacagccatgtctgagcccaccagcacccccaccaagctgatggccgaggccagcaccccagccctgcccaggtctgccaccctgccccaggagctgcctgtgcccggcctgagccaggccgccaccatgcctgcccccctgcccagccccagcagctgtgacctgacccagcagctgctgccccagacagtgctgcagagcaccccagcccccatggcccagttcagcgcccagttctccatgttccagaccatcaaggaccagctggagcagaggacccgcatcctgcaggccaacatccgctggcagcaggaggagctgcacaagatccaggagcagctgtgcctggtgcaggacagcaatgtgcagatgttcctgcagcagcctgctgtgtccctgtccttcagcagcacccagaggcctgaggcccagcagcagctgcagcagaggtctgctgctgtgacccagccccagctgggcgccggcccccagctgcccggccagatcagcagcgcccaggtgaccagccagcacctgctgcgggagagcagcgtcatcagcacccagggccccaagcccatgaggagcagccagctgatgcagagcagcggccgcagcggcagcagcctggtgagccccttcagcagcgccacagctgccctgccccccagcctgaacctgaccaccccagccagcaccagccaggatgccagccagtgccagcccagcccagacttcagccatgaccggcagctgcggctgctgctgagccagcccatccagcccatgatgcctggcagctgtgatgcccggcagcccagcgaggtgtccaggacaggccggcaggtgaagtatgcccagagccagacagtgttccagaacccagatgcccacccagccaacagcagcagcgcccccatgcctgtgctgctgatgggccaggccgtgctgcaccccagcttccctgccagccagcccagccccctgcagcctgcccaggcccggcagcagcccccccagcactacctgcaggtgcaggcccccaccagcctgcacagcgagcagcaggacagcctgctgctgagcacctacagccagcagcccggcaccctgggctacccccagcccccaccagcccagccccagcccctgcggcccccaagaagagtgagcagcctgtctgagagcagcggcctgcagcagcccccaagatag

SEQ ID NO: 278647 - DNA, 2670 bp, Artificial Sequence
  derived and/or modified sequence
atgtacgcctacggcttcgtgggccggtgcgcccccttccccgccgaggaagggcgcacatttgacctttctgaagagctgggtagatcagtgactcgggaggggactggtacaacccgactgaattctgagcctgtcccactactttgcctcccactgctaaattgttcccgcaagaactgcattgagaatctaatggacgaagacgaaaaagatcgcgccaagagggcatcgagaaacaaatcggaaaagaagaggcgggaccagtttaatgttctgattaaggagctgagtagcatgcttcctggcaacacaaggaagatggataagaccaccgttcttgagaaagttattggctttcttcagaagcataatgaagtctccgcccaaacagaaatctgcgacatacaacaggattggaaacctagctttctcagtaacgaagagtttacacagctgatgttagaggccttggatggcttcatcattgctgtgactacggatggctccatcatttatgttagcgactctattacccctttactgggccacctccccagcgatgtgatggatcagaatttacttaattttctgcccgagcaggaacactcagaagtctataagatcctgtcctcacacatgctcgtgaccgatagccccagcccagagtaccttaaaagcgattccgatctagagttttattgccacctgctcagggggtcactgaaccccaaagagtttccgacgtacgagtacattaagtttgtggggaacttcaggtcttataacaatgtaccgtctccttcttgtaacggctttgataacaccctgtcacgcccttgccgcgtaccgctgggaaaagaggtatgtttcatcgcgaccgtgcgcctcgctacaccccagtttcttaaagaaatgtgtattgtggacgagcccctagaagagtttacaagtcgacactctctggagtggaagtttctttttctggatcaccgggcgcccccaatcataggatacctgccttttgaagtcctgggtacttccggctacgattactatcatatagatgacctcgagctactcgcgcggtgtcaccagcatctcatgcagtttggcaaggggaaatcatgttgttatagatttttaacaaagggacagcagtggatttggctgcagacacactactacataacttaccaccaatggaattctaagcctgaattcatcgtctgcacccattccgtggtgagctatgcggatgttcgtgtggagaggcggcaagaactggctctcgaagatcccccgagcgaagcactacattcaagtgcattaaaagacaaggggagttccctggagccacgccaacatttcaacacattggatgttggagcgtccggcctcaacacatcgcatagtccatccgcatccagtcgatctagccacaagagctcccacaccgcaatgagtgaacctacatcgaccccaactaagctgatggctgaggcctccacgcctgctctcccccgctcggccactctgccacaagagttgcccgtacccggattatcccaggctgcgaccatgcctgccccactgccctccccgagttcctgcgatctgactcagcagctgctgcctcagaccgtattgcagtcaacacctgctccaatggctcagttcagcgcgcagttctccatgtttcagaccatcaaagatcagttagaacaacgcacacggattcttcaggccaacatcaggtggcaacaagaagaattgcacaaaatccaggaacagctgtgccttgtgcaggattctaatgtgcaaatgttcttacagcaacctgctgtgagtctcagtttttcatccacccagaggccggaggcacagcaacagcttcagcagaggtcggctgcggtgactcagccccaactgggcgccggacctcagctgcctgggcaaatctcttctgcgcaagtgacctcccagcacctcttaagagaaagcagcgtcatctcaacccagggcccaaagccgatgaggtcatcccagctgatgcaatcatccggccggagcggatcatctctcgtgagcccatttagcagcgccacagcagccctgcctccatcccttaatcttaccacccccgccagcacaagccaggacgcgtcacaatgtcagcctagtcctgacttttcccatgacaggcagctccggctgctgctgagccagcctatccagcccatgatgccaggatcttgcgatgcccgtcagccgtctgaggtatcacgaacaggacgccaagtgaaatatgcacaaagccagaccgttttccagaaccctgatgcacacccagccaattcttcatccgccccaatgccagtgttactcatgggccaagctgtactgcatccaagtttcccagcatcacagccttccccattacaacccgcacaggcacgtcaacagcctccacagcactatctccaggtgcaggcccctacctccctgcactctgagcagcaggactcactcctgctaagcacctattcccaacagccaggtactctcggctatccgcagccaccacctgctcagcctcagcctctgcgacccccccgtcgagtttcttcactgtctgagtcctcaggcctccaacagccacccagatag

SEQ ID NO: 278648 - DNA, 4007 bp, Artificial Sequence
  derived and/or modified sequence
tttgccgcgcgagcagccggcctctcgcaggagccgagggacccgcgcggctgcggcccaggagcggcggccgcggagcccggagacccgcagccgcggcggcggcggcggcggcggcagcagctagagcagcgcctcccgccgccgcccgggaggagctcgccgcgcccgctcgccgcctcgtctcccagcggcggcgggaggcgcgtctccccggcccagtccgcgcccggccccgcggggccgctccggcccgctccgaggaaaaactgcatagaaaatctaatggatgaagatgagaaagacagagccaagagagcttctcgaaacaagtctgagaagaagcgtcgggaccagttcaatgttctcatcaaagagctcagttccatgctccctggcaacacgcggaaaatggacaaaaccaccgtgttggaaaaggtcatcggatttttgcagaaacacaatgaagtctcagcgcaaacggaaatctgtgacattcagcaagactggaagccttcattcctcagtaatgaagaattcacccagctgatgttggaggcattagatggcttcattatcgcagtgacaacagacggcagcatcatctatgtctctgacagtatcacgcctctccttgggcatttaccgtcggatgtcatggatcagaatttgttaaatttcctcccagaacaagaacattcagaagtttataaaatcctttcttcccatatgcttgtgacggattccccctccccagaatacttaaaatctgacagcgatttagagttttattgccatcttctcagaggcagcttgaacccaaaggaatttccaacttatgaatacataaaatttgtaggaaattttcgctcttacaacaatgtgcctagcccctcctgtaatggttttgacaacaccctttcaagaccttgccgggtgccactaggaaaggaggtttgcttcattgccaccgttcgtctggcaacaccacaattcttaaaggaaatgtgcatagttgacgaacctttagaggaattcacttcaaggcatagcttggaatggaaatttttatttctggatcacagagcacctccaatcataggatacctgccttttgaagtgctgggaacctcaggctatgactactaccacattgatgacctggagctcctggccaggtgtcaccagcacctgatgcagtttggcaaagggaagtcgtgttgctaccggtttctgaccaaaggtcagcagtggatctggctgcagactcactactacatcacctaccatcagtggaactccaagcccgagttcatcgtgtgcacacactcggtggtcagttacgcagatgtccgggtggaaaggaggcaggagctggctctggaagacccgccatccgaggccctccactcctcagcactaaaggacaagggctcaagcctggaacctcggcagcactttaacacactcgacgtgggtgcctcgggccttaataccagtcattcgccatcggcgtcctcaagaagttcccacaaatcctcgcacacagccatgtcagaacccacctccactcccaccaagctgatggcagaggccagcaccccggctttgccaagatcagccaccctgccccaagagttacctgtccccgggctcagccaggcagccaccatgccggcccctctgccttccccatcgtcctgcgacctcacacagcagctcctgcctcagaccgttctgcagagcacgcccgctcccatggcacagttttcggcacagttcagcatgttccagaccatcaaagaccagctagagcagcggacgcggatcctgcaggccaatatccggtggcaacaggaagagctccacaagatccaggagcagctctgcctggtccaggactccaacgtccagatgttcctgcagcagccagctgtatccctgagcttcagcagcacccagcgacctgaggctcagcagcagctacagcaaaggtcagctgcagtgactcagccccagctcggggcgggcccccaacttccagggcagatctcctctgcccaggtcacaagccagcacctgctcagagaatcaagtgtgatatcaacccagggtccaaagccaatgagaagctcacagctaatgcagagcagcggccgctctggaagcagcctagtgtccccgttcagcagcgccacagctgcgctcccgccaagtctgaatctgaccacacctgcttccacctcccaggatgccagccagtgccagcccagcccagacttcagccatgatcggcagctcaggctgttgctgagccagcccatccagcccatgatgcccgggtcctgtgacgcaaggcagccctcggaagtcagcaggacgggacggcaagtcaagtacgcccagagccagaccgtgtttcaaaatccagacgcacaccccgccaacagcagcagcgccccgatgcccgtcctgctgatggggcaggcggtgctccaccccagcttccctgcctcccaaccatcgcccctgcagcctgcacaggcccggcagcagccaccgcagcactacctgcaggtacaggcaccaacctctttgcacagtgagcagcaggactcgctacttctctccacctactcacaacagccagggaccctgggctacccccaaccacccccagcacagccccagcccctacgtcctccccgaagggtcagcagtctgtctgagtcgtcaggcctccagcagccgccccgataatgccccggcactgaagtcgggacacaatcagctttaaccaatggatgaggggggtggccacaggagatggggagaggagtctgaactaaacccctggcttttgtgcacactgcatacgtttcagaactcctggatggtaaccatctctggagtgcagcgcttgctgcagtggaaatgatcaggaatactgaccgtgtttctcttgcctccgaggttcttgggcacactctatagccatactggacaggaaccaggtgccccgtgtaggcatcgtcggtcggtttgccgtcagagatggcgcatctcgctgcatcccccgagagtacaccggttgctctagccacctgcggcccgcccatctgcgctagctggccttcacgctcttgatcgtctttcctttgtattggagaaggactgggtcagagatctgttggagagagagaataaagagattatttttcattatttttaaatggttgtttttgttttaatttgcacagctacacagaggaaataacttaggcactttctgttttttttaaaaaaataataaggtctcatggcttcatttagagaccacagtaacaacagcagcccaccaatcagagaagctggttgttattaaccaagctacagattcacactttctggcctaaaccctaatgggatgaggcttttcaccccaggccatgctggtggtgattttttagcccctaaataaaacactggactatttcctgtttacttcattgattgcaactacaaaggtggactcaaagcaaagcacaatcatgccagccaacattccagaattctgctgagaactccaagtctgtgaggggagaggttttacaagccagacaggcctgggggactgcagtccccaaggagaccctgccacatgctggccctttgagtgagaatgctgcatctttctacatatcttcatgagaatactgagaattggattttccttttcaaaatgcactttgctttttttgtatgttttgttatgttgagatgtttctaaagaaaagattttatgtaattataagatgaagcgtagtgaattgtacagctgttgtaataatgacctatttctatataaaataaaattgtatggcttatgtgtaaattattttgtatctgagataccagttccttttcccaaatataaaagtataaaagttttcttgtgtttttctgtgagtgaaaattttgtaataaattaacaaatttgtacaatt

SEQ ID NO: 278649 - DNA, 2725 bp, Artificial Sequence
  derived and/or modified sequence
ggatgtatgcgtatggttttgttgggagatgtgcccctttcccagccgaggagggacgcacctttgacctttctgaagagctgggcaggtcggtaaccagggaagggacaggcaccacccggctaaattcagaaccagtcccgctcctctgcttgccactccttaattgctcaaggaaaaactgcatagaaaatctaatggatgaagatgagaaagacagagccaagagagcttctcgaaacaagtctgagaagaagcgtcgggaccagttcaatgttctcatcaaagagctcagttccatgctccctggcaacacgcggaaaatggacaaaaccaccgtgttggaaaaggtcatcggatttttgcagaaacacaatgaagtctcagcgcaaacggaaatctgtgacattcagcaagactggaagccttcattcctcagtaatgaagaattcacccagctgatgttggaggcattagatggcttcattatcgcagtgacaacagacggcagcatcatctatgtctctgacagtatcacgcctctccttgggcatttaccgtcggatgtcatggatcagaatttgttaaatttcctcccagaacaagaacattcagaagtttataaaatcctttcttcccatatgcttgtgacggattccccctccccagaatacttaaaatctgacagcgatttagagttttattgccatcttctcagaggcagcttgaacccaaaggaatttccaacttatgaatacataaaatttgtaggaaattttcgctcttacaacaatgtgcctagcccctcctgtaatggttttgacaacaccctttcaagaccttgccgggtgccactaggaaaggaggtttgcttcattgccaccgttcgtctggcaacaccacaattcttaaaggaaatgtgcatagttgacgaacctttagaggaattcacttcaaggcatagcttggaatggaaatttttatttctggatcacagagcacctccaatcataggatacctgccttttgaagtgctgggaacctcaggctatgactactaccacattgatgacctggagctcctggccaggtgtcaccagcacctgatgcagtttggcaaagggaagtcgtgttgctaccggtttctgaccaaaggtcagcagtggatctggctgcagactcactactacatcacctaccatcagtggaactccaagcccgagttcatcgtgtgcacacactcggtggtcagttacgcagatgtccgggtggaaaggaggcaggagctggctctggaagacccgccatccgaggccctccactcctcagcactaaaggacaagggctcaagcctggaacctcggcagcactttaacacactcgacgtgggtgcctcgggccttaataccagtcattcgccatcggcgtcctcaagaagttcccacaaatcctcgcacacagccatgtcagaacccacctccactcccaccaagctgatggcagaggccagcaccccggctttgccaagatcagccaccctgccccaagagttacctgtccccgggctcagccaggcagccaccatgccggcccctctgccttccccatcgtcctgcgacctcacacagcagctcctgcctcagaccgttctgcagagcacgcccgctcccatggcacagttttcggcacagttcagcatgttccagaccatcaaagaccagctagagcagcggacgcggatcctgcaggccaatatccggtggcaacaggaagagctccacaagatccaggagcagctctgcctggtccaggactccaacgtccagatgttcctgcagcagccagctgtatccctgagcttcagcagcacccagcgacctgaggctcagcagcagctacagcaaaggtcagctgcagtgactcagccccagctcggggcgggcccccaacttccagggcagatctcctctgcccaggtcacaagccagcacctgctcagagaatcaagtgtgatatcaacccagggtccaaagccaatgagaagctcacagctaatgcagagcagcggccgctctggaagcagcctagtgtccccgttcagcagcgccacagctgcgctcccgccaagtctgaatctgaccacacctgcttccacctcccaggatgccagccagtgccagcccagcccagacttcagccatgatcggcagctcaggctgttgctgagccagcccatccagcccatgatgcccgggtcctgtgacgcaaggcagccctcggaagtcagcaggacgggacggcaagtcaagtacgcccagagccagaccgtgtttcaaaatccagacgcacaccccgccaacagcagcagcgccccgatgcccgtcctgctgatggggcaggcggtgctccaccccagcttccctgcctcccaaccatcgcccctgcagcctgcacaggcccggcagcagccaccgcagcactacctgcaggtacaggcaccaacctctttgcacagtgagcagcaggactcgctacttctctccacctactcacaacagccagggaccctgggctacccccaaccacccccagcacagccccagcccctacgtcctccccgaagggtcagcagtctgtctgagtcgtcaggcctccagcagccgccccgataatgccccggcactgaagtcgggacacaatcagctttaaccaatggatgaggggg

SEQ ID NO: 278650 - DNA, 2670 bp, Artificial Sequence
  derived and/or modified sequence
atgtacgcatacgggttcgtgggtagatgcgcacccttcccagccgaagaaggcaggaccttcgatttatccgaggaattaggcagatcagtgacacgggagggtacaggtaccacccggcttaactctgagcctgtgcctctgctttgtctcccacttcttaactgttctcgtaaaaactgcatagagaacctgatggatgaagatgagaaagatcgcgcaaagcgggcttcccgcaacaagtctgagaagaagcggcgtgatcagttcaacgtgcttatcaaggaacttagtagcatgttaccaggtaacacccggaagatggacaaaacaacggtgctcgagaaagttattggctttctgcagaagcataacgaggtgtccgctcagaccgagatctgtgatattcagcaggactggaaaccctctttcctgagtaacgaggagttcacccagctgatgttagaggcgttagacggattcattattgctgtcactactgacggtagcatcatctacgtcagcgattcaattactccgttgcttggccacttaccttccgatgtgatggaccagaaccttttaaacttcctgccagaacaagagcatagtgaggtttacaagatcttgtcctctcacatgcttgtcaccgattccccgagcccagaatatctaaagtctgactccgacctagagttctactgtcacctgctccgtggcagcctgaacccaaaggagtttccaacttacgaatacataaaattcgttggtaatttcaggtcttataataacgtgccgtccccctcctgcaacggctttgataatactctttccaggccgtgtagggtcccactgggcaaggaagtttgcttcatcgctacagtgcggctggccaccccccagtttctgaaagagatgtgcattgtggatgagccgctggaagaattcacctcccgacactccctggaatggaagtttcttttcctagatcatagggcaccaccgattattggctacctgccctttgaagtcctgggaacatctggctatgactattatcatattgatgatctcgagctgctagctcgttgccaccagcatctaatgcagttcgggaaaggtaaatcttgttgttataggtttctgaccaagggccaacagtggatttggctgcagactcactattatattacctatcaccagtggaattccaagccagagtttatcgtctgtacccattccgtggtgtcttacgctgacgtgagagtggagaggagacaggagctggctttagaagacccgccaagcgaggctctgcactcctctgctcttaaggacaaggggtcctccctggagcctcggcaacacttcaacaccctcgacgtcggtgctagtggactaaacacttcgcattcccccagtgctagtagtcgctcatctcataaaagtagccacacggcaatgtccgaaccaacgtccacacccaccaagctgatggccgaggccagtactccggctctgccccgaagcgccacgctcccacaggagctaccagtccctggcctaagccaggccgctactatgcctgccccattacccagtcctagctcctgtgatctcacgcagcaactgctgccgcagacagtcctccaaagtactccggcaccgatggctcagtttagtgcacagttctccatgtttcagaccataaaggatcagctggaacagaggactcggatacttcaagccaatattcggtggcagcaggaagaactccacaaaatacaggaacagctttgcctcgtgcaagatagcaacgttcagatgtttctgcagcagcccgctgtctcgctgagcttcagtagtacccagcgcccagaggcccaacagcagctacagcagcgtagcgcagccgtcacacagcctcagctcggtgccggaccccagcttcccggtcagatcagttctgctcaggtgaccagtcaacatctcctgcgagaaagctcagtgatctccacgcagggtcccaagcctatgaggtcctctcaactgatgcagtcatccggacgaagcgggtcaagtctggtcagcccatttagttccgctactgcagccctcccgcctagcttgaatttgaccacacctgcgagcacaagccaagatgcatcccagtgccagccgagcccagatttttcacatgacagacagctgagacttttgctttctcaacccattcagccgatgatgcccggatcttgtgacgcaagacaaccgagcgaggttagtaggactggcagacaagtcaagtacgcccagtctcagacagtcttccagaatccggacgcccatcctgccaacagtagctccgctcctatgcctgtgctactaatgggccaagcagtcctccacccgtccttccctgctagccaaccctcgcctctgcaacccgcacaggccaggcagcagccaccccagcactatcttcaggtgcaggccccaaccagcctgcactcggaacagcaggactccttattgctaagtacctattctcagcaacccggaacactcgggtacccacagcccccacctgctcagccccagcccctccgacccccacgtagagtgtctagcttaagcgaaagctccggactacagcagccacctagatag

SEQ ID NO: 278651 - DNA, 2670 bp, Artificial Sequence
  derived and/or modified sequence
atgtacgcctacggcttcgtgggcagatgcgcccccttccccgccgaggagggcagaaccttcgacctgagcgaggagctgggcagaagcgtgaccagagagggcaccggcaccaccagactgaacagcgagcccgtgcccctgctgtgcctgcccctgctgaactgcagcagaaagaactgcatcgagaacctgatggacgaggacgagaaggacagagccaagagagccagcagaaacaagagcgagaagaagagaagagaccagttcaacgtgctgatcaaggagctgagcagcatgctgcccggcaacaccagaaagatggacaagaccaccgtgctggagaaggtgatcggcttcctgcagaagcacaacgaggtgagcgcccagaccgagatctgcgacatccagcaggactggaagcccagcttcctgagcaacgaggagttcacccagctgatgctggaggccctggacggcttcatcatcgccgtgaccaccgacggcagcatcatctacgtgagcgacagcatcacccccctgctgggccacctgcccagcgacgtgatggaccagaacctgctgaacttcctgcccgagcaggagcacagcgaggtgtacaagatcctgagcagccacatgctggtgaccgacagccccagccccgagtacctgaagagcgacagcgacctggagttctactgccacctgctgagaggcagcctgaaccccaaggagttccccacctacgagtacatcaagttcgtgggcaacttcagaagctacaacaacgtgcccagccccagctgcaacggcttcgacaacaccctgagcagaccctgcagagtgcccctgggcaaggaggtgtgcttcatcgccaccgtgagactggccaccccccagttcctgaaggagatgtgcatcgtggacgagcccctggaggagttcaccagcagacacagcctggagtggaagttcctgttcctggaccacagagccccccccatcatcggctacctgcccttcgaggtgctgggcaccagcggctacgactactaccacatcgacgacctggagctgctggccagatgccaccagcacctgatgcagttcggcaagggcaagagctgctgctacagattcctgaccaagggccagcagtggatctggctgcagacccactactacatcacctaccaccagtggaacagcaagcccgagttcatcgtgtgcacccacagcgtggtgagctacgccgacgtgagagtggagagaagacaggagctggccctggaggacccccccagcgaggccctgcacagcagcgccctgaaggacaagggcagcagcctggagcccagacagcacttcaacaccctggacgtgggcgccagcggcctgaacaccagccacagccccagcgccagcagcagaagcagccacaagagcagccacaccgccatgagcgagcccaccagcacccccaccaagctgatggccgaggccagcacccccgccctgcccagaagcgccaccctgccccaggagctgcccgtgcccggcctgagccaggccgccaccatgcccgcccccctgcccagccccagcagctgcgacctgacccagcagctgctgccccagaccgtgctgcagagcacccccgcccccatggcccagttcagcgcccagttcagcatgttccagaccatcaaggaccagctggagcagagaaccagaatcctgcaggccaacatcagatggcagcaggaggagctgcacaagatccaggagcagctgtgcctggtgcaggacagcaacgtgcagatgttcctgcagcagcccgccgtgagcctgagcttcagcagcacccagagacccgaggcccagcagcagctgcagcagagaagcgccgccgtgacccagccccagctgggcgccggcccccagctgcccggccagatcagcagcgcccaggtgaccagccagcacctgctgagagagagcagcgtgatcagcacccagggccccaagcccatgagaagcagccagctgatgcagagcagcggcagaagcggcagcagcctggtgagccccttcagcagcgccaccgccgccctgccccccagcctgaacctgaccacccccgccagcaccagccaggacgccagccagtgccagcccagccccgacttcagccacgacagacagctgagactgctgctgagccagcccatccagcccatgatgcccggcagctgcgacgccagacagcccagcgaggtgagcagaaccggcagacaggtgaagtacgcccagagccagaccgtgttccagaaccccgacgcccaccccgccaacagcagcagcgcccccatgcccgtgctgctgatgggccaggccgtgctgcaccccagcttccccgccagccagcccagccccctgcagcccgcccaggccagacagcagcccccccagcactacctgcaggtgcaggcccccaccagcctgcacagcgagcagcaggacagcctgctgctgagcacctacagccagcagcccggcaccctgggctacccccagcccccccccgcccagccccagcccctgagaccccccagaagagtgagcagcctgagcgagagcagcggcctgcagcagccccccagatag

SEQ ID NO: 278652 - protein, 141 aa, Artificial Sequence
  derived and/or modified sequence
MPLYDNQKARSVMNECERHVIFARTDADAPPPPEDWEEHVNRTGWTMAQNKLFNKILKALQSDRLARLANEGACNEPVLRRVAVDKCARRVRQALASVSWDTKLIQWLHTTLVETLSLPMLAAYLDALQTLKGKVILTFCG

SEQ ID NO: 278653 - protein, 764 aa, Artificial Sequence
  derived and/or modified sequence
MTLPHCHRLMLTHHLFWTGWTMAQNKLFNKILKALQSDRLARLANEGACNEPVLRRVAVDKCARRVRQALASVSWDTKLIQWLHTTLVETLSLPMLAAYLDALQTLKGKIPTLIDRMLVSSNTKTGAAGAEALSLLLKRPWDPAVGVLSHNKPSKLPGSPLILIASSGPSSSVFPTSRRHRFWQSQLSCLGKVIPVATHLLNNGSGVGVLQCLEHMIGAVRSKVLEIHSHFPHKPIILIGWNTGALVACHVSVMEYVTAVVCLGFPLLTVDGPRGDVDDPLLDMKTPVLFVIGQNSLQCHPEAMEDFREKIRAENSLVVVGGADDNLRISKAKKKSEGLTQSMVDRCIQDEIVDFLTGVLTRAEGHMGSEPRDQDAEKKKKPRDVARRDLAFEVPERGSRPASPAAKLPASPSGSEDLSSVSSSPTSSPKTKVTTVTSAQKSSQIGSSQLLKRHVQRTEAVLTHKQAQVPISSEPPEEGEKEDLRVQLKRHHPSSPLPGSKTSKRPKIKVSLISQGDTAGGPCAPSQGSAPEGGKPITMTLGQASAGAKELTGLLTTAKSSSSEGGVSASPVPSVVSSSTAPSALHTLQSRLVATSPGSSLPGATSASSLLQGLSFSLQDISSKTSGLPANPSPGPAPQATSVKLPTPMQSLGAITTGTSTIVRTIPVATTLSSLGATPGGKPTAIHQLLTNGGLAKLASSLPGLAQISNQASGLKVPTTITLTLRGQPSRITTLSPMGSGAAPSEESSSQVLPSSSQRLPPAP

SEQ ID NO: 278654 - DNA, 2295 bp, Artificial Sequence
  derived and/or modified sequence
atgaccctgccccactgccacagactgatgctgacccaccacctgttctggaccggctggaccatggcccagaacaagctgttcaacaagatcctgaaggccctgcagagcgacagactggccagactggccaacgagggcgcctgcaacgagcccgtgctgagaagagtggccgtggacaagtgcgccagaagagtgagacaggccctggccagcgtgagctgggacaccaagctgatccagtggctgcacaccaccctggtggagaccctgagcctgcccatgctggccgcctacctggacgccctgcagaccctgaagggcaagatccccaccctgatcgacagaatgctggtgagcagcaacaccaagaccggcgccgccggcgccgaggccctgagcctgctgctgaagagaccctgggaccccgccgtgggcgtgctgagccacaacaagcccagcaagctgcccggcagccccctgatcctgatcgccagcagcggccccagcagcagcgtgttccccaccagcagaagacacagattctggcagagccagctgagctgcctgggcaaggtgatccccgtggccacccacctgctgaacaacggcagcggcgtgggcgtgctgcagtgcctggagcacatgatcggcgccgtgagaagcaaggtgctggagatccacagccacttcccccacaagcccatcatcctgatcggctggaacaccggcgccctggtggcctgccacgtgagcgtgatggagtacgtgaccgccgtggtgtgcctgggcttccccctgctgaccgtggacggccccagaggcgacgtggacgaccccctgctggacatgaagacccccgtgctgttcgtgatcggccagaacagcctgcagtgccaccccgaggccatggaggacttcagagagaagatcagagccgagaacagcctggtggtggtgggcggcgccgacgacaacctgagaatcagcaaggccaagaagaagagcgagggcctgacccagagcatggtggacagatgcatccaggacgagatcgtggacttcctgaccggcgtgctgaccagagccgagggccacatgggcagcgagcccagagaccaggacgccgagaagaagaagaagcccagagacgtggccagaagagacctggccttcgaggtgcccgagagaggcagcagacccgccagccccgccgccaagctgcccgccagccccagcggcagcgaggacctgagcagcgtgagcagcagccccaccagcagccccaagaccaaggtgaccaccgtgaccagcgcccagaagagcagccagatcggcagcagccagctgctgaagagacacgtgcagagaaccgaggccgtgctgacccacaagcaggcccaggtgcccatcagcagcgagccccccgaggagggcgagaaggaggacctgagagtgcagctgaagagacaccaccccagcagccccctgcccggcagcaagaccagcaagagacccaagatcaaggtgagcctgatcagccagggcgacaccgccggcggcccctgcgcccccagccagggcagcgcccccgagggcggcaagcccatcaccatgaccctgggccaggccagcgccggcgccaaggagctgaccggcctgctgaccaccgccaagagcagcagcagcgagggcggcgtgagcgccagccccgtgcccagcgtggtgagcagcagcaccgcccccagcgccctgcacaccctgcagagcagactggtggccaccagccccggcagcagcctgcccggcgccaccagcgccagcagcctgctgcagggcctgagcttcagcctgcaggacatcagcagcaagaccagcggcctgcccgccaaccccagccccggccccgccccccaggccaccagcgtgaagctgcccacccccatgcagagcctgggcgccatcaccaccggcaccagcaccatcgtgagaaccatccccgtggccaccaccctgagcagcctgggcgccacccccggcggcaagcccaccgccatccaccagctgctgaccaacggcggcctggccaagctggccagcagcctgcccggcctggcccagatcagcaaccaggccagcggcctgaaggtgcccaccaccatcaccctgaccctgagaggccagcccagcagaatcaccaccctgagccccatgggcagcggcgccgcccccagcgaggagagcagcagccaggtgctgcccagcagcagccagagactgccccccgccccctag

SEQ ID NO: 278655 - DNA, 2295 bp, Artificial Sequence
  derived and/or modified sequence
atgaccctgccacactgtcacaggctcatgctgacacaccatttattttggacaggatggactatggcccagaataagcttttcaacaagatccttaaggccctccagtccgacaggctcgcgagattggctaacgagggggcgtgtaacgagcctgttctgaggcgcgtggcagtggataagtgtgccaggcgcgtgcgccaagccctagccagcgtttcctgggacaccaagcttattcaatggttgcatacaaccctggtggaaaccctgagtttgcctatgctcgccgcatacctggacgcactgcaaactctgaaagggaagatcccaacgctgatcgatcgcatgcttgtgtccagcaatacaaagaccggggccgccggtgccgaggcccttagtctacttcttaaaagaccgtgggaccctgccgttggcgtgttgtcccacaacaagcccagtaaactccccggaagtccacttatcctcattgcctcctcaggaccttctagcagcgtgttcccgacttctagaaggcacagattttggcagagtcagcttagttgtttggggaaggtcattcctgttgctacccatctgttaaataacggaagcggagtgggagtcttgcaatgtctcgaacatatgatcggtgcagtgaggagtaaggtcttggagattcacagtcatttcccccataaacctattatcttaattggctggaacactggtgcgttggtcgcatgccacgttagtgttatggagtacgttaccgccgtggtctgccttggctttcctctgctgacagtcgacggtcccagaggcgatgttgacgaccccttactggacatgaaaacacccgtgctctttgtgataggccagaacagcctgcagtgtcaccctgaggctatggaggatttcagagagaagatccgggcagagaattcattagtcgtggtcggcggagctgacgataatctgagaatttcaaaagccaagaagaagtccgagggactcacacagagcatggtggatagatgcatccaagacgagatagttgactttctgactggagtcttaacccgtgccgaaggacacatggggagtgagcctagagaccaggatgccgaaaaaaaaaaaaagccacgagatgtggcacggcgggatttagccttcgaggtgcccgagagggggagtcgccccgcttcgccagccgcgaaacttcccgcttcgccatctggaagcgaagacctgtcctctgtttccagttctccaacttcatcccccaaaaccaaggtcaccacagtgacctccgcccagaaaagcagccaaattggttcgtctcaactgctcaaacggcatgtgcagcggacagaagcagttttgacccacaagcaggctcaggtgccaatctcatccgaacctcctgaggagggggagaaggaggatctacgcgttcaactgaaacgccatcatccctcttcacccctgcctggaagtaagacctctaagcgccccaagatcaaagtaagcctaatcagccaaggcgacacagccggcggaccttgcgcacccagccaaggatcagccccagaggggggaaagccaatcacaatgactttaggccaggcctctgccggcgcaaaggagctaacgggcctccttaccaccgctaaaagcagcagcagcgagggaggcgtctcagcctcacccgtaccatctgttgttagctcatccacggcacctagtgccctgcatacactgcaatcccgcctggtggcaacttccccgggatcatccctccccggtgctacgtcagctagttccctgctgcagggcctgtctttcagtctgcaggacatctcatcgaagacttcaggactccctgccaatcctagtcctggaccagctccccaagcaacatccgtgaaactaccaacacctatgcaaagcctgggcgctatcaccactgggaccagtacgatcgtgagaacgattcccgtggccaccaccctttcatccttgggtgctacccctgggggcaagccgaccgctattcatcagctgctgacaaatggagggctggctaagctcgcctcctccctccctgggttagcgcagatcagtaatcaggctagtggtttgaaagtgccgactaccattactctgacccttcgcggacagccaagtagaatcacgaccctctcccccatgggatcaggcgcggccccctctgaagagtcctcatcccaagttcttcctagttcctctcaacgcttgccgcccgcaccttag

SEQ ID NO: 278656 - DNA, 2295 bp, Artificial Sequence
  derived and/or modified sequence
atgaccctgccccactgccaccggctgatgctgacccaccacctgttctggacaggctggaccatggcccagaacaagctgttcaacaagatcctgaaggccctgcagagcgaccggctggcccggctggccaatgaaggagcctgcaatgaacctgtgctgcggcgggtggccgtggacaagtgtgcccggcgggtgcggcaggccctggcctctgtgtcctgggacaccaagctgatccagtggctgcacaccaccctggtggagaccctgagcctgcccatgctggccgcctacctggatgccctgcagaccctgaagggcaagatccccaccctgattgacaggatgctggtgagcagcaacaccaagacaggagctgctggagctgaggccctgagcctgctgctgaagaggccctgggaccctgctgtgggcgtgctgagccacaacaagcccagcaagctgcccggcagccccctcatcctgattgccagcagcggccccagcagcagcgtcttccccaccagccgccgccaccgcttctggcagagccagctgagctgcctgggcaaggtgattcctgtggccacccacctgctgaacaatggaagtggagtgggcgtgctgcagtgcctggagcacatgattggagctgtgcgcagcaaggtgctggagatccacagccacttcccccacaagcccatcatcctgattggctggaacacaggagccctggtggcctgccacgtgtctgtgatggagtatgtgacagctgtggtgtgcctgggcttccccctgctgactgtggatggccccagaggagatgtggatgaccccctgctggacatgaagacccctgtgctcttcgtcatcggccagaacagcctgcagtgccaccctgaggccatggaggacttccgggagaagatccgggcagagaacagcctggtggtggtgggcggcgcagatgacaacctgcgcatcagcaaggccaagaagaagtctgagggcctgacccagagcatggtggaccgctgcatccaggatgagatcgtggacttcctgactggagtgctgaccagggctgagggccacatgggcagcgagccccgggaccaggatgctgagaagaagaagaagcccagagatgtggcccggcgggacctggcctttgaggtgcctgagcggggcagcaggcctgccagccctgctgccaagctgcctgccagccccagcggcagcgaggacctgagctctgtgagcagcagccccaccagcagccccaagaccaaggtgaccaccgtgaccagcgcccagaagagcagccagatcggcagcagccagctgctgaagagacatgtgcagaggacagaggccgtgctgacccacaagcaggcccaggtgcccatcagcagcgagcccccagaggagggggagaaggaggacctgcgggtgcagctgaagaggcaccaccccagcagccccctgcccggcagcaagaccagcaagaggcccaagatcaaggtgtccctcatcagccagggcgacacagctgggggcccctgtgcccccagccagggcagcgcccctgagggcggcaagcccatcaccatgaccctgggccaggccagcgctggggccaaggagctgaccggcctgctgaccacagccaagagcagcagcagcgagggcggcgtgtctgccagccctgtgcccagcgtggtgagcagcagcacagcccccagcgccctgcacaccctgcagagccggctggtggccaccagccctggcagcagcctgcccggggccaccagcgccagcagcctgctgcagggcctgtccttcagcctgcaggacatcagcagcaagaccagcggcctgcctgccaaccccagccctggccctgccccccaggccacctctgtgaagctgcccacccccatgcagagcctgggcgccatcaccaccggcaccagcaccatcgtgaggaccatccctgtggccaccaccctgagcagcctgggcgccaccccaggcggcaagcccacagccatccaccagctgctgaccaacggcggcctggccaagctggccagcagcctgcccggcctggcccagatcagcaaccaggccagcggcctgaaggtgcccaccaccatcaccctgaccctgcggggccagcccagccgcatcaccaccctgagccccatgggcagcggggccgcccccagcgaggagagcagcagccaggtgctgcccagcagcagccagaggctgcccccagccccctag

SEQ ID NO: 278657 - DNA, 771 bp, Artificial Sequence
  derived and/or modified sequence
ggccgtggccgagcgcgcggccgtaagaccgcgggtgactagcatgcagatacccatgctctgactttctgcccctccactgacatggcccaccggggtggggagagggacttccagacttcagctcgacgcatgggcacctcgctgctcttccagctttcagtgcatgaacgggagctggacctggtttttctggatcatagctatgccaagccttggagtgcccacccagatgccagtagtgcccgccccacccgcatgctctttgtcactccccggcggcagcacgaaagtaccattgaatcagacgtcccaatagatgtggagacggtcacatcaacgcctatgccactctatgacaatcagaaggcacgcagcgtgatgaatgagtgtgaacggcatgtcatctttgccaggactgatgcagatgcccctcctccaccagaggactgggaggagcatgtcaacaggactggctggacaatggcccagaacaagctattcaacaagatcctcaaagccctgcagtctgaccggcttgcccgcttggccaacgaaggggcttgtaatgagccagtgctgcgccgtgttgctgtggacaagtgtgcaaggagagtgcggcaggctctggcaagtgtgagctgggataccaagctgatccagtggctgcacaccacccttgtggagaccttgagtctgcccatgctggcagcctacctggatgctttgcagacgctgaaggggaaggtcattttgaccttttgtgggtag

SEQ ID NO: 278658 - DNA, 2000 bp, Artificial Sequence
  derived and/or modified sequence
ttttactcggtgcccgcagcgccggggcgtggaggcgttaacgcgcacgcgcttagggatccggccgtggccgagcgcgcggccgtaagaccgcgggtgactagcatgcagatacccatgctctgactttctgcccctccactgacatggcccaccggggtggggagagggacttccagacttcagctcgacgcatgggcacctcgctgctcttccagctttcagtgcatgaacgggagctggacctggtttttctggatcatagctatgccaagccttggagtgcccacccagatgccagtagtgcccgccccacccgcatgctctttgtcactccccggcggcagcacgaaagtaccattgaatcagacgtcccaatagatgtggagacggtcacatcaacgcctatgccactctatgacaatcagaaggcacgcagcgtgatgaatgagtgtgaacggcatgtcatctttgccaggactgatgcagatgcccctcctccaccagaggactgggaggagcatgtcaacaggactggctggacaatggcccagaacaagctattcaacaagatcctcaaagccctgcagtctgaccggcttgcccgcttggccaacgaaggggcttgtaatgagccagtgctgcgccgtgttgctgtggacaagtgtgcaaggagagtgcggcaggctctggcaagtgtgagctgggataccaagctgatccagtggctgcacaccacccttgtggagaccttgagtctgcccatgctggcagcctacctggatgctttgcagacgctgaaggggaagatcccaaccttgattgaccggatgcttgtgtcatccaacacaaagactggggctgcaggagctgaggccttgtctctcctactgaagaggccctgggaccctgctgtgggtgtgctttctcataacaaaccaagcaaactccctggctctccgctgattctcatcgcctcctctggtccctccagctctgtgtttcccacttcacgccgccaccgcttctggcaatctcagctgtcctgcttgggcaaggtcatccctgtagccacccatctgctgaacaatggcagtggggtaggagttctacagtgtctcgagcatatgattggggcagtgagaagcaaagtgctggagattcacagccatttcccacacaaacccattatcttgattggctggaacacaggagctttggtggcctgtcatgtgtcagtaatggagtatgtcactgcagttgtctgccttgggtttcctctgcttactgtggatggccccagaggggatgtagatgatcccctcttggatatgaagactccagtcctctttgtcattggtcagaattcccttcaatgtcaccctgaagccatggaggacttccgggagaagattcgagctgagaacagcttggtggtggttgggggagctgatgacaatctcagaataagcaaagcaaagaagaaatcagaagggttgactcagagcatggtggacagatgtattcaggatgagattgtggactttctgactggagtgctcactcgtgctgagggtcacatgggctctgaacctcgggatcaggatgctgagaagaagaagaagccccgcgatgtggcccgcagagacttggcctttgaagtccctgagcggggcagtcgacctgcctccccagctgccaagctgcccgcctcaccctcaggctcagaggatctctccagtgtgtccagcagccccacctccagtcccaagaccaaagtgaccacagtgacctctgcccagaagtccagtcagattggaagttctcagctgctgaagagacatgtgcagcggacagaagctgtgctgacccacaaacaagctcaagttcccatttcatcagaaccaccagaggaaggagagaaagaggatcttagggttcagctgaagcgacaccatccctcgacaccattacctgtctactcttggtttcaccactag

SEQ ID NO: 278659 - DNA, 5012 bp, Artificial Sequence
  derived and/or modified sequence
agtgaatcagacgtcccaatagatgtggagacggtcacatcaacgcctatgccactctatgacaatcagaaggcacgcagcgtgatgaatgagtgtgaacggcatgtcatctttgccaggactgatgcagatgcccctcctccaccagaggactgggaggagcatgtcaacagggtctcactctgtcacccagactgcagtgcagtggcacgatctcagctcactacaagccttgacctccaggactcagtctccttgtggaccaccacccttctgttatgacattgccacattgccacagattgatgcttacacaccatctcttttggactggctggacaatggcccagaacaagctattcaacaagatcctcaaagccctgcagtctgaccggcttgcccgcttggccaacgaaggggcttgtaatgagccagtgctgcgccgtgttgctgtggacaagtgtgcaaggagagtgcggcaggctctggcaagtgtgagctgggataccaagctgatccagtggctgcacaccacccttgtggagaccttgagtctgcccatgctggcagcctacctggatgctttgcagacgctgaaggggaagatcccaaccttgattgaccggatgcttgtgtcatccaacacaaagactggggctgcaggagctgaggccttgtctctcctactgaagaggccctgggaccctgctgtgggtgtgctttctcataacaaaccaagcaaactccctggctctccgctgattctcatcgcctcctctggtccctccagctctgtgtttcccacttcacgccgccaccgcttctggcaatctcagctgtcctgcttgggcaaggtcatccctgtagccacccatctgctgaacaatggcagtggggtaggagttctacagtgtctcgagcatatgattggggcagtgagaagcaaagtgctggagattcacagccatttcccacacaaacccattatcttgattggctggaacacaggagctttggtggcctgtcatgtgtcagtaatggagtatgtcactgcagttgtctgccttgggtttcctctgcttactgtggatggccccagaggggatgtagatgatcccctcttggatatgaagactccagtcctctttgtcattggtcagaattcccttcaatgtcaccctgaagccatggaggacttccgggagaagattcgagctgagaacagcttggtggtggttgggggagctgatgacaatctcagaataagcaaagcaaagaagaaatcagaagggttgactcagagcatggtggacagatgtattcaggatgagattgtggactttctgactggagtgctcactcgtgctgagggtcacatgggctctgaacctcgggatcaggatgctgagaagaagaagaagccccgcgatgtggcccgcagagacttggcctttgaagtccctgagcggggcagtcgacctgcctccccagctgccaagctgcccgcctcaccctcaggctcagaggatctctccagtgtgtccagcagccccacctccagtcccaagaccaaagtgaccacagtgacctctgcccagaagtccagtcagattggaagttctcagctgctgaagagacatgtgcagcggacagaagctgtgctgacccacaaacaagctcaagttcccatttcatcagaaccaccagaggaaggagagaaagaggatcttagggttcagctgaagcgacaccatccctcgagtccccttcctggcagtaagacctccaaacgaccgaagatcaaggtgtcccttatctcccaaggggacacagctggagggccttgtgctccttcccaaggaagtgctccagaaggtgggaagcccatcaccatgacactggggcaggcttcagcaggggccaaggagctcacaggacttctcaccacagccaagtccagttcttctgaaggtggagtctcagccagcccagtcccttcagtggtctccagcagcactgcacccagtgccttgcacacactgcagagccgcctggtggccacatctcctggcagctccctcccaggggccacatcagccagcagcctcctccaaggcctcagcttcagcttgcaggatatcagcagcaagacctctggccttccagcaaatccctccccaggaccagccccacaggccaccagtgtgaagttgcccacccccatgcagagcctgggtgccatcaccacgggcaccagcaccattgtccgtaccattcctgtggccaccactctctcctccttgggtgccactcctggtgggaagcccacagccatccaccagctgctgaccaatgggggcctcgctaagttggcaagcagcctccctggcctggctcagatctctaaccaagcatcaggcttgaaggtccccaccaccattactctgacacttcgtggccagccgagcaggatcactacactgagccctatgggctcaggagcagccccatccgaggagtcctcttcccaggtgctgccctccagctcacagcgcctgcctccagcaccctgaagatgctgtgtgatatgtcctccttaccaagttggtgatggctgcctcatggtgggccctggacaggtgtgtggtcctgctgagctgtccacgtgtcggaagacctgtttaagacagtcatttttgcctctccgccaactgtcttcagagaaaccattaggttaggtgatacggtgccagcaagggaagcaccatcgtccaggatctgcaaatctggttcctgggaaccccagactcctcagcagatctggctgtacatggatcagaaccacttcttcccccgcttaagctgtggtttgacccaagggtcagcatataggactgcctgctgcatttaatgaaggtgtttccttttggaagtctgtgctaccctctgcgcctagttgggaggagacatccatctggtctgggatttcgggagttagaatggaaagctctttgctaaagactggagtcatcctggcctgccaactggtggttcagagccggacgggcttgttttggacatcactgttgccttcactcagcagccacgggagagtgctccccatgcaactccaccttagaaaccacgtcagatactgagtagcttgctgactcctggaaacttctggtttttgttagtatcataatgaaggcaaagagaactaggctgtcatctttcagcctctttgacttactctagatgttgggagcagtggttgccaggtgaaacctgggccctttgtctttttcaccatgctttgggcagtttctgtatccagagagtccgcaggttcagataagctgaagaagagtaatagaacagcaaaggaagtggcttgaaggatgtgctagtaagccctgtggtttgtgcttaggtctctgctctgctacccaaggaactggtggttcagctggagataaaaagaagaatttgccaagtcagagaagaaaccccaaccccggaaaatcctctgtctccagtctctggaggtgaagcagggacaataagctaaggtagtatcttggccatcccaggaaacttgtggcattaggacgatgaaggccatgcttcagtgttttcgtttctatttcatgagactttttgtcttcctgcttacaagtgggaagatgattgacagtgactctactatgcagggctgttggtaccaacctgagccctataggtggcagtccctggagaagtggtcacagaagatggagctctgatcccctgcttacctcttcacaacacttgtgtgcaaagatagttttagatttggtttagaagctatcctccagaacaggctcccatacttagaatgtttctagttaaggtaataaattaggcaacccaagtgtgactccactcaagtgtccttttctgtaggcaggaagggcccacaacatggcttaaaatgtagtccatggttctggcccacagtacagtgtgtatctataccaggtcacctgtgttcaatctgggagccttcctggccagtctgagtggcagccagaagggagctcatagtgtctaggagtctcaggcaaggtaggtcagggtactgtgggcaggggggatgtgtgtgataggagagggtaccctaaaccccataccttccctccctgacctgaaaagctgatctcaacagggattcacacagaattaggctgtgtttttgcattagctggtaggtgactttctcaaaattcttaaattcagaaagtatttagtaaacttgaggaaggtatgaaatctggaggaggcatccaggacccaggggtttgatagctttacaggtaggatcataccacaccaaaagagcagtggacaataagactatatgagctatatgaagcttttaggaatcatttaggacagacagagccctaaacaacccattcatgacttaagttgttggctcagtgtatgctggggacaaagaaaaactaacaagccgacctgcctttatgataaattctagtgtgcttacaagggatgacttcctgaggtgtgatctgtccaccttgaagaactccacaactgaagaaggggagctgtgagaacgtggattgttctacaacttgcacagggtaacagaggaagtggctgaggcctagagtcacgttttccagttcccttcgcaaactatatttcttggaacgcgaaaggaagctttacctatttcatagaagacctggaatccataacctcagaaggcaatattattgatagaaaatgtggaaggatcaggaagttcttagattcttggatgacagatgcatgttgatgccctatggagatgtccttgtgttttgaggtcactgaggtaggaagacctgtctactcttggtttcaccactagaacagtcttgggctggatgggttatagagctgagcggctgtgatggttctgtttttacattaacaaaaacaattaaaaacaccaaaaacaa

SEQ ID NO: 278660 - DNA, 1448 bp, Artificial Sequence
  derived and/or modified sequence
cgcgcttagggatccggccgtggccgagcgcgcggccgtaagaccgcgggtgactagcatgcagatacccatgctctgactttctgcccctccactgacatggcccaccggggtggggagagggacttccagacttcagctcgacgcatgggcacctcgctgctcttccagctttcagtgcatgaacgggagctggacctggtttttctggatcatagctatgccaagccttggagtgcccacccagatgccagtagtgcccgccccacccgcatgctctttgtcactccccggcggcagcacgaaagtaccatgctctgtacaaaatgagctaagtagctaagtgaatcagacgtcccaatagatgtggagacggtcacatcaacgcctatgccactctatgacaatcagaaggcacgcagcgtgatgaatgagtgtgaacggcatgtcatctttgccaggactgatgcagatgcccctcctccaccagaggactgggaggagcatgtcaacaggactggctggacaatggcccagaacaagctattcaacaagatcctcaaagccctgcagtctgaccggcttgcccgcttggccaacgaaggggcttgtaatgagccagtgctgcgccgtgttgctgtggacaagtgtgcaaggagagtgcggcaggctctggcaagtgtgagctgggataccaagctgatccagtggctgcacaccacccttgtggagaccttgagtctgcccatgctggcagcctacctggatgctttgcagacgctgaaggggaagatcccaaccttgattgaccggatgcttgtgtcatccaacacaaagactggggctgcaggagctgaggccttgtctctcctactgaagaggccctgggaccctgctgtgggtgtgctttctcataacaaaccaagcaaactccctggctctccgctgattctcatcgcctcctctggtccctccagctctgtgtttcccacttcacgccgccaccgcttctggcaatctcagctgtcctgcttgggcaaggtcatccctgtagccacccatctgctgaacaatggcagtggggtaggagttctacagtgtctcgagcatatgattggggcagtgagaagcaaagtgctggagattcacagccatttcccacacaaacccattatcttgattggctggaacacaggagctttggtggcctgtcatgtgtcagtaatggagtatgtcactgcagttgtctgccttgggtttcctctgcttactgtggatggccccagaggggatgtagatgatcccctcttggatatgaagactccagtcctctttgtcattggtcagaattcccttcaatgtcaccctgaagccatggaggacttccgggagaagattcgagctgagaacagcttggtggtggttgggggagctgatgacaatctcag

SEQ ID NO: 278661 - DNA, 2295 bp, Artificial Sequence
  derived and/or modified sequence
atgaccctgccccactgccaccggctgatgctgacccaccacctgttctggaccggctggacaatggctcagaataaactgtttaacaagattcttaaggctctgcagtccgatcgtttggcacgacttgccaatgaaggggcttgtaatgagccagtcctccgtcgagttgctgtcgataaatgtgcacgtcgggtacgacaggcgctagcaagtgtttcttgggatactaaactgattcagtggctccatacaactttggtagagacgctgtccctcccaatgctggcagcctacctggacgctctccaaacattgaaggggaagatccccactttgatagatcggatgttggtatctagcaatacaaagacaggtgcagcgggcgccgaagcactgtctcttcttctaaagcgcccctgggaccccgccgtgggagtgctgagccataacaagccttcaaagctcccaggatctccgctgatccttatagctagcagcggtccttctagtagtgttttccccacgtcgaggcggcatcgattttggcaatcgcagttgtcttgtttgggaaaagtcattcctgtggcgacccatttactgaacaatggctccggtgtgggagtcctgcagtgcctggagcatatgatcggcgccgtcagatcgaaagtgctggaaatccactcacactttccacacaaacccatcatcctcattgggtggaacactggggcattggttgcctgccatgtgtcagtcatggagtacgtgactgctgtcgtttgcctcgggttcccacttttgacagtggacggtccaaggggggacgtggatgaccctctgctcgatatgaaaaccccggttcttttcgttatagggcagaattccctgcagtgtcaccccgaagccatggaggacttccgagagaaaattcgggcagaaaattctctggtggtggtggggggcgctgacgacaacctgcggatcagtaaggcgaaaaaaaagagcgagggtcttacacagtctatggtggataggtgcattcaggacgaaatcgtggactttttgacaggcgtgctcacccgggctgagggccacatgggtagtgaacctagggatcaggatgccgaaaaaaagaaaaagccccgtgacgttgcccgtagagatttggccttcgaggtgcccgaaagaggctctcggcctgcctcccccgccgcaaagctacctgcaagtccctcaggcagcgaggacctatcctcagtgagcagcagccctactagttcccccaagactaaggtgaccaccgtgacttctgctcagaagagctcacagatcggcagctcacaactgcttaagcggcatgtccagaggacagaagctgttctgacgcataaacaggcgcaggtgcctatcagttcagaacctcctgaggaaggagaaaaggaggatctgagagttcagctgaagcggcatcacccatcatctccactacctggatctaagaccagcaaaagaccaaaaataaaagtttcactcattagccagggagacaccgcaggcgggccctgtgcgcctagccaggggtccgctcctgagggcggaaagcctatcacaatgacgcttggccaggcttcggctggggccaaggaacttacaggtctacttacgaccgctaagagcagctccagcgagggtggcgtgtcagcaagccccgtgccgagcgtggtgtcgtcatccaccgctccctcggcgctgcacacactgcagagcagactggtcgcaaccagtccgggctcgtctctccctggggccaccagcgcatcctcccttttacagggtctttccttttcgctgcaagacatctcctccaaaacgtccggcctgcccgcaaatccttcccccggccccgccccccaagctaccagcgtgaaactcccaacccctatgcaaagcttaggcgccattaccacaggaacaagtactatcgtgcgtactatacccgtcgccaccacacttagttccctcggggccacacccggtggcaagcccaccgccatacaccaattactgaccaacggaggcctcgctaaactggcaagcagcctgccaggcctcgcacagatcagtaatcaggcttcggggctgaaagtacccacgacaatcaccctgaccctgaggggccaaccatccaggatcactactctctcccctatgggctcaggcgctgcacccagcgaggaatcgagctcgcaggtcctgccatcttcctcacagagactgccaccagcgccttag

SEQ ID NO: 278662 - DNA, 2295 bp, Artificial Sequence
  derived and/or modified sequence
atgacgctgccacattgccataggctgatgctgacccatcacctgttctggacagggtggaccatggcgcagaacaagctctttaataagattctcaaggcccttcagtcagatcgcctggctagactcgctaacgaaggcgcatgcaacgagccagtcctccgcagggtcgcagtagataaatgcgcgaggagagttcgacaggctctcgcctccgtatcatgggatacgaagctgatccaatggctgcatacaacattagtggagaccctgtctctgccaatgttggccgcatatctggacgcgctccagacgctcaaaggcaagatccccaccctgatagacaggatgctggtcagttctaatacgaaaaccggagcagctggggcagaggcgctctcattgctcctgaaacgcccatgggatcccgcagtgggagttctatcgcataataagccctcaaaattgccaggctcgcctctgatcctgattgcctccagcggaccatcctctagcgtgttccctacaagccgaagacataggttctggcagagccagctcagctgcttaggaaaagtaatcccggtagctacgcacctattaaataacggctcaggcgtcggcgtgctgcagtgtctggagcacatgatcggcgctgtgcggtcaaaggtgcttgagattcattcccattttcctcacaagcctattattttgattggatggaatactggggctctggtggcatgccatgtcagtgtgatggaatacgtgaccgctgtggtctgcctggggtttccattactgaccgtcgatggtccaaggggcgacgtcgatgatccactgctggatatgaaaacgcctgtgctttttgtgatagggcaaaacagcctgcagtgtcacccagaagccatggaagattttcgcgaaaagattcgcgcagaaaattctctggtagttgtcggaggtgccgacgacaatctgaggataagcaaagccaagaaaaagagcgagggtttaacacagtccatggttgatcgctgtatacaggatgagatcgttgacttcttgaccggcgtgctgacacgggctgaagggcacatgggctccgagccccgagatcaggacgccgagaagaagaagaagcctcgcgacgtcgctcgcagggacctcgcatttgaggtgcccgagaggggcagccgtccagctagccccgctgccaagttgcccgctagtccgagcggatcggaagacctgtcttcagttagctccagccccactagttccccgaagaccaaggtgactaccgtcacgtcggctcagaaaagttcgcaaatcggaagctcgcagctgctgaagaggcacgtgcagcgtaccgaagctgtactgactcacaaacaggcccaggtgcctatcagctccgaaccccctgaggagggcgaaaaggaggatctgagggtacagctgaagagacatcacccgagctctccactccctggctcaaaaacctccaagcgcccaaagataaaagtgagtctcatatcccaaggcgataccgccggtggtccctgcgccccatcccagggctctgctccagaaggcggaaaacccatcaccatgaccctgggtcaagcaagcgccggagctaaagagctgaccggcctgttgacgaccgcaaaatcatcttcctccgagggaggcgtgagcgcgtcaccggttccaagcgtcgtgtcatcttccaccgcgccatcagcgcttcacactctacagtccaggctcgtggccacttctcctgggtccagcctgcctggcgcaacatctgctagttccctcttgcaagggctttcttttagcctacaggatatttcaagcaagactagtggcctcccagcgaacccttctccaggaccagctcctcaagcgacgtctgtgaagcttccaacccccatgcagtccctcggtgcgatcaccaccggaacctccaccatcgttcgtaccatccccgttgcaacaacactgtcctcgttgggggctactccgggagggaagcccacggctattcaccaactgctcactaatgggggactggcaaaacttgcctcttccctgcccggactagcccagatcagcaatcaagcatccggcctgaaagtccccacaaccattacacttacactgagagggcagccaagccgtatcacaactctttcgcccatgggaagcggggcagcaccttcggaggagagctcatcccaggtgctgccgagctcttcacagagactgcccccagcaccatag

SEQ ID NO: 278663 - protein, 152 aa, Artificial Sequence
  derived and/or modified sequence
MWSGTSPRCWVSPRRLDRYICTYINVQERDPKAHRFLGLLYELEENTEKAVECYRRSVELNPTQKDLVLKIAELLCKNDVTDGRAKYWVERAAKLFPGSPAIYKLKEQLLDCEGEDGWNKLFDLIQSELYVRPDDVHVNIRLVELYRSTKRL

SEQ ID NO: 278664 - protein, 575 aa, Artificial Sequence
  derived and/or modified sequence
MWSLLLCGLSIALPLSVTADGCKDIFMKNEILSASQPFAFNCTFPPITSGEVSVTWYKNSSKIPVSKIIQSRIHQDETWILFLPMEWGDSGVYQCVIKGRDSCHRIHVNLTVFEKHWCDTSIGGLPNLSDEYKQILHLGKDDSLTCHLHFPKSCVLGPIKWYKDCNEIKGERFTVLETRLLVSNVSAEDRGNYACQAILTHSGKQYEVLNGITVSITERAGYGGSVPKIIYPKNHSIEVQLGTTLIVDCNVTDTKDNTNLRCWRVNNTLVDDYYDESKRIREGVETHVSFREHNLYTVNITFLEVKMEDYGLPFMCHAGVSTAYIILQLPAPDFRAYLIGGLIALVAVAVSVVYIYNIFKIDIVLWYRSAFHSTETIVDGKLYDAYVLYPKPHKESQRHAVDALVLNILPEVLERQCGYKLFIFGRDEFPGQAVANVIDENVKLCRRLIVIVVPESLGFGLLKNLSEEQIAVYSALIQDGMKVILIELEKIEDYTVMPESIQYIKQKHGAIRWHGDFTEQSQCMKTKFWKTVRYHMPPRRCRPFPPVQLLQHTPCYRTAGPELGSRRKKCTLTTG

SEQ ID NO: 278665 - DNA, 2615 bp, Artificial Sequence
  derived and/or modified sequence
cccgcccacggtggcggggaaatacctaggcatggaagtggcatgacagggctcgtgtccctgtcatattttccactctccacgaggtcctgcgcgcttcaatcctgcaggcagcccggtttggggatgtggtccttgctgctctgcgggttgtccatcgcccttccactgtctgtcacagcagatggatgcaaggacatttttatgaaaaatgagatactttcagcaagccagccttttgcttttaattgtacattccctcccataacatctggggaagtcagtgtaacatggtataaaaattctagcaaaatcccagtgtccaaaatcatacagtctagaattcaccaggacgagacttggattttgtttctccccatggaatggggggactcaggagtctaccaatgtgttataaagggtagagacagctgtcatagaatacatgtaaacctaactgtttttgaaaaacattggtgtgacacttccataggtggtttaccaaatttatcagatgagtacaagcaaatattacatcttggaaaagatgatagtctcacatgtcatctgcacttcccgaagagttgtgttttgggtccaataaagtggtataaggactgtaacgagattaaaggggagcggttcactgttttggaaaccaggcttttggtgagcaatgtctcggcagaggacagagggaactacgcgtgtcaagccatactgacacactcagggaagcagtacgaggttttaaatggcatcactgtgagcattacagaaagagctggatatggaggaagtgtccctaaaatcatttatccaaaaaatcattcaattgaagtacagcttggtaccactctgattgtggactgcaatgtaacagacaccaaggataatacaaatctacgatgctggagagtcaataacactttggtggatgattactatgatgaatccaaacgaatcagagaaggggtggaaacccatgtctcttttcgggaacataatttgtacacagtaaacatcaccttcttggaagtgaaaatggaagattatggccttcctttcatgtgccacgctggagtgtccacagcatacattatattacagctcccagctccggattttcgagcttacttgataggagggcttatcgccttggtggctgtggctgtgtctgttgtgtacatatacaacatttttaagatcgacattgttctttggtatcgaagtgccttccattctacagagaccatagtagatgggaagctgtatgacgcctatgtcttataccccaagccccacaaggaaagccagaggcatgccgtggatgccctggtgttgaatatcctgcccgaggtgttggagagacaatgtggatataagttgtttatattcggcagagatgaattccctggacaagccgtggccaatgtcatcgatgaaaacgttaagctgtgcaggaggctgattgtcattgtggtccccgaatcgctgggctttggcctgttgaagaacctgtcagaagaacaaatcgcggtctacagtgccctgatccaggacgggatgaaggttattctcattgagctggagaaaatcgaggactacacagtcatgccagagtcaattcagtacatcaaacagaagcatggtgccatccggtggcatggggacttcacggagcagtcacagtgtatgaagaccaagttttggaagacagtgagataccacatgccgcccagaaggtgtcggccgtttcctccggtccagctgctgcagcacacaccttgctaccgcaccgcaggcccagaactaggctcaagaagaaagaagtgtactctcacgactggctaagacttgctggactgacacctatggctggaagatgacttgttttgctccatgtctcctcattcctacacctattttctgctgcaggatgaggctagggttagcattctagacacccagttgagctcaggcgtagagaagaggaggatgggataagaactggggccatccccatgtcatggtgggtgagagctggggccatccccgtggtcatggagggtgagagctgggggttatccccatggtcatggagggtgagggctggtcgggggaggcatccccaagtcatggtgggtgagagctcggagcatccccatgtcatggtgggtgagatctgggggtatccctgtgtcatggtgggtgagggcgggtggtcatccacatggtcatagtgggtgagagctgggggtatccctacatcatggtgggtgagagctgggagcatccccatgtcatggtgggcgagatctggggggtatccccacgtcatggtggatgagagctgggggaatcaccatgtcatggtgggtgagatcttgggggatcacctgtcatggtgggtgagagctggggggatcacctgtcatggtgggtgagagttgggattcatccccatgtcatggtgggctgagcccacatggaagcctgtgcttggacagcgtatgcccttttctctgtttttccacaatgaacaattaaactgtaaatgttaaaaatatcagtaatttgtgaaataaattttattctcatttgagcaacataaa

SEQ ID NO: 278666 - DNA, 1769 bp, Artificial Sequence
  derived and/or modified sequence
ctttctcctttcccgctggcccttgccagcccggtttggggatgtggtccttgctgctctgcgggttgtccatcgcccttccactgtctgtcacagcagatggatgcaaggacatttttatgaaaaatgagatactttcagcaagccagccttttgcttttaattgtacattccctcccataacatctggggaagtcagtgtaacatggtataaaaattctagcaaaatcccagtgtccaaaatcatacagtctagaattcaccaggacgagacttggattttgtttctccccatggaatggggggactcaggagtctaccaatgtgttataaagggtagagacagctgtcatagaatacatgtaaacctaactgtttttgaaaaacattggtgtgacacttccataggtggtttaccaaatttatcagatgagtacaagcaaatattacatcttggaaaagatgatagtctcacatgtcatctgcacttcccgaagagttgtgttttgggtccaataaagtggtataaggactgtaacgagattaaaggggagcggttcactgttttggaaaccaggcttttggtgagcaatgtctcggcagaggacagagggaactacgcgtgtcaagccatactgacacactcagggaagcagtacgaggttttaaatggcatcactgtgagcattacagaaagagctggatatggaggaagtgtccctaaaatcatttatccaaaaaatcattcaattgaagtacagcttggtaccactctgattgtggactgcaatgtaacagacaccaaggataatacaaatctacgatgctggagagtcaataacactttggtggatgattactatgatgaatccaaacgaatcagagaaggggtggaaacccatgtctcttttcgggaacataatttgtacacagtaaacatcaccttcttggaagtgaaaatggaagattatggccttcctttcatgtgccacgctggagtgtccacagcatacattatattacagctcccagctccggattttcgagcttacttgataggagggcttatcgccttggtggctgtggctgtgtctgttgtgtacatatacaacatttttaagatcgacattgttctttggtatcgaagtgccttccattctacagagaccatagtagatgggaagctgtatgacgcctatgtcttataccccaagccccacaaggaaagccagaggcatgccgtggatgccctggtgttgaatatcctgcccgaggtgttggagagacaatgtggatataagttgtttatattcggcagagatgaattccctggacaagccgtggccaatgtcatcgatgaaaacgttaagctgtgcaggaggctgattgtcattgtggtccccgaatcgctgggctttggcctgttgaagaacctgtcagaagaacaaatcgcggtctacagtgccctgatccaggacgggatgaaggttattctcattgagctggagaaaatcgaggactacacagtcatgccagagtcaattcagtacatcaaacagaagcatggtgccatccggtggcatggggacttcacggagcagtcacagtgtatgaagaccaagttttggaagacagtgagataccacatgccgcccagaaggtgtcggccgtttcctccggtccagctgctgcagcacacaccttgctaccgcaccgcaggcccagaactaggctcaagaagaaagaagtgtactctcacgactggctaa

SEQ ID NO: 278667 - protein, 170 aa, Artificial Sequence
  derived and/or modified sequence
MNCRELPLTLWVLISVSTAESCTSRPHITVVEGEPFYLKHCSCSLAHEIETTTKSWYKSSGSQEHVELNPRSSSRIALHDCVLEFWPVELNDTGSYFFQMKNYTQKWKLNVIRRNKHSCFTERQVTSKIVEVKKFFQITCENSYYQTLVNSTSLYKIGPPICRKTSSGLH

SEQ ID NO: 278668 - DNA, 66 bp, Artificial Sequence
  derived and/or modified sequence
atggaaaaccgcctgctgcgcgtgtttctggtgtgggcggcgctgaccatggatggcgcgagcgcg

SEQ ID NO: 278669 - protein, 1320 aa, Artificial Sequence
  derived and/or modified sequence
MANDSPAKSLVDIDLSSLRDPAGIFELVEVVGNGTYGQVYKGRHVKTGQLAAIKVMDVTEDEEEEIKLEINMLKKYSHHRNIATYYGAFIKKSPPGHDDQLWLVMEFCGAGSITDLVKNTKGNTLKEDWIAYISREILRGLAHLHIHHVIHRDIKGQNVLLTENAEVKLVDFGVSAQLDRTVGRRNTFIGTPYWMAPEVIACDENPDATYDYRSDLWSCGITAIEMAEGAPPLCDMHPMRALFLIPRNPPPRLKSKKWSKKFFSFIEGCLVKNYMQRPSTEQLLKHPFIRDQPNERQVRIQLKDHIDRTRKKRGEKDETEYEYSGSEEEEEEVPEQEGEPSSIVNVPGESTLRRDFLRLQQENKERSEALRRQQLLQEQQLREQEEYKRQLLAERQKRIEQQKEQRRRLEEQQRREREARRQQEREQRRREQEEKRRLEELERRRKEEEERRRAEEEKRRVEREQEYIRRQLEEEQRHLEVLQQQLLQEQAMLLECRWREMEEHRQAERLQRQLQQEQAYLLSLQHDHRRPHPQHSQQPPPPQQERSKPSFHAPEPKAHYEPADRAREVEDRFRKTNHSSPEAQSKQTGRVLEPPVPSRSESFSNGNSESVHPALQRPAEPQVQWSHLASLKNNVSPVSRSHSFSDPSPKFAHHHLRSQDPCPPSRSEVLSQSSDSKSEAPDPTQKAWSRSDSDEVPPRVPVRTTSRSPVLSRRDSPLQGSGQQNSQAGQRNSTSSIEPRLLWERVEKLVPRPGSGSSSGSSNSGSQPGSHPGSQSGSGERFRVRSSSKSEGSPSQRLENAVKKPEDKKEVFRPLKPAVRIDLTALAKELRAVEDVRPPHKVTDYSSSSEESGTTDEEDDDVEQEGADESTSGPEDTRAASSLNLSNGETESVKTMIVHDDVESEPAMTPSKEGTLIVRQTQSASSTLQKHKSSSSFTPFIDPRLLQISPSSGTTVTSVVGFSCDGMRPEAIRQDPTRKGSVVNVNPTNTRPQSDTPEIRKYKKRFNSEILCAALWGVNLLVGTESGLMLLDRSGQGKVYPLINRRRFQQMDVLEGLNVLVTISGKKDKLRVYYLSWLRNKILHNDPEVEKKQGWTTVGDLEGCVHYKVVKYERIKFLVIALKSSVEVYAWAPKPYHKFMAFKSFGELVHKPLLVDLTVEEGQRLKVIYGSCAGFHAVDVDSGSVYDIYLPTHIQCSIKPHAIIILPNTDGMELLVCYEDEGVYVNTYGRITKDVVLQWGEMPTSVAYIRSNQTMGWGEKAIEIRSVETGHLDGVFMHKRAQRLKFLCERNDKVFFASVRSGGSSQVYFMTLGRTSLLSW

SEQ ID NO: 278670 - DNA, 3963 bp, Artificial Sequence
  derived and/or modified sequence
atggctaatgactcccccgccaagtcccttgttgacatcgaccttagttcactgcgagatccagccggaatcttcgaactggtggaagtggtggggaatggcacgtacggccaggtctacaaagggcgacatgtgaagacagggcagcttgctgctattaaggtcatggatgtcaccgaagatgaagaggaggagatcaagttagaaattaatatgctcaagaagtactcacaccacagaaatatcgctacctattacggcgcctttattaagaagtctccgcctggacatgacgaccagctctggctcgttatggaattttgcggtgcgggttctatcactgacctggttaaaaacactaagggtaacactctgaaagaagattggatcgcctacatatctcgggagattctgcgtggcctcgcccacctacatatccaccacgttatacaccgagatatcaaagggcagaacgtcctgctgaccgagaatgctgaggtgaaactcgtagacttcggtgtttcagcccagctggatagaacggtgggccgccgtaacacttttattggcaccccatattggatggctcctgaagtgatagcctgtgacgagaatccagacgctacctatgactatcgctccgacctgtggtcatgcggcatcacagccatagagatggccgagggcgctccaccactgtgcgatatgcaccccatgagagcattgttcctgataccaagaaatccacccccccgcctgaaatctaaaaagtggtcaaagaaattcttcagcttcattgaaggatgcttggtcaaaaattacatgcagagaccttcgaccgaacagctgttaaaacacccatttatcagggatcaaccgaacgagaggcaggtacgtatccagctgaaggatcacatcgaccgcacgaggaagaaacgcggagaaaaggacgagactgagtacgaatattctggttctgaggaagaagaggaggaagtgcccgaacaggagggtgaaccaagctctattgtcaacgtgccaggggagagcaccctgcgaagggactttctcagattacagcaagaaaataaggagcggagcgaagccctacgcagacagcagctgctccaggagcagcagttgcgagagcaagaagaatacaagcggcaattactggcagagcgtcagaagcgcatcgagcagcaaaaggaacagcggaggaggctggaagaacaacagcggcgcgaacgcgaggcccgtcgacaacaggaaagggagcaacggagaagggaacaagaggagaagcgtcggcttgaagaattggagcgccggagaaaagaggaggaggaacgtaggagagccgaggaggaaaagcgcagagtcgagcgggagcaggagtatatcagacggcagttggaggaagagcagagacacttggaggtgctgcagcagcagctgctgcaggaacaagccatgctattggaatgtagatggcgagagatggaggaacatcgacaggctgagaggctgcagagacagctgcagcaagaacaagcctacctactttcgttgcagcatgaccatagaaggccccatccccagcatagccagcagcctcctcctccccaacaggaacgttctaagcccagcttccatgccccagagcccaaggctcattatgagcccgccgaccgagcgcgcgaagttgaagatcgatttagaaagactaatcacagctcccccgaggcacaatccaaacagacagggcgggtgctcgagcctcccgtgccttcaagaagcgaatcattttctaatggcaactccgagtctgtccaccccgctcttcagaggcccgcggagccacaggttcagtggtcacatcttgcaagtctcaaaaataacgtgagccccgtgtctaggagccactcattcagcgatcccagtccaaagttcgcgcaccaccacctcagatcccaggacccctgtccgccttcccggtctgaggtcctgtctcagagctctgattctaaatctgaagctccggaccccactcagaaagcgtggtcccggtcagatagcgacgaggttccgcctagggtgcccgtaagaacaactagcaggtcacccgtgctgtcacgcagggactctcctctgcaaggctcagggcagcagaacagtcaagcaggccaaagaaactccacctcatcaatcgagccacgtctgctttgggagagagtcgaaaaactggtcccccgacctggttcaggttctagctcgggatctagcaactctggctcgcagccaggaagccatccaggatctcagtcgggatcaggcgagaggttccgggttcgttcaagttcaaaatctgaaggcagcccttcccaaagactggaaaatgctgttaaaaagcccgaggacaaaaaggaggtattccgtcctcttaagcccgccgtccggatcgatctcacagctcttgccaaggaactccgcgctgtggaggacgtccgacctccccataaggttacagactatagcagttcctctgaagaatccggaactactgatgaggaagatgatgacgttgaacaggagggagcagatgaatccacgtctggtcctgaagacacaagagcagcctccagcttaaacctgtcgaacggcgagaccgagagtgtgaagaccatgatcgtccatgacgacgtggaatccgaacccgccatgactccctcaaaagagggtacgctcattgtgaggcaaactcagtctgcctcatccaccctgcagaaacataaatcttcatcctctttcacgccattcattgaccctcgcctgcttcaaattagccccagtagcggcactacggtaacctctgtggtgggcttcagttgcgacggtatgaggcccgaggcgatccgtcaagaccccacccgaaaggggagtgtggtgaacgtcaacccgacaaacacacgtccacagtctgataccccggagatcagaaagtacaaaaaacgcttcaactcagagatcctctgcgccgccctgtggggtgtgaacctgctggtcggtactgagtctggtctgatgttgctcgacagatcaggacagggtaaagtctacccactaatcaacaggaggcggttccagcagatggacgtgttagagggactgaatgtgctggtcacaatatccggtaaaaaagataaactgcgggtctattatctatcatggcttaggaacaagattctacacaacgatccggaggtcgaaaaaaagcagggctggacaacagtgggtgaccttgagggctgcgtgcactacaaggtcgtaaagtatgagcggattaagttcctggtgatcgccctgaagtcctccgtggaagtgtacgcttgggcccccaagccttatcacaagttcatggcctttaagagtttcggcgaactggtgcacaaaccgctgttagtcgacctgacagtagaggaagggcaacgtctgaaggttatatacggatcgtgcgctgggttccacgcagtggatgtggatagtgggagtgtctacgatatttacttgcctacccatatccagtgcagcatcaaaccgcatgccatcattatactgccaaacactgacgggatggagctactggtctgttacgaggacgagggggtctacgtaaacacttacggaagaatcactaaagacgttgttctgcagtggggagagatgccaacatccgtcgcctatattagatctaatcagactatgggctggggggaaaaagcaatcgagattcggagcgtggaaaccggacatctggacggcgtcttcatgcacaagcgagcacagcgactaaaattcctttgcgagaggaacgataaagtgtttttcgctagtgtgcggagcggcggaagcagtcaggtctatttcatgaccctgggaagaacctcattactcagttggtag

SEQ ID NO: 278671 - DNA, 3963 bp, Artificial Sequence
  derived and/or modified sequence
atggccaatgacagccctgccaagagcctggtggacatcgacctgagcagcctgcgggaccctgctggcatctttgagctggtggaggtggtgggcaatggcacctacggccaggtgtacaagggccgccacgtgaagacaggccagctggccgccatcaaggtgatggatgtgacagaagatgaggaggaggagatcaagctggagatcaacatgctgaagaagtacagccaccacaggaacatcgccacctactacggggccttcatcaagaagagccccccaggccatgatgaccagctgtggctggtgatggagttctgtggggccggcagcatcacagacctggtgaagaacaccaagggcaacaccctgaaggaggactggatcgcctacatcagccgggagatcctgcggggcctggcccacctgcacatccaccacgtgatccaccgggacatcaagggccagaatgtgctgctgacagaaaatgctgaggtgaagctggtggactttggagtgtctgcccagctggacagaacagtgggcagaagaaacaccttcatcggcaccccctactggatggcccctgaggtgattgcctgtgatgagaacccagatgccacctatgactacagaagtgacctgtggagctgtggcatcacagccatcgagatggccgagggcgccccacccctgtgtgacatgcaccccatgagggccctcttcctgatccccagaaatcctccaccccggctgaagagcaagaagtggagcaagaagttcttctccttcatcgagggctgcctggtgaagaactacatgcagaggcccagcacagagcagctgctgaagcaccccttcatccgggaccagcccaatgaaaggcaggtgcgcatccagctgaaggaccacatcgacaggaccaggaagaagagaggagagaaggatgaaacagaatatgagtacagcggcagcgaggaggaggaggaggaggtgcctgagcaggagggggagcccagcagcatcgtgaatgtgcctggagagagcaccctgcggcgggacttcctgcggctgcagcaggagaacaaggagaggtctgaggccctgcggcggcagcagctgctgcaggagcagcagctgcgggagcaggaggagtacaagaggcagctgctggccgagcggcagaagagaattgagcagcagaaggagcagaggcggcggctggaggagcagcagaggcgggagcgggaggcccggcggcagcaggagcgggagcagaggagaagagagcaggaggagaagaggcggctggaggagctggagaggaggaggaaggaggaggaggagcggcggcgggcagaggaggagaagagaagagtggagcgggagcaggagtacatccggcggcagctggaggaggagcagaggcacctggaggtgctgcagcagcagctgctgcaggagcaggccatgctgctggagtgccgctggagggagatggaggagcaccggcaggccgagcggctgcagaggcagctgcagcaggagcaggcctacctgctgagcctgcagcacgaccacagaagaccccacccccagcacagccagcagcccccaccaccccagcaggagaggagcaagcccagcttccacgcccctgagcccaaggcccactatgagcctgctgaccgggcccgggaggtggaggaccgcttcaggaagaccaaccacagcagccctgaggcccagagcaagcagacaggccgggtgctggagccccctgtgcccagccgctctgagagcttcagcaatggaaacagcgagagcgtgcacccagccctgcagaggcctgctgagccccaggtgcagtggagccacctggccagcctgaagaacaacgtgtcccctgtgagccgcagccacagcttcagtgaccccagccccaagtttgcccaccaccacctgcggagccaggacccctgcccccccagccgctctgaggtgctgagccagagcagtgacagcaagtctgaggccccagaccccacccagaaggcctggagcagaagtgacagtgatgaggtgcccccccgggtgcctgtgaggaccaccagccgcagccctgtgctgagcagaagagacagccccctgcagggcagcggccagcagaacagccaggccggccagaggaacagcaccagcagcattgagccccggctgctgtgggagcgggtggagaagctggtgcccaggcctggcagcggcagcagcagcggcagcagcaacagcggcagccagcccggcagccaccctggcagccagagcggcagcggggagcgcttccgggtgcgcagcagcagcaagtctgagggcagccccagccagaggctggagaatgctgtgaagaagccagaggacaagaaggaggtgttccggcccctgaagccagctgtgagaattgacctgacagccctggccaaggagctgcgggctgtggaggatgtgcggcccccccacaaggtgacagactacagcagcagcagcgaggagagcggcaccacagatgaggaggatgatgatgtggagcaggagggcgcagatgagagcaccagcggccctgaggacaccagggctgccagcagcctgaacctgagcaatggagaaacagagagcgtgaagaccatgattgtgcatgatgatgtggagagcgagcccgccatgacccccagcaaggagggcaccctgattgtgcggcagacccagagcgccagcagcaccctgcagaagcacaagagcagcagcagcttcacccccttcatcgacccccggctgctgcagatcagccccagcagcggcaccaccgtgacctctgtggtgggcttcagctgtgatggcatgaggcctgaggccatccggcaggaccccaccaggaaaggatctgtggtgaatgtgaaccccaccaacacccggccccagagcgacaccccagagatcaggaagtacaagaagcgcttcaacagcgagatcctgtgtgccgccctgtggggcgtgaacctgctggtgggcacagagagcggcctgatgctgctggacaggagcggccagggcaaggtgtaccccctcatcaacagaagacgcttccagcagatggatgtgctggagggcctgaatgtgctggtgaccatcagcggcaagaaggacaagctgcgggtgtactacctgtcctggctgaggaacaagatcctgcacaatgaccctgaggtggagaagaagcagggctggaccaccgtgggggacctggagggctgtgtgcactacaaggtggtgaagtatgaaagaatcaagttcctggtgattgccctgaagagctctgtggaggtgtatgcctgggcccccaagccctaccacaagttcatggccttcaagagctttggagagctggtgcacaagcccctgctggtggacctgactgtggaggagggccagaggctgaaggtgatctacggcagctgtgccggcttccacgctgtggatgtggacagcggctctgtgtatgacatctacctgcccacccacatccagtgcagcatcaagccccacgccatcatcatcctgcccaacacagatggcatggagctgctggtgtgctatgaagatgagggcgtgtatgtgaacacctacggccgcatcaccaaggatgtggtgctgcagtggggcgagatgcccacctctgtggcctacatccgcagcaaccagaccatgggctggggcgagaaggccatcgagatccgctctgtggagaccggccacctggatggagtcttcatgcacaagagggcccagaggctgaagttcctgtgtgaaagaaatgacaaggtgttctttgcctctgtgcgcagcggcggcagcagccaggtgtacttcatgaccctgggccgcaccagcctgctgtcctggtag

SEQ ID NO: 278672 - DNA, 3963 bp, Artificial Sequence
  derived and/or modified sequence
atggccaacgacagccccgccaagagcctggtggacatcgacctgtcatcactgcgcgacccggcaggcatcttcgagttggtcgaggtggtcggaaatggtacgtacggtcaggtgtacaaaggccgccacgttaaaactggccagctggccgccattaaggtgatggatgtgaccgaagacgaggaggaagagattaaattagagattaacatgttgaagaagtactcccaccataggaacattgccacatattatggcgcattcattaagaagtcaccgcccggacatgatgatcagctttggctggttatggaattctgtggggcagggtccataactgatctcgtcaagaatacaaaggggaatacccttaaagaagactggattgcttacatctcaagagagatcctgcgagggctggcacacctgcacatccatcacgtgattcacagggacatcaaagggcagaacgtcttgctcactgagaatgcagaggtgaagctcgtcgattttggggtgagcgcacagcttgacagaacggttggacgacggaatacctttataggtacaccatactggatggcccctgaagtcatcgcctgcgatgagaaccctgacgcaacctatgactaccggagtgatctctggagttgcggaattacagctatcgagatggccgaaggggccccaccattgtgtgacatgcatcccatgcgagctctctttctgatcccaagaaacccacccccccgcctgaagagcaagaagtggtcaaaaaagtttttctcttttatcgagggctgcctcgttaaaaactacatgcagcggcctagcaccgagcaacttttgaaacacccatttatcagggatcagcccaacgagaggcaggtcagaatccagctgaaggatcatatcgataggactaggaagaaacggggcgaaaaagatgagactgagtatgaatattctgggtccgaggaggaagaggaggaagttccagagcaggagggagaaccttcaagtattgttaacgttccaggggagtctaccctccgtagggatttcctgcgactgcaacaagagaataaagagcgctccgaggccctcaggcgccagcagctcttgcaggagcagcagctgcgggagcaggaggaatacaaaaggcagctcctcgcagagagacagaaacggatcgagcagcagaaggagcagcgaaggcgactggaggaacagcagagacgagagcgggaggcaaggcggcagcaggagcgcgagcagagacgtagggaacaagaagaaaaacgccgcctcgaggagctcgagaggcggagaaaagaagaggaggagcgaagaagagccgaggaagaaaagaggagagttgagcgcgaacaggagtacattcgccggcagctggaagaagaacagagacacctcgaagtgttgcagcaacagctgctgcaggaacaggctatgctcctcgagtgtagatggcgcgagatggaggagcacagacaggctgaacgcctgcagagacagcttcagcaggaacaggcatacctgctatccctccaacatgatcaccggagaccacatccccaacactcacaacaaccccctcctccccaacaagagcggagcaaaccatccttccacgcccctgaaccaaaagcgcattacgaacctgctgatcgggctagggaagtggaggataggttcaggaaaaccaaccactcctcaccggaagcacagagcaaacagaccgggagggtcctggagccacccgttccctccagaagcgaaagcttcagtaacggcaattccgagagcgtgcatccggccctgcaacgccctgctgaaccccaagtgcaatggagccatctggctagcttgaagaataacgtatctccagtgtctcgtagtcacagcttttctgatccttcaccgaagttcgcacatcatcatctaagaagccaggacccttgcccccccagcagatctgaggtgctctcgcaaagcagcgacagtaagagtgaagcccccgatccaacccagaaggcctggagtcgcagtgactcagatgaggttcctcccagagttcctgttagaacgacctcacgctccccagtgctgagtaggcgagacagcccactgcaaggcagtggtcagcaaaactcccaggccggccagcggaactccaccagctcaatcgagcctagattactgtgggaaagagtggaaaagctcgtccctagaccaggctctggaagttcctcaggatcctcgaattccggaagccagcctggcagccaccctggctcccagtctggcagtggcgaacggttcagagtcagatccagcagcaagtctgagggatcgcctagtcagcggctggagaacgccgtcaagaagccagaagacaaaaaagaagtctttcggcctctgaaacccgccgtgcgaatcgatctgactgcactagccaaggagctgcgcgctgtagaggatgtgcggccaccacacaaggtgacagactactcttcaagtagcgaggaatccggcacaaccgatgaggaggacgatgatgtggagcaggaaggggccgatgagagcactagcggaccagaggacacgagagccgcaagttcccttaacctctccaatggagaaaccgaatctgttaaaactatgattgtgcacgatgacgtcgaatccgagccagccatgactcccagtaaggaggggaccctgattgtgcgtcaaacccagtctgcatccagtacgctgcagaagcacaaaagcagctcttcatttactccattcattgacccccggctgcttcagatctctccttctagcggaacaaccgttacatctgttgtgggtttcagttgcgatgggatgcgaccagaagccatccgccaagacccaacccgtaagggctctgtcgtgaacgtaaatccaaccaatactagaccccagtctgacacccctgagatcagaaagtacaaaaagcgattcaattccgagatcctctgtgccgccctgtggggcgtgaatctgctggtcggcaccgagtcagggctgatgcttctcgacagatccgggcaaggcaaagtataccccctgattaaccggagaaggttccaacagatggatgtgttggaagggctaaacgttctggtcacaatcagcgggaaaaaagataaactgagagtgtactacctgagttggttgaggaataagatcctacacaatgatccggaagtggagaagaaacaaggttggacaactgtcggggacctcgagggatgtgtgcactacaaggtcgtgaaatatgagagaatcaagttccttgtcatagctctcaagtcatctgtggaagtgtatgcttgggcacctaagccctatcataagttcatggcgtttaagtccttcggcgaactggtgcacaagccgcttctggtagatcttaccgtggaagaagggcaacgtctcaaggtgatctatgggagctgcgctggatttcacgccgtggatgtggatagtgggtccgtctacgatatctatctccccactcacattcagtgcagcatcaaacctcacgcaatcatcattctccctaataccgatggtatggagttgctcgtgtgttatgaggacgagggagtgtatgtcaatacgtatggccggattactaaagacgtggtgcttcagtggggagaaatgcccaccagtgtagcatatattcggagtaaccagaccatgggatggggggaaaaggctattgagatacgatcggtggagaccggccacctagatggcgttttcatgcataaacgggctcagaggttaaaatttttgtgcgagcggaacgataaagtgttctttgccagtgtaagaagcggggggtcatcccaggtgtactttatgactctcggccgcacgagcctgctgtcttggtag

SEQ ID NO: 278673 - DNA, 3963 bp, Artificial Sequence
  derived and/or modified sequence
atggccaatgactcccctgccaaaagcctggtagacattgacttaagttctcttagggacccagcaggcatatttgagctcgtggaagtggtaggcaacgggacctacggacaggtttacaagggcaggcatgtgaagacaggccagctggccgctattaaagttatggacgtgaccgaggacgaggaggaagagattaagttggaaatcaatatgttaaagaaatactcccaccaccgcaatattgctacatattacggagcttttatcaaaaagagcccacctggccacgacgaccagttgtggctggtcatggaattctgcggcgcaggcagcattaccgatttagttaaaaatacaaaaggcaataccctaaaggaggattggattgcttatatctcacgcgagatcctgagaggcctagcacatctccacatacaccacgtgattcaccgagatattaagggacagaacgtcttgcttacagagaacgccgaggtgaaactggttgactttggcgtgtctgctcagctggaccggaccgtcggacgcagaaacacattcatcggaaccccttactggatggcacctgaggtgatcgcttgtgacgaaaatccagatgccacctacgactataggtcagacctgtggtcatgcggaatcactgccattgagatggccgagggggcacccccactgtgtgatatgcatccaatgagggccctgttcctcattcctaggaatcctcctcctcgactgaagtctaaaaaatggtccaagaagttcttctcctttatcgagggctgtcttgtgaagaattatatgcaacgtccaagtactgagcagcttctgaagcatccctttatcagagaccagccgaacgagcgccaggttcggatccagttaaaggaccatatcgatcggacgaggaagaagcggggtgaaaaagacgagacggaatacgaatacagtggcagcgaagaagaggaggaagaggttcccgagcaggaaggagaaccatcctcgatcgttaatgtgcctggcgaatccaccctgaggagagacttcctgcgcctgcaacaagagaataaggagaggagcgaggctttgagaagacaacagctgctgcaagagcagcagctgagggagcaggaggagtacaagaggcagctgctcgcggagcgacagaagcggatcgagcagcagaaagagcagagacggaggttggaggaacagcagcggagagaacgagaagcaagaaggcagcaggagcgggagcaaagacgtagggaacaagaggagaagcgacgcctcgaggagctcgagcgacgcaggaaagaagaggaggagcgccgacgggcagaggaagaaaagcgtagagtcgagcgggaacaggaatatatcagaaggcagctggaagaggagcaaagacacctggaagtactgcagcaacagctactgcaagaacaagccatgcttctggagtgcagatggagagagatggaggagcatagacaagctgagagactccagcgtcagctgcagcaagaacaggcttatctgttatcacttcagcacgaccacagacggcctcacccccagcattctcagcaaccacctcccccacaacaagaaagaagcaagcccagctttcacgcaccagagccaaaggcccattatgagccagccgaccgcgctagggaagtagaggaccgatttcgaaagaccaatcacagctctcccgaagcgcagtctaaacagaccggtcgtgtcttggaaccccctgtccccagtcgttccgaatccttcagcaatggtaactcagagtctgtccaccccgctctgcagagacccgcagagccccaggtccagtggtctcacttggccagcctaaaaaacaacgtcagccccgtgagcagaagccactccttcagtgacccttccccgaagtttgcgcaccaccatttgcgctcacaggacccatgccccccttcccgctccgaagtcctgtcccagtcaagtgattcaaagagtgaggccccagatccaacacaaaaagcatggagcagatctgatagcgatgaggtcccaccacgagtgcccgtccggacaacatccaggagtcctgtgctcagcaggcgggacagccctctgcagggctctggacaacagaacagtcaagccggacagagaaattccacctcctctatcgagccgcgtcttctttgggaaagagtcgaaaaattagtgcctcggccaggttctggttccagctcaggctcctcaaactccggctcccagccgggtagccacccaggcagtcagtctggatcgggcgagcgctttagggtgcggagtagttctaaatcggaagggagccccagccagaggttagaaaacgccgtaaagaagccggaggacaaaaaagaggtgtttcgtcccctcaagcctgcagtgcgaatcgatctcaccgcattagccaaggaactgcgtgcagttgaggatgtgcggccaccccataaagtcactgactactctagttcctcagaggagagcggtacaaccgatgaggaggacgatgacgtcgagcaggaaggcgcagacgaatccacctccggccctgaggacacgcgggcagcctcttcactaaacctgtctaacggtgagactgagagcgtcaagactatgatcgtgcacgatgacgttgagtcagaaccagccatgaccccttctaaagagggtacacttattgtgaggcagacacagagtgccagcagcacattacagaaacataaatctagctccagcttcacaccatttatcgacccacgactgctccagattagcccatctagcggcaccaccgtcacgagcgtggtcggcttctcttgtgacgggatgcggcctgaggccatccgccaagaccctacccggaagggttccgtggtcaacgtcaaccctaccaatactaggcctcagtctgatactcctgaaatccgtaaatataagaaacgatttaatagcgaaatactgtgtgcggcactctggggggtgaacctcctcgtgggcactgagtctgggctgatgttattggaccggtctgggcaagggaaggtctatccactgatcaaccgtagacggtttcagcagatggacgtcctggagggcctgaacgtgctggtgaccataagcgggaaaaaggataagctgagagtgtactatctgtcatggctgaggaataaaatcttacataacgatccggaagtggagaaaaaacagggttggactactgtcggcgacttggagggctgtgtgcactacaaggtggtcaaatacgagcggattaaatttctggtgatcgctctgaaatccagcgtggaagtatacgcgtgggcccctaagccctaccacaagttcatggccttcaagagctttggcgagctagtgcataagcctcttctggtggacttaactgtggaggagggacagcggctgaaggtcatctatggctcttgcgccggattccatgccgttgacgttgactctggatcagtgtacgatatctaccttcccacccatattcagtgctcaattaaaccccacgccattattatactgccaaatacggacgggatggaactgttagtgtgttacgaggacgagggagtatacgtcaatacgtacggccgaatcactaaggatgtagttttacagtggggggaaatgccaaccagcgtggcctacatcaggtcgaaccagactatggggtggggagaaaaagccatcgaaattcgctcggtggagactgggcacctggatggtgtgttcatgcataaacgcgctcagaggctcaaatttctgtgcgagagaaatgacaaggttttcttcgccagcgtgcgtagcggtgggtcgtcacaagtatatttcatgacgttaggcagaaccagcctcctatcctggtag

SEQ ID NO: 278674 - DNA, 4116 bp, Artificial Sequence
  derived and/or modified sequence
ctggtctgcggctgagatacacagagcgacagagacatttattgttatttgttttttggtggcaaaaagggaaaatggcgaacgactcccctgcaaaaagtctggtggacatcgacctctcctccctgcgggatcctgctgggatttttgagctggtggaagtggttggaaatggcacctatggacaagtctataagggtcgacatgttaaaacgggtcagttggcagccatcaaagttatggatgtcactgaggatgaagaggaagaaatcaaactggagataaatatgctaaagaaatactctcatcacagaaacattgcaacatattatggtgctttcatcaaaaagagccctccaggacatgatgaccaactctggcttgttatggagttctgtggggctgggtccattacagaccttgtgaagaacaccaaagggaacacactcaaagaagactggatcgcttacatctccagagaaatcctgaggggactggcacatcttcacattcatcatgtgattcaccgggatatcaagggccagaatgtgttgctgactgagaatgcagaggtgaaacttgttgactttggtgtgagtgctcagctggacaggactgtggggcggagaaatacgttcataggcactccctactggatggctcctgaggtcatcgcctgtgatgagaacccagatgccacctatgattacagaagtgatctttggtcttgtggcattacagccattgagatggcagaaggtgctccccctctctgtgacatgcatccaatgagagcactgtttctcattcccagaaaccctcctccccggctgaagtcaaaaaaatggtcgaagaagttttttagttttatagaagggtgcctggtgaagaattacatgcagcggccctctacagagcagcttttgaaacatccttttataagggatcagccaaatgaaaggcaagttagaatccagcttaaggatcatatagatcgtaccaggaagaagagaggcgagaaagatgaaactgagtatgagtacagtgggagtgaggaagaagaggaggaagtgcctgaacaggaaggagagccaagttccattgtgaacgtgcctggtgagtctactcttcgccgagatttcctgagactgcagcaggagaacaaggaacgttccgaggctcttcggagacaacagttactacaggagcaacagctccgggagcaggaagaatataaaaggcaactgctggcagagagacagaagcggattgagcagcagaaagaacagaggcgacggctagaagagcaacaaaggagagagcgggaagctagaaggcagcaggaacgtgaacagcgaaggagagaacaagaagaaaagaggcgtctagaggagttggagagaaggcgcaaagaagaagaggagaggagacgggcagaagaagaaaagaggagagttgaaagagaacaggagtatatcaggcgacagctagaagaggagcagcggcacttggaagtccttcagcagcagctgctccaggagcaggccatgttactggagtgccgatggcgggagatggaggagcaccggcaggcagagaggctccagaggcagttgcaacaagaacaagcatatctcctgtctctacagcatgaccataggaggccgcacccgcagcactcgcagcagccgccaccaccgcagcaggaaaggagcaagccaagcttccatgctcccgagcccaaagcccactacgagcctgctgaccgagcgcgagaggtggaagatagatttaggaaaactaaccacagctcccctgaagcccagtctaagcagacaggcagagtattggagccaccagtgccttcccgatcagagtctttttccaatggcaactccgagtctgtgcatcccgccctgcagagaccagcggagccacaggtacagtggtcccacctggcatctctcaagaacaatgtttcccctgtctcgcgatcccattccttcagtgacccttctcccaaatttgcacaccaccatcttcgttctcaggacccatgtccaccttcccgcagtgaggtgctcagtcagagctctgactctaagtcagaggcgcctgaccctacccaaaaggcttggtctagatcagacagtgacgaggtgcctccaagggttcctgtgagaacaacatctcgctcccctgttctgtcccgtcgagattccccactgcagggcagtgggcagcagaatagccaggcaggacagagaaactccaccagcagtattgagcccaggcttctgtgggagagagtggagaagctggtgcccagacctggcagtggcagctcctcagggtccagcaactcaggatcccagcccgggtctcaccctgggtctcagagtggctccggggaacgcttcagagtgagatcatcatccaagtctgaaggctctccatctcagcgcctggaaaatgcagtgaaaaaacctgaagataaaaaggaagttttcagacccctcaagcctgctgtaaggattgatctgaccgcactggccaaagagcttcgagcagtggaagatgtacggccacctcacaaagtaacggactactcctcatccagtgaggagtcggggacgacggatgaggaggacgacgatgtggagcaggaaggggctgacgagtccacctcaggaccagaggacaccagagcagcgtcatctctgaatttgagcaatggtgaaacggaatctgtgaaaaccatgattgtccatgatgatgtagaaagtgagccggccatgaccccatccaaggagggcactctaatcgtccgccagactcagtccgctagtagcacactccagaaacacaaatcttcctcctcctttacaccttttatagaccccagattactacagatttctccatctagcggaacaacagtgacatctgtggtgggattttcctgtgatgggatgagaccagaagccataaggcaagatcctacccggaaaggctcagtggtcaatgtgaatcctaccaacactaggccacagagtgacaccccggagattcgtaaatacaagaagaggtttaactctgagattctgtgtgctgccttatggggagtgaatttgctagtgggtacagagagtggcctgatgctgctggacagaagtggccaagggaaggtctatcctcttatcaaccgaagacgatttcaacaaatggacgtacttgagggcttgaatgtcttggtgacaatatctggcaaaaaggataagttacgtgtctactatttgtcctggttaagaaataaaatacttcacaatgatccagaagttgagaagaagcagggatggacaaccgtaggggatttggaaggatgtgtacattataaagttgtaaaatatgaaagaatcaaatttctggtgattgctttgaagagttctgtggaagtctatgcgtgggcaccaaagccatatcacaaatttatggcctttaagtcatttggagaattggtacataagccattactggtggatctcactgttgaggaaggccagaggttgaaagtgatctatggatcctgtgctggattccatgctgttgatgtggattcaggatcagtctatgacatttatctaccaacacatatccagtgtagcatcaaaccccatgcaatcatcatcctccccaatacagatggaatggagcttctggtgtgctatgaagatgagggggtttatgtaaacacatatggaaggatcaccaaggatgtagttctacagtggggagagatgcctacatcagtagcatatattcgatccaatcagacaatgggctggggagagaaggccatagagatccgatctgtggaaactggtcacttggatggtgtgttcatgcacaaaagggctcaaagactaaaattcttgtgtgaacgcaatgacaaggtgttctttgcctctgttcggtctggtggcagcagtcaggtttatttcatgaccttaggcaggacttctcttctgagctggtagaagcagtgtgatccagggattactggcctccagagtcttcaagatcctgagaacttggaattccttgtaactggagctc

SEQ ID NO: 278675 - DNA, 3963 bp, Artificial Sequence
  derived and/or modified sequence
atggccaacgacagccccgccaagagcctggtggacatcgacctgagcagcctgagagaccccgccggcatcttcgagctggtggaggtggtgggcaacggcacctacggccaggtgtacaagggcagacacgtgaagaccggccagctggccgccatcaaggtgatggacgtgaccgaggacgaggaggaggagatcaagctggagatcaacatgctgaagaagtacagccaccacagaaacatcgccacctactacggcgccttcatcaagaagagcccccccggccacgacgaccagctgtggctggtgatggagttctgcggcgccggcagcatcaccgacctggtgaagaacaccaagggcaacaccctgaaggaggactggatcgcctacatcagcagagagatcctgagaggcctggcccacctgcacatccaccacgtgatccacagagacatcaagggccagaacgtgctgctgaccgagaacgccgaggtgaagctggtggacttcggcgtgagcgcccagctggacagaaccgtgggcagaagaaacaccttcatcggcaccccctactggatggcccccgaggtgatcgcctgcgacgagaaccccgacgccacctacgactacagaagcgacctgtggagctgcggcatcaccgccatcgagatggccgagggcgccccccccctgtgcgacatgcaccccatgagagccctgttcctgatccccagaaaccccccccccagactgaagagcaagaagtggagcaagaagttcttcagcttcatcgagggctgcctggtgaagaactacatgcagagacccagcaccgagcagctgctgaagcaccccttcatcagagaccagcccaacgagagacaggtgagaatccagctgaaggaccacatcgacagaaccagaaagaagagaggcgagaaggacgagaccgagtacgagtacagcggcagcgaggaggaggaggaggaggtgcccgagcaggagggcgagcccagcagcatcgtgaacgtgcccggcgagagcaccctgagaagagacttcctgagactgcagcaggagaacaaggagagaagcgaggccctgagaagacagcagctgctgcaggagcagcagctgagagagcaggaggagtacaagagacagctgctggccgagagacagaagagaatcgagcagcagaaggagcagagaagaagactggaggagcagcagagaagagagagagaggccagaagacagcaggagagagagcagagaagaagagagcaggaggagaagagaagactggaggagctggagagaagaagaaaggaggaggaggagagaagaagagccgaggaggagaagagaagagtggagagagagcaggagtacatcagaagacagctggaggaggagcagagacacctggaggtgctgcagcagcagctgctgcaggagcaggccatgctgctggagtgcagatggagagagatggaggagcacagacaggccgagagactgcagagacagctgcagcaggagcaggcctacctgctgagcctgcagcacgaccacagaagaccccacccccagcacagccagcagcccccccccccccagcaggagagaagcaagcccagcttccacgcccccgagcccaaggcccactacgagcccgccgacagagccagagaggtggaggacagattcagaaagaccaaccacagcagccccgaggcccagagcaagcagaccggcagagtgctggagccccccgtgcccagcagaagcgagagcttcagcaacggcaacagcgagagcgtgcaccccgccctgcagagacccgccgagccccaggtgcagtggagccacctggccagcctgaagaacaacgtgagccccgtgagcagaagccacagcttcagcgaccccagccccaagttcgcccaccaccacctgagaagccaggacccctgcccccccagcagaagcgaggtgctgagccagagcagcgacagcaagagcgaggcccccgaccccacccagaaggcctggagcagaagcgacagcgacgaggtgccccccagagtgcccgtgagaaccaccagcagaagccccgtgctgagcagaagagacagccccctgcagggcagcggccagcagaacagccaggccggccagagaaacagcaccagcagcatcgagcccagactgctgtgggagagagtggagaagctggtgcccagacccggcagcggcagcagcagcggcagcagcaacagcggcagccagcccggcagccaccccggcagccagagcggcagcggcgagagattcagagtgagaagcagcagcaagagcgagggcagccccagccagagactggagaacgccgtgaagaagcccgaggacaagaaggaggtgttcagacccctgaagcccgccgtgagaatcgacctgaccgccctggccaaggagctgagagccgtggaggacgtgagacccccccacaaggtgaccgactacagcagcagcagcgaggagagcggcaccaccgacgaggaggacgacgacgtggagcaggagggcgccgacgagagcaccagcggccccgaggacaccagagccgccagcagcctgaacctgagcaacggcgagaccgagagcgtgaagaccatgatcgtgcacgacgacgtggagagcgagcccgccatgacccccagcaaggagggcaccctgatcgtgagacagacccagagcgccagcagcaccctgcagaagcacaagagcagcagcagcttcacccccttcatcgaccccagactgctgcagatcagccccagcagcggcaccaccgtgaccagcgtggtgggcttcagctgcgacggcatgagacccgaggccatcagacaggaccccaccagaaagggcagcgtggtgaacgtgaaccccaccaacaccagaccccagagcgacacccccgagatcagaaagtacaagaagagattcaacagcgagatcctgtgcgccgccctgtggggcgtgaacctgctggtgggcaccgagagcggcctgatgctgctggacagaagcggccagggcaaggtgtaccccctgatcaacagaagaagattccagcagatggacgtgctggagggcctgaacgtgctggtgaccatcagcggcaagaaggacaagctgagagtgtactacctgagctggctgagaaacaagatcctgcacaacgaccccgaggtggagaagaagcagggctggaccaccgtgggcgacctggagggctgcgtgcactacaaggtggtgaagtacgagagaatcaagttcctggtgatcgccctgaagagcagcgtggaggtgtacgcctgggcccccaagccctaccacaagttcatggccttcaagagcttcggcgagctggtgcacaagcccctgctggtggacctgaccgtggaggagggccagagactgaaggtgatctacggcagctgcgccggcttccacgccgtggacgtggacagcggcagcgtgtacgacatctacctgcccacccacatccagtgcagcatcaagccccacgccatcatcatcctgcccaacaccgacggcatggagctgctggtgtgctacgaggacgagggcgtgtacgtgaacacctacggcagaatcaccaaggacgtggtgctgcagtggggcgagatgcccaccagcgtggcctacatcagaagcaaccagaccatgggctggggcgagaaggccatcgagatcagaagcgtggagaccggccacctggacggcgtgttcatgcacaagagagcccagagactgaagttcctgtgcgagagaaacgacaaggtgttcttcgccagcgtgagaagcggcggcagcagccaggtgtacttcatgaccctgggcagaaccagcctgctgagctggtag

SEQ ID NO: 278676 - protein, 1170 aa, Artificial Sequence
  derived and/or modified sequence
VYKGRHVKTGQLAAIKVMDVTEDEEEEIKLEINMLKKYSHHRNIATYYGAFIKKSPPGHDDQLWLVMEFCGAGSITDLVKNTKGNTLKEDWIAYISREILRGLAHLHIHHVIHRDIKGQNVLLTENAEVKLVDFGVSAQLDRTVGRRNTFIGTPYWMAPEVIACDENPDATYDYRSDLWSCGITAIEMAEGAPPLCDMHPMRALFLIPRNPPPRLKSKKWSKKFFSFIEGCLVKNYMQRPSTEQLLKHPFIRDQPNERQVRIQLKDHIDRTRKKRGEKDETEYEYSGSEEEEEEVPEQEGEPSSIVNVPGESTLRRDFLRLQQENKERSEALRRQQLLQEQQLREQEEYKRQLLAERQKRIEQQKEQRRRLEEQQRREREARRQQEREQRRREQEEKRRLEELERRRKEEEERRRAEEEKRRVEREQEYIRRQLEEEQRHLEVLQQQLLQEQAMLLHDHRRPHPQHSQQPPPPQQERSKPSFHAPEPKAHYEPADRAREVEDRFRKTNHSSPEAQSKQTGRVLEPPVPSRSESFSNGNSESVHPALQRPAEPQVPVRTTSRSPVLSRRDSPLQGSGQQNSQAGQRNSTSIEPRLLWERVEKLVPRPGSGSSSGSSNSGSQPGSHPGSQSGSGERFRVRSSSKSEGSPSQRLENAVKKPEDKKEVFRPLKPADLTALAKELRAVEDVRPPHKVTDYSSSSEESGTTDEEDDDVEQEGADESTSGPEDTRAASSLNLSNGETESVKTMIVHDDVESEPAMTPSKEGTLIVRQTQSASSTLQKHKSSSSFTPFIDPRLLQISPSSGTTVTSVVGFSCDGMRPEAIRQDPTRKGSVVNVNPTNTRPQSDTPEIRKYKKRFNSEILCAALWGVNLLVGTESGLMLLDRSGQGKVYPLINRRRFQQMDVLEGLNVLVTISGKKDKLRVYYLSWLRNKILHNDPEVEKKQGWTTVGDLEGCVHYKVVKYERIKFLVIALKSSVEVYAWAPKPYHKFMAFKSFGELVHKPLLVDLTVEEGQRLKVIYGSCAGFHAVDVDSGSVYDIYLPTHIQCSIKPHAIIILPNTDGMELLVCYEDEGVYVNTYGRITKDVVLQWGEMPTSVAYIRSNQTMGWGEKAIEIRSVETGHLDGVFMHKRAQRLKFLCERNDKVFFASVRSGGSSQVYFMTLGRTSLLSW

SEQ ID NO: 278677 - protein, 112 aa, Artificial Sequence
  derived and/or modified sequence
MPRNQGFSEPEYSAEYSAEYSVSLPSDPDRGVGRTHEISVRNSGSCLCLPRFMRLTFVPESLENLYQTYFKRQRHETLLVLVVFAALFDCYVVVMCAVVFSSDKLASLAVAG

SEQ ID NO: 278678 - protein, 372 aa, Artificial Sequence
  derived and/or modified sequence
MLRACQLSGVTAAAQSCLCGKFVLRPLRPCRRYSTSGSSGLTTGKIAGAGLLFVGGGIGGTILYAKWDSHFRESVEKTIPYSDKLFEMVLGPAAYNVPLPKKSIQSGPLKISSVSEVMKESKQPASQLQKQKGDTPASATAGDTLSVPAPAVQPEESLKTDHPEIGEGKPTPALSEASSSSIRERPPEEVAARLAQQEKQEQVKIESLAKSLEDALRQTASVTLQAIAAIPPESLTRGVYSEETLRARFYAVQKLARRVAMIDETRNSLYQYFLSYLQSLLLFPPQQLKPPPELCPEDINTFKLLSYASYCIEHGDLELAAKFVNQLKGESRRVAQDWLKEARMTLETKQIVEILTAYASAVGIGTTQVQPE

SEQ ID NO: 278679 - DNA, 1119 bp, Artificial Sequence
  derived and/or modified sequence
atgttgcgagcctgccagctgagcggcgtcaccgccgctgcccaatcctgtctctgcggaaaattcgtgctacgaccgctgcgcccttgtaggcgatattcgacctctgggtctagcggccttacaacaggcaaaattgcaggcgcaggactgctgttcgttggaggcgggattggcggtactatcctgtacgccaagtgggattcccactttcgggaaagcgtggagaaaacgattccatacagcgacaaattgtttgaaatggtgcttggtcctgctgcctataacgttccactgcccaaaaaatctatccagtctggcccgttgaagatttcatctgtgtcagaagtgatgaaggagagcaaacaacccgcctcccagctgcaaaaacagaaaggggatacaccagcgagtgcaacagccggcgatacattgagtgttcccgctcccgccgtgcagcccgaggaatccctgaagacggaccacccggagattggagaaggcaagccaacccccgccctgtccgaggcaagctcctcttcgatccgagagcgacccccagaagaagtggctgcaagactggcgcagcaggaaaaacaagaacaggtgaaaattgagtccctggctaaaagcctggaggatgctctcagacagacggcttcagtcactctgcaggccattgccgcaataccacctgaatcactgaccaggggggtgtatagcgaggaaacactgcgcgcccgcttctacgcagttcagaagctcgccaggcgcgtggccatgattgatgagactcgcaatagcctctatcagtactttttgagctatcttcaatctcttctcttgttccccccacagcaactgaaaccacccccagaactctgccccgaagacatcaatactttcaagttactgagttatgcttcttactgtatcgagcacggggatctggagctcgctgccaaatttgtcaatcagcttaagggtgaaagtagacgagtggcgcaggactggttaaaggaggcacgtatgactttagagacaaagcagattgttgagattctcacagcctatgcttcagcagtcggcatcggcacgacgcaagtgcagcccgagtag

SEQ ID NO: 278680 - DNA, 1520 bp, Artificial Sequence
  derived and/or modified sequence
gcacacacgcaagcacgcctccacttaactcgcgccgccgcggcagctcgagtccaccagcagcgccgtccgcttgaccgagatgctgcgggcctgtcagttatcgggtgtgaccgccgccgcccagagttgtctctgtgggaagtttgtcctccgtccattgcgaccatgccgcagatactctacttcaggcagctctgggttgactactggcaaaattgctggagctggccttttgtttgttggtggaggtattggtggcactatcctatatgccaaatgggattcccatttccgggaaagtgtagagaaaaccataccttactcagacaaactcttcgagatggttcttggtcctgcagcttataatgttccattgccaaagaaatcgattcagtcgggtccactaaaaatctctagtgtatcagaagtaatgaaagaatctaaacagcctgcctcacaactccaaaaacaaaagggagatactccagcttcagcaacagcaggtgataccctgtcggtcccagcccctgcagttcagcctgaggaatctttaaaaactgatcaccctgaaattggtgaaggaaaacccacacctgcactttcagaagcatcctcatcttctataagggagcgaccacctgaagaagttgcagctcgccttgcacaacaggaaaaacaagaacaagttaaaattgagtctctagccaagagcttagaagatgctctgaggcaaactgcaagtgtcactctgcaggctattgcagctatccctccagagtccctgacccgtggggtgtacagtgaagagacccttagagcccgtttctatgctgttcaaaaactggcccgaagggtagcaatgattgatgaaaccagaaatagcttgtaccagtacttcctctcctacctacagtccctgctcctattcccacctcagcaactgaagccgcccccagagctctgccctgaggatataaacacatttaaattactgtcatatgcttcctattgcattgagcatggtgatctggagctagcagcaaagtttgtcaatcagctgaagggggaatccagacgagtggcacaggactggctgaaggaagcccgaatgaccctagaaacgaaacagatagtggaaatcctgacagcatatgccagcgccgtaggaataggaaccactcaggtgcagccagagtgaggtttaggaagattttcataaagtcatatttcatgtcaaaggaaatcagcagtgatagatgaagggttcgcagcgagagtcccggacttgtctagaaatgagcaggtttacaagtactgttctaaatgttaacacctgttgcatttatattctttccatttgctatcatgtcagtgaacgccaggagtgctttctttgcaacttgtgtaacattttctgttttttcaggttttactgatgaggcttgtgaggccaatcaaaataatgtttgtgatctctactactgttgattttgccctcggagcaaactgaataaagc

SEQ ID NO: 278681 - DNA, 1119 bp, Artificial Sequence
  derived and/or modified sequence
atgctgcgggcctgccagctgagcggcgtgacagctgctgcccagagctgcctgtgtgggaagtttgtgctgcggcccctgcggccctgccgccgctacagcaccagcggcagcagcggcctgaccaccgggaagattgctggagctggcctgctgtttgtgggcggcggcatcggcggcaccatcctgtatgccaagtgggacagccacttccgggagagcgtggagaagaccatcccctacagcgacaagctgtttgagatggtgctgggccctgctgcctacaacgtgcccctgcccaagaagagcatccagagcggccccctgaagatcagctctgtgtctgaggtgatgaaggagagcaagcagcctgccagccagctgcagaagcagaagggggacaccccagccagcgccacagctggggacaccctgtctgtgcctgccccagctgtgcagcctgaggagagcctgaagacagaccaccctgagattggagagggcaagcccaccccagccctgtctgaggccagcagcagcagcatccgggagcggcccccagaggaggtggccgcccggctggcccagcaggagaagcaggagcaggtgaagattgagagcctggccaagagcctggaggatgccctgcggcagacagcctctgtgaccctgcaggccatcgccgccatccccccagagagcctgacccggggcgtgtacagcgaggagaccctgcgggcccgcttctatgctgtgcagaagctggccaggagagtggccatgattgatgagaccaggaacagcctgtaccagtacttcctgagctacctgcagagcctgctgctcttccccccccagcagctgaagcccccacctgagctgtgcccagaggacatcaacaccttcaagctgctgtcctatgccagctactgcatcgagcacggggacctggagctggccgccaagtttgtgaaccagctgaagggggagagccggcgggtggcccaggactggctgaaggaggccaggatgaccctggagaccaagcagatcgtggagatcctgacagcctatgccagcgctgtgggcatcggcaccacccaggtgcagcctgagtag

SEQ ID NO: 278682 - DNA, 1119 bp, Artificial Sequence
  derived and/or modified sequence
atgctgcgggcctgccagctgagcggcgtgaccgccgccgcccagtcttgcctctgtggaaaattcgtcctgaggccactcaggccttgccgcaggtattcaacctcagggagttcggggctcactactggcaagatagccggagcaggcttgctgtttgtgggcgggggcatcggcggaaccattctgtacgccaagtgggacagtcacttccgggaatcagtggaaaaaactatcccttattcagataagttatttgaaatggtgctaggtcctgccgcttacaatgtcccgctccccaagaagtctattcagtcaggaccattaaaaatatcgtctgtgtccgaagtgatgaaagagtccaaacagcccgcctcgcaattacaaaagcagaaaggggatacacccgcatccgccaccgctggcgatactcttagcgtacccgcccctgccgtgcagccagaggaatctttgaaaactgaccaccctgagatcggagagggaaagcccaccccagccctgtcagaagcaagcagctcttcaattcgcgagaggccgccagaggaggtcgccgctcgccttgctcaacaggagaagcaggagcaagtgaagattgagtcacttgctaaaagcctagaggatgcgcttaggcaaactgcttctgtcacactccaagccattgccgccataccgcctgagagcctgacccgcggagtttatagcgaagagactcttcgtgccaggttttacgctgtccaaaagctcgccaggagagtagctatgattgacgagacacgtaattctctgtatcaatactttctgtcttatctccagtctctgctgttgttccctccccagcaactaaagccacctcctgaactctgtccggaagatataaacaccttcaagttgttatcctatgctagctactgtattgaacatggcgacctcgagcttgctgcaaagttcgtcaaccagctcaaaggcgagagccgccgagtggcccaggactggttgaaagaggcaagaatgacgctggagaccaagcaaattgttgagatccttacagcctacgcgtctgccgtcgggatcggcaccacacaggtgcagccagagtag

SEQ ID NO: 278683 - DNA, 1119 bp, Artificial Sequence
  derived and/or modified sequence
atgctacgtgcatgccagttgtccggggtgactgctgccgcacaatcctgcctgtgcggaaagttcgtcctacgaccccttagaccctgccgacggtattccaccagcgggtcaagtggattgacaacggggaaaatcgccggtgctggactcttatttgtcggcggtggaatcggtggcacaatattatacgctaagtgggattctcattttcgcgagtctgtggagaagacaattccctattctgataaactgtttgaaatggtcttgggcccagctgcctataatgtgccactgccaaaaaaaagcatacaaagcggtccattgaagatttcatctgtgagtgaggtaatgaaggaatctaaacaaccagccagccagctgcaaaagcagaaaggggacaccccggcatctgccaccgccggagatacattgagcgtgcctgcaccagcggtgcagccagaagaaagcctgaaaactgaccatccagagattggggaaggaaaacccacaccagccctgtcagaggcttcgtcctcaagtatcagggaaaggcctccagaagaggtcgccgctagactggctcaacaggaaaaacaggagcaagtgaagatcgagtctctggcaaaatcccttgaggacgcacttcggcagacagctagcgtaaccctgcaagccatcgctgcgatacccccagaaagtcttactaggggcgtgtactcggaagagacactgcgagcaagattctacgctgtccaaaagctagcgagaagggtagcaatgatagatgagacccgaaacagcctgtaccagtacttcctttcctatttgcaaagtctgctgctttttcccccacagcagttaaagccacctccggagttgtgtcctgaagatatcaatacttttaagctgctgtcatatgcatcatattgcattgagcacggagatctggaactcgccgcaaagttcgttaatcagctgaagggggaaagtcgaagagtcgcacaggactggttgaaagaagctcgcatgaccctcgaaactaaacagatcgtagagattctcaccgcctatgcctccgctgtgggcattgggaccacccaggtccagcccgaatag

SEQ ID NO: 278684 - DNA, 1119 bp, Artificial Sequence
  derived and/or modified sequence
atgctgagagcctgccagctgagcggcgtgaccgccgccgcccagagctgcctgtgcggcaagttcgtgctgagacccctgagaccctgcagaagatacagcaccagcggcagcagcggcctgaccaccggcaagatcgccggcgccggcctgctgttcgtgggcggcggcatcggcggcaccatcctgtacgccaagtgggacagccacttcagagagagcgtggagaagaccatcccctacagcgacaagctgttcgagatggtgctgggccccgccgcctacaacgtgcccctgcccaagaagagcatccagagcggccccctgaagatcagcagcgtgagcgaggtgatgaaggagagcaagcagcccgccagccagctgcagaagcagaagggcgacacccccgccagcgccaccgccggcgacaccctgagcgtgcccgcccccgccgtgcagcccgaggagagcctgaagaccgaccaccccgagatcggcgagggcaagcccacccccgccctgagcgaggccagcagcagcagcatcagagagagaccccccgaggaggtggccgccagactggcccagcaggagaagcaggagcaggtgaagatcgagagcctggccaagagcctggaggacgccctgagacagaccgccagcgtgaccctgcaggccatcgccgccatcccccccgagagcctgaccagaggcgtgtacagcgaggagaccctgagagccagattctacgccgtgcagaagctggccagaagagtggccatgatcgacgagaccagaaacagcctgtaccagtacttcctgagctacctgcagagcctgctgctgttccccccccagcagctgaagcccccccccgagctgtgccccgaggacatcaacaccttcaagctgctgagctacgccagctactgcatcgagcacggcgacctggagctggccgccaagttcgtgaaccagctgaagggcgagagcagaagagtggcccaggactggctgaaggaggccagaatgaccctggagaccaagcagatcgtggagatcctgaccgcctacgccagcgccgtgggcatcggcaccacccaggtgcagcccgagtag

SEQ ID NO: 278685 - protein, 726 aa, Artificial Sequence
  derived and/or modified sequence
MLRACQLSGVTAAAQSCLCGKFVLRPLRPCRRYSTSGSSGLTTGKIAGAGLLFVGGGIGGTILYAKWDSHFRESVEKTIPYSDKLFEMVLGPAAYNVPLPKKSIQSGPLKISSVSEVMKESKQPASQLQKQKGDTPASATAPTEAAQIISAAGDTLSVPAPAVQPEESLKTDHPEIGEGKPTPALSALAKSLEDALRQTASVTLQAIAAQNAAVQAVNAHSNILKAAMDNSEIAGEKKSAQWRTVEGALKERRKAVDEAADALLKAKEELEKMKSVIENAKKKEVAGAKPHITAAEGKLHNMIVDLDNVVKKVQAAQSEAKVVSQYHELVVQARDDFKRELDSITPEVLPGWKGMSEYNLADKLSTDDLNSLIAHAHRRIDQLNRELAEQKATEKQHITLALEKQKLEEKRAFDSAVAKALEHHRSEIQAEQDRKIEEVRDAMENEMRTQLRRQAAAHTDHLRDVLRVQEQELKSEFEQNLSEKLSEQELQFRRLSQEQVDNFTLDINTAYARLRGIEQAVQSHAVAEEEARKAHQLWLSVEALKYSMKTSSAETPTIPLGSAVEAIKANCSDNEFTQALTAAIPPESLTRGVYSEETLRARFYAVQKLARRVAMIDETRNSLYQYFLSYLQSLLLFPPQQLKPPPELCPEDINTFKLLSYASYCIEHGDLELAAKFVNQLKGESRRVAQDWLKEARMTLETKQIVEILTAYASAVGIGTTQVQPE

SEQ ID NO: 278686 - DNA, 2181 bp, Artificial Sequence
  derived and/or modified sequence
atgctcagagcctgccagcttagcggggtgaccgctgctgcacagtcctgcttgtgtggtaagttcgttctccgtcccctgcgcccctgtagacgttacagcacctctgggtcttccggattgacaacagggaagattgccggggccggtctgctattcgttggcggcgggatcggcggcaccatactttacgccaagtgggattcacatttccgggaatccgttgagaaaaccatcccttacagtgacaagttgttcgaaatggtgctcggccccgctgcgtataatgtccccctcccgaagaagtctatacagagtggacctctgaagatttcatccgtatctgaagtgatgaaagaaagcaagcaaccagcctcccagctgcagaaacagaagggggacaccccagcttccgctactgcgcccacggaagccgcacaaatcatctcagcggccggcgataccctttcagttcctgctccggctgttcagcctgaagagtcattgaagaccgaccatccagagatcggcgagggcaaacctacgcctgccctgtccgctctggcgaagagcctcgaagacgcactgagacagaccgccagtgtcactctgcaggccattgcagcccagaatgcagctgtgcaggccgtcaatgctcactcgaacattctgaaggctgctatggataactccgagatagcaggagagaaaaagagcgcccagtggcggaccgttgaaggcgcccttaaggaaagacgcaaggctgtcgatgaggccgccgacgcgctccttaaagcaaaagaggagctcgaaaagatgaaatccgtcattgaaaacgcgaagaaaaaagaggttgctggagccaagccccatatcaccgctgccgagggcaaactccacaacatgatcgttgatctggacaacgtcgtcaaaaaagttcaagctgcacaaagtgaagcaaaggtcgtttcacagtaccacgaattggtggtccaggctcgagatgatttcaaacgagagttagacagtattacgcctgaagtgttgccggggtggaaggggatgagcgagtacaatttagcagataaactaagcacggacgatctgaactccttgatcgctcacgctcataggcgtatcgaccagctcaatcgggaactcgcagagcagaaggcgacagagaagcaacatattaccctggccctcgagaaacaaaaactggaggagaagagagcctttgactccgctgtggcaaaggccctcgagcaccatcgatccgagatccaggccgagcaggaccggaagatagaagaggttcgtgacgcaatggagaacgagatgagaacacagctaaggagacaggcggctgcccacaccgaccacctcagggacgtcttgagagtgcaggagcaggagctcaagagcgaatttgaacagaacttgtctgagaagctgtctgaacaggagctccagttcagacggctatcccaagagcaagtcgataattttaccctggatatcaatacagcatatgctcggcttcggggcattgagcaagcagttcagagccatgcagttgcggaggaggaggccaggaaggcccatcagctgtggctgtccgtcgaggctctcaaatatagtatgaagacgtcctcagctgagacgcccacaatccctctgggctcagccgtggaggctatcaaagctaactgttccgacaatgagttcactcaggccttaaccgctgccattccccctgaaagtcttacacggggggtgtactcagaagagaccctgcgcgcacgcttttatgccgttcaaaaactcgctaggagagtggctatgattgatgagacaagaaacagtctttaccagtactttctaagctatctccagtccctgctgctttttccaccgcaacagctcaagccacccccagagctgtgcccggaggatatcaatacatttaaattgcttagctatgcatcttattgtatcgagcatggcgatcttgaactggcggctaagtttgtgaaccagctgaagggagagagccgaagagtggcacaggactggcttaaagaagctaggatgacattggagacaaagcagattgtggaaatattgactgcatacgcttcagctgtcggcatcggcactacccaagtgcagccagagtag

SEQ ID NO: 278687 - DNA, 2545 bp, Artificial Sequence
  derived and/or modified sequence
ctcgagtccaccagcagcgccgtccgcttgaccgagatgctgcgggcctgtcagttatcgggtgtgaccgccgccgcccagagttgtctctgtgggaagtttgtcctccgtccattgcgaccatgccgcagatactctacttcaggcagctctgggttgactactggcaaaattgctggagctggccttttgtttgttggtggaggtattggtggcactatcctatatgccaaatgggattcccatttccgggaaagtgtagagaaaaccataccttactcagacaaactcttcgagatggttcttggtcctgcagcttataatgttccattgccaaagaaatcgattcagtcgggtccactaaaaatctctagtgtatcagaagtaatgaaagaatctaaacagcctgcctcacaactccaaaaacaaaagggagatactccagcttcagcaacagcacctacagaagcggctcaaattatttctgcagcaggtgataccctgtcggtcccagcccctgcagttcagcctgaggaatctttaaaaactgatcaccctgaaattggtgaaggaaaacccacacctgcactttcagctctagccaagagcttagaagatgctctgaggcaaactgcaagtgtcactctgcaggctattgcagctcagaatgctgcggtccaggctgtcaatgcacactccaacatattgaaagccgccatggacaattctgagattgcaggcgagaagaaatctgctcagtggcgcacagtggagggtgcattgaaggaacgcagaaaggcagtagatgaagctgccgatgcccttctcaaagccaaagaagagttagagaagatgaaaagtgtgattgaaaatgcaaagaaaaaagaggttgctggggccaagcctcatataactgctgcagagggtaaacttcacaacatgatagttgatctggataatgtggtcaaaaaggtccaagcagctcagtctgaggctaaggttgtatctcagtatcatgagctggtggtccaagctcgggatgactttaaacgagagctggacagtattactccagaagtccttcctgggtggaaaggaatgagtgagtacaacttagctgacaagctctctactgatgatctgaactccctcattgctcatgcacatcgtcgtattgatcagctgaacagagagctggcagaacagaaggccaccgaaaagcagcacatcacgttagccttggagaaacaaaagctggaagaaaagcgggcatttgactctgcagtagcaaaagcattagaacatcacagaagtgaaatacaggctgaacaggacagaaagatagaagaagtcagagatgccatggaaaatgaaatgagaacccagcttcgccgacaggcagctgcccacactgatcacttgcgagatgtccttagggtacaagaacaggaattgaagtctgaatttgagcagaacctgtctgagaaactctctgaacaagaattacaatttcgtcgtctcagtcaagagcaagttgacaactttactctggatataaatactgcctatgccagactcagaggaatcgaacaggctgttcagagccatgcagttgctgaagaggaagccagaaaagcccaccaactctggctttcagtggaggcattaaagtacagcatgaagacctcatctgcagaaacacctactatcccgctgggtagtgcagttgaggccatcaaagccaactgttctgataatgaattcacccaagctttaaccgcagctatccctccagagtccctgacccgtggggtgtacagtgaagagacccttagagcccgtttctatgctgttcaaaaactggcccgaagggtagcaatgattgatgaaaccagaaatagcttgtaccagtacttcctctcctacctacagtccctgctcctattcccacctcagcaactgaagccgcccccagagctctgccctgaggatataaacacatttaaattactgtcatatgcttcctattgcattgagcatggtgatctggagctagcagcaaagtttgtcaatcagctgaagggggaatccagacgagtggcacaggactggctgaaggaagcccgaatgaccctagaaacgaaacagatagtggaaatcctgacagcatatgccagcgccgtaggaataggaaccactcaggtgcagccagagtgaggtttaggaagattttcataaagtcatatttcatgtcaaaggaaatcagcagtgatagatgaagggttcgcagcgagagtcccggacttgtctagaaatgagcaggtttacaagtactgttctaaatgttaacacctgttgcatttatattctttccatttgctatcatgtcagtgaacgccaggagtgctttctttgcaacttgtgtaacattttctgttttttcaggttttactgatgaggcttgtgaggccaatcaaaataatgtttgtgatctctactactgttgattttgccctcggagcaaactgaataaagcaacaagatg

SEQ ID NO: 278688 - DNA, 2181 bp, Artificial Sequence
  derived and/or modified sequence
atgctgcgggcctgccagctgagcggcgtgacagctgctgcccagagctgcctgtgtgggaagtttgtgctgcggcccctgcggccctgccgccgctacagcaccagcggcagcagcggcctgaccaccgggaagattgctggagctggcctgctgtttgtgggcggcggcatcggcggcaccatcctgtatgccaagtgggacagccacttccgggagagcgtggagaagaccatcccctacagcgacaagctgtttgagatggtgctgggccctgctgcctacaacgtgcccctgcccaagaagagcatccagagcggccccctgaagatcagctctgtgtctgaggtgatgaaggagagcaagcagcctgccagccagctgcagaagcagaagggggacaccccagccagcgccacagcccccacagaagctgcccagatcatctctgctgctggggacaccctgtctgtgcctgccccagctgtgcagcctgaggagagcctgaagacagaccaccctgagatcggggagggcaagcccaccccagccctgagcgccctggccaagagcctggaggatgccctgcggcagacagcctctgtgaccctgcaggccatcgccgcccagaatgctgctgtgcaggccgtgaatgcccacagcaacatcctgaaggccgccatggacaacagcgagattgctggggagaagaagagcgcccagtggaggacagtggagggcgccctgaaggagaggaggaaggctgtggatgaagctgctgatgccctgctgaaggccaaggaggagctggagaagatgaagtctgtgattgaaaatgccaagaagaaggaggtggccggggccaagccccacatcacagctgctgagggcaagctgcacaacatgattgtggacctggacaacgtggtgaagaaggtgcaggccgcccagagcgaggccaaggtggtgtcccagtaccacgagctggtggtgcaggccagagatgacttcaagcgggagctggacagcatcaccccagaggtgctgcccggctggaagggcatgtctgagtacaacctggccgacaagctgagcacagatgacctgaacagcctgattgcccacgcccacagaagaattgaccagctgaaccgggagctggccgagcagaaggccacagagaagcagcacatcaccctggccctggagaagcagaagctggaggagaagagggcctttgattctgctgtggccaaggccctggagcaccacaggtctgagatccaggccgagcaggacaggaagattgaggaggtgagagatgccatggagaatgagatgaggacccagctgcggcggcaggccgccgcccacacagaccacctgagagatgtgctgcgggtgcaggagcaggagctgaagtcagaatttgagcagaacctgtctgagaagctgtctgagcaggagctgcagttccggcggctgagccaggagcaggtggacaacttcaccctggacatcaacacagcctatgcccggctgcggggcatcgagcaggccgtgcagagccatgctgtggccgaggaggaggccaggaaggcccaccagctgtggctgtctgtggaggccctgaagtacagcatgaagaccagcagcgctgagacccccaccatccccctgggcagcgctgtggaggccatcaaggccaactgcagcgacaatgagttcacccaggccctgacagctgccatccccccagagagcctgacccggggcgtgtacagcgaggagaccctgcgggcccgcttctatgctgtgcagaagctggccaggagagtggccatgattgatgagaccaggaacagcctgtaccagtacttcctgagctacctgcagagcctgctgctcttccccccccagcagctgaagcccccacctgagctgtgcccagaggacatcaacaccttcaagctgctgtcctatgccagctactgcatcgagcacggggacctggagctggccgccaagtttgtgaaccagctgaagggggagagccggcgggtggcccaggactggctgaaggaggccaggatgaccctggagaccaagcagatcgtggagatcctgacagcctatgccagcgctgtgggcatcggcaccacccaggtgcagcctgagtag

SEQ ID NO: 278689 - DNA, 2181 bp, Artificial Sequence
  derived and/or modified sequence
atgctgcgggcctgccagctgagcggcgtgaccgccgccgcccagtcctgtctttgcggtaagttcgttctacgtcccctgagaccgtgtaggcggtacagcaccagcggatccagcggcctgacaacaggaaagattgcaggagcgggcctactattcgttggaggaggaatcggaggaaccattctctacgccaagtgggactcacatttccgggaaagtgtcgagaaaaccataccctacagcgacaagctgtttgagatggtgctcggccctgccgcatacaacgtgcccctaccaaagaagagtatccagtctggccctttgaaaatctccagcgtttccgaggtgatgaaggagtcaaagcaacctgcctcacagcttcaaaagcagaaaggggacactccagcaagtgctactgcccctaccgaggccgcccagatcatttctgcagcgggcgatacattgagtgtgcccgctccagccgtgcagcctgaggagagtttgaaaaccgaccatcccgaaataggcgaggggaagcccacccccgccttgagcgctctggctaagtcccttgaggacgcgctgagacagactgcctcggtcacgttgcaagccatcgccgcccagaacgcagccgttcaagctgtgaatgctcatagcaatatactgaaagccgccatggacaattcagagattgctggcgaaaaaaagagtgctcagtggcggactgtggagggggctctaaaagagcgtaggaaagctgtcgacgaagcagcagacgctttactgaaagccaaggaagagctcgaaaaaatgaagtcggtgatcgaaaatgcgaaaaaaaaggaagttgccggggccaagcctcacataacggccgcagagggaaaactccacaatatgattgtggacctggacaatgtggtgaagaaggtccaagctgcccagtcggaggccaaggtggtgtcacagtaccacgagttggtggttcaggctcgggatgatttcaagagagagctggattcgatcactcccgaggtgctgccagggtggaagggcatgtctgagtacaatttggccgataaactgtcaaccgatgacctcaacagcctgatcgcccatgcgcataggcggatcgaccagctcaacagggagcttgccgaacagaaggccacagagaaacaacacataacactcgctctggaaaaacagaagcttgaagaaaagcgtgcttttgacagtgccgtggccaaggccttggaacatcatcgaagtgagattcaggcggagcaggatcggaagatagaggaagtgcgagatgccatggagaacgaaatgagaacgcaactacggcgacaagctgccgctcacaccgaccacctgcgagatgtcctccgggttcaagagcaggaacttaaatccgaattcgaacagaacttatcggaaaagctgtcggaacaggaactccagtttcgacgcttgtcccaggaacaggtcgataatttcaccctagatattaacacagcttacgctcggttgaggggaatagagcaggccgtacaatcgcatgctgtggcggaagaagaggcacgcaaggcacatcagctgtggctgagtgtggaggctttgaagtacagtatgaagacaagcagcgctgaaaccccaactatccctctgggtagtgccgttgaggcaattaaggccaattgcagtgataatgagtttacacaggctctgacagccgccatcccaccggaatccctcaccagaggggtgtactcggaagagaccctccgtgcaaggttttacgcagtacagaaactagccaggagagtggccatgattgatgaaactagaaactcgctctaccagtatttcctttcatatttacagtctctccttctgttccctccgcagcagttgaagccacctccagagctctgccctgaagatatcaatacgttcaagttactgagctacgcgtcctattgtatcgagcatggagatctggagctggccgccaagtttgtgaaccaattgaagggtgagtcacgccgagtcgcccaggactggctcaaggaagcccgcatgaccctagagactaagcagattgtggaaatcctgacggcctatgccagtgccgtggggatcggaacaacacaagtgcagcctgagtag

SEQ ID NO: 278690 - DNA, 2181 bp, Artificial Sequence
  derived and/or modified sequence
atgctgcgggcatgccagttaagcggcgtaactgccgcagcccagagctgtttgtgtggcaagttcgtccttagaccactgaggccatgccgtcgctattctacttcagggtcttctggtctgaccaccggcaagattgcaggcgcaggtctgctgtttgttggaggcggaattggaggcaccattctctacgcaaaatgggacagccacttccgcgagagtgtcgaaaagacaattccatactctgacaagctgttcgagatggtcctgggcccagcggcatacaatgttcctctgcccaagaagtctattcaaagcgggcctctcaaaatatcctccgtcagcgaagtgatgaaggagtctaaacagccagcatcacagctgcagaaacagaagggtgacacacccgcatcagcgactgcgccaaccgaagcagcacagatcatttcagctgctggtgacacattgtcagttcccgctcccgcagtgcaacccgaggaaagtctgaagaccgaccatccagaaatcggagagggaaaacccacacccgcattaagcgctctggctaagtccttagaggatgccctgcgccagaccgcgagtgttacactgcaggccattgcagcgcagaacgctgccgtgcaggcagtcaacgcccacagcaatatcctcaaggctgccatggataactctgaaattgccggtgagaagaaatccgctcagtggcgcacagtcgagggtgccctgaaagagcgaagaaaagctgttgatgaggcagcagatgctctgcttaaggcaaaggaagaactggagaagatgaaatccgtcatagaaaacgccaaaaaaaaagaggtcgccggtgctaagccacacattaccgctgccgaaggaaaacttcacaatatgatcgttgacctggacaacgtggtcaaaaaggtacaggccgctcagtcagaggcgaaagtcgtctcacagtatcacgaattggtcgtgcaggccagagacgatttcaaacgggaactggacagcatcacccctgaagtattgcccggttggaaaggcatgtccgaatataatctggctgataaattaagcacagacgacctaaatagtctcatcgcccacgctcaccgtcgaatcgaccagttgaaccgtgagctggcagaacaaaaggccacagaaaagcaacacattacattagcccttgagaagcaaaaacttgaagaaaagagggccttcgatagtgctgtggccaaggccttggagcatcaccggagcgagattcaagccgagcaagatcgaaagattgaagaggtcagggacgccatggagaacgaaatgagaacacagcttagaagacaggctgccgctcacactgatcaccttcgggatgtgctgcgagtgcaggagcaggaactgaagagtgagttcgaacaaaacttatctgagaagctgtccgagcaggagttgcaatttaggcggctgagtcaggagcaggtcgacaactttaccttagacatcaataccgcctatgctcgactgcgcggtatagagcaggccgtacagtcccatgctgtggcagaggaggaagcgaggaaagctcaccagctgtggctcagcgtcgaggctcttaagtatagtatgaagacgagcagcgccgaaacgcccacgatcccattaggctctgcagtcgaggccataaaggccaattgctccgataatgaatttacgcaggcgttgacagctgccatccccccagaaagtcttacccggggagtttattccgaggaaacacttcgagcgaggttttatgctgtgcagaaacttgcccgtagagtggcaatgattgatgagacccgtaactcactgtaccaatactttctatcatatctgcaatccttactgctgtttccacctcagcaattaaaacctcccccagaactgtgtcctgaagatataaatacttttaaactcttatcttatgcttcatactgcattgagcatggggacttagagctcgccgctaagttcgttaaccaactgaagggcgaaagcaggagggtcgcgcaggattggttaaaagaggccaggatgacacttgagactaaacagatcgtggagatcctgaccgcgtacgcctccgcagtgggcatcggaaccacgcaggtgcagcccgagtag

SEQ ID NO: 278691 - DNA, 2181 bp, Artificial Sequence
  derived and/or modified sequence
atgctgagagcctgccagctgagcggcgtgaccgccgccgcccagagctgcctgtgcggcaagttcgtgctgagacccctgagaccctgcagaagatacagcaccagcggcagcagcggcctgaccaccggcaagatcgccggcgccggcctgctgttcgtgggcggcggcatcggcggcaccatcctgtacgccaagtgggacagccacttcagagagagcgtggagaagaccatcccctacagcgacaagctgttcgagatggtgctgggccccgccgcctacaacgtgcccctgcccaagaagagcatccagagcggccccctgaagatcagcagcgtgagcgaggtgatgaaggagagcaagcagcccgccagccagctgcagaagcagaagggcgacacccccgccagcgccaccgcccccaccgaggccgcccagatcatcagcgccgccggcgacaccctgagcgtgcccgcccccgccgtgcagcccgaggagagcctgaagaccgaccaccccgagatcggcgagggcaagcccacccccgccctgagcgccctggccaagagcctggaggacgccctgagacagaccgccagcgtgaccctgcaggccatcgccgcccagaacgccgccgtgcaggccgtgaacgcccacagcaacatcctgaaggccgccatggacaacagcgagatcgccggcgagaagaagagcgcccagtggagaaccgtggagggcgccctgaaggagagaagaaaggccgtggacgaggccgccgacgccctgctgaaggccaaggaggagctggagaagatgaagagcgtgatcgagaacgccaagaagaaggaggtggccggcgccaagccccacatcaccgccgccgagggcaagctgcacaacatgatcgtggacctggacaacgtggtgaagaaggtgcaggccgcccagagcgaggccaaggtggtgagccagtaccacgagctggtggtgcaggccagagacgacttcaagagagagctggacagcatcacccccgaggtgctgcccggctggaagggcatgagcgagtacaacctggccgacaagctgagcaccgacgacctgaacagcctgatcgcccacgcccacagaagaatcgaccagctgaacagagagctggccgagcagaaggccaccgagaagcagcacatcaccctggccctggagaagcagaagctggaggagaagagagccttcgacagcgccgtggccaaggccctggagcaccacagaagcgagatccaggccgagcaggacagaaagatcgaggaggtgagagacgccatggagaacgagatgagaacccagctgagaagacaggccgccgcccacaccgaccacctgagagacgtgctgagagtgcaggagcaggagctgaagagcgagttcgagcagaacctgagcgagaagctgagcgagcaggagctgcagttcagaagactgagccaggagcaggtggacaacttcaccctggacatcaacaccgcctacgccagactgagaggcatcgagcaggccgtgcagagccacgccgtggccgaggaggaggccagaaaggcccaccagctgtggctgagcgtggaggccctgaagtacagcatgaagaccagcagcgccgagacccccaccatccccctgggcagcgccgtggaggccatcaaggccaactgcagcgacaacgagttcacccaggccctgaccgccgccatcccccccgagagcctgaccagaggcgtgtacagcgaggagaccctgagagccagattctacgccgtgcagaagctggccagaagagtggccatgatcgacgagaccagaaacagcctgtaccagtacttcctgagctacctgcagagcctgctgctgttccccccccagcagctgaagcccccccccgagctgtgccccgaggacatcaacaccttcaagctgctgagctacgccagctactgcatcgagcacggcgacctggagctggccgccaagttcgtgaaccagctgaagggcgagagcagaagagtggcccaggactggctgaaggaggccagaatgaccctggagaccaagcagatcgtggagatcctgaccgcctacgccagcgccgtgggcatcggcaccacccaggtgcagcccgagtag

SEQ ID NO: 278692 - protein, 659 aa, Artificial Sequence
  derived and/or modified sequence
MLRACQLSGVTAAAQSCLCGKFVLRPLRPCRRYSTSGSSGLTTGKIAGAGLLFVGGGIGGTILYAKWDSHFRESVEKTIPYSDKLFEMVLGPAAYNVPLPKKSIQSGPLKISSVSEVMKESKQPASQLQKQKGDTPASATALAKSLEDALRQTASVTLQAIAAQNAAVQAVNAHSNILKAAMDNSEIAGEKKSAQWRTVEGALKERRKAVDEAADALLKAKEELEKMKSVIENAKKKEVAGAKPHITAAEGKLHNMIVDLDNVVQARDDFKRELDSITPEVLPGWKGMSVSDLADKLSTDDLNSLIAHAHRRIDQLNRELAEQKATEKQHITLALEKQKLEEKRAFDSAVAKALEHHRSEIQAEQDRKIEEVRDAMENEMRTQLRRQAAAHTDHLRDVLRVQEQELKSEFEQNLSEKLSEQELQFRRLSQEQVDNFTLDINTAYARLRGIEQAVQSHAVAEEEARKAHQLWLSVEALKYSMKTSSAETPTIPLGSAVEAIKANCSDNEFTQALTAAIPPESLTRGVYSEETLRARFYAVQKLARRVAMIDETRNSLYQYFLSYLQSLLLFPPQQLKPPPELCPEDINTFKLLSYASYCIEHGDLELAAKFVNQLKGESRRVAQDWLKEARMTLETKQIVEILTAYASAVGIGTTQVQPE

SEQ ID NO: 278693 - DNA, 1980 bp, Artificial Sequence
  derived and/or modified sequence
atgctgagggcatgccagctgtccggcgttacagcagccgcgcaaagctgtctttgtgggaagttcgtactgcgccccctgcgtccctgtaggaggtactctacctcagggagtagcgggttgacaaccgggaagatcgctggcgcaggtctgctcttcgtcggaggtggaatcggtggaacaatcctgtatgcaaagtgggatagtcatttcagagaaagtgttgagaaaaccattccctacagtgacaaactgtttgagatggtgttaggacccgctgcatataatgttcccctgccgaaaaagtctatccagtccggcccattaaaaatctcttctgtgagcgaagtgatgaaggagagcaagcagcctgcaagccagctgcaaaagcagaagggcgatacacctgcttccgcaacagcgctggctaagagtctcgaggatgccctgaggcagaccgcttcagtgacactgcaggccatcgcagcacagaacgctgcagtccaggccgtcaatgcccatagcaatattcttaaggctgctatggacaattccgaaatagccggcgaaaagaaaagtgcccaatggcggaccgtggagggagccctaaaggagagacggaaggctgtcgacgaagcagccgacgctttactgaaggctaaggaagagctggagaagatgaagtctgtgattgaaaacgcaaaaaaaaaggaagtggccggagccaagccacacatcactgcagccgaagggaagttgcataatatgattgtggatctggataacgtcgtgcaggctagggacgactttaagcgggaactcgattcaatcacccctgaggtgctacccgggtggaagggcatgtccgtaagcgatctggcagacaaactaagcaccgatgatttgaacagcctgatagcccacgcccacagacggatcgaccaactgaatagagaactggcagagcaaaaagccaccgagaaacagcatattacactcgctttggaaaagcaaaagctggaggagaagcgggctttcgatagcgctgtggctaaagctctcgagcatcatcgcagtgagatccaagcagagcaagatcgaaaaattgaagaggttcgggatgcaatggaaaatgaaatgcgtacacagttgcggaggcaggcagccgcccacacagaccacctgcgcgacgtcctgcgagtccaggagcaggaactgaagtctgaattcgagcagaacttaagtgaaaagcttagcgaacaggaactgcagttccggaggttgtcgcaagaacaggtcgacaacttcactctggatatcaacactgcctatgcccggttgcgaggcattgagcaggctgtgcagagccatgccgtggccgaagaggaagcccgtaaggcgcaccagttatggctctctgttgaggccctgaaatacagtatgaaaacctcgtctgcagagactccaaccatccccttaggatctgctgtggaagctatcaaggcaaactgttccgataatgagtttacacaggccctgacagctgccatccctcctgagagcttgacccggggggtttatagtgaagagacgctgcgcgcacgcttttatgccgtgcagaaactggcaagacgcgtggctatgattgacgagacccgcaattcgttgtatcaatacttcttgtcgtacctccaatctctgctcctgtttccacctcagcagttgaagcccccccctgaattgtgccctgaggacatcaataccttcaaactgctgtcctacgcctcctactgcattgagcacggggacctagaactggccgcaaaatttgtgaatcagctgaaaggagaatctagaagggtggcacaggattggctgaaggaggctaggatgaccctggagactaaacagatcgtggagattctgaccgcatatgctagcgccgtaggtattgggaccacgcaggtacagcctgagtag

SEQ ID NO: 278694 - DNA, 2088 bp, Artificial Sequence
  derived and/or modified sequence
caccagcagcgccgtccgcttgaccgagatgctgcgggcctgtcagttatcgggtgtgaccgccgccgcccagagttgtctctgtgggaagtttgtcctccgtccattgcgaccatgccgcagatactctacttcaggcagctctgggttgactactggcaaaattgctggagctggccttttgtttgttggtggaggtattggtggcactatcctatatgccaaatgggattcccatttccgggaaagtgtagagaaaaccataccttactcagacaaactcttcgagatggttcttggtcctgcagcttataatgttccattgccaaagaaatcgattcagtcgggtccactaaaaatctctagtgtatcagaagtaatgaaagaatctaaacagcctgcctcacaactccaaaaacaaaagggagatactccagcttcagcaacagctctagccaagagcttagaagatgctctgaggcaaactgcaagtgtcactctgcaggctattgcagctcagaatgctgcggtccaggctgtcaatgcacactccaacatattgaaagccgccatggacaattctgagattgcaggcgagaagaaatctgctcagtggcgcacagtggagggtgcattgaaggaacgcagaaaggcagtagatgaagctgccgatgcccttctcaaagccaaagaagagttagagaagatgaaaagtgtgattgaaaatgcaaagaaaaaagaggttgctggggccaagcctcatataactgctgcagagggtaaacttcacaacatgatagttgatctggataatgtggtccaagctcgggatgactttaaacgagagctggacagtattactccagaagtccttcctgggtggaaaggaatgagtgtttcagacttagctgacaagctctctactgatgatctgaactccctcattgctcatgcacatcgtcgtattgatcagctgaacagagagctggcagaacagaaggccaccgaaaagcagcacatcacgttagccttggagaaacaaaagctggaagaaaagcgggcatttgactctgcagtagcaaaagcattagaacatcacagaagtgaaatacaggctgaacaggacagaaagatagaagaagtcagagatgccatggaaaatgaaatgagaacccagcttcgccgacaggcagctgcccacactgatcacttgcgagatgtccttagggtacaagaacaggaattgaagtctgaatttgagcagaacctgtctgagaaactctctgaacaagaattacaatttcgtcgtctcagtcaagagcaagttgacaactttactctggatataaatactgcctatgccagactcagaggaatcgaacaggctgttcagagccatgcagttgctgaagaggaagccagaaaagcccaccaactctggctttcagtggaggcattaaagtacagcatgaagacctcatctgcagaaacacctactatcccgctgggtagtgcagttgaggccatcaaagccaactgttctgataatgaattcacccaagctttaaccgcagctatccctccagagtccctgacccgtggggtgtacagtgaagagacccttagagcccgtttctatgctgttcaaaaactggcccgaagggtagcaatgattgatgaaaccagaaatagcttgtaccagtacttcctctcctacctacagtccctgctcctattcccacctcagcaactgaagccgcccccagagctctgccctgaggatataaacacatttaaattactgtcatatgcttcctattgcattgagcatggtgatctggagctagcagcaaagtttgtcaatcagctgaagggggaatccagacgagtggcacaggactggctgaaggaagcccgaatgaccctagaaacgaaacagatagtggaaatcctgacagcatatgccagcgccgtaggaataggaaccactcaggtgcagccagagtgaggtttaggaagattttcataaagtcatatttcatgtcaaaggaaatcagcagtgatagatgaagggttcgcagcgagagt

SEQ ID NO: 278695 - DNA, 1980 bp, Artificial Sequence
  derived and/or modified sequence
atgctgcgggcctgccagctgagcggcgtgacagctgctgcccagagctgcctgtgtgggaagtttgtgctgcggcccctgcggccctgccgccgctacagcaccagcggcagcagcggcctgaccaccgggaagattgctggagctggcctgctgtttgtgggcggcggcatcggcggcaccatcctgtatgccaagtgggacagccacttccgggagagcgtggagaagaccatcccctacagcgacaagctgtttgagatggtgctgggccctgctgcctacaacgtgcccctgcccaagaagagcatccagagcggccccctgaagatcagctctgtgtctgaggtgatgaaggagagcaagcagcctgccagccagctgcagaagcagaagggggacaccccagccagcgccacagccctggccaagagcctggaggatgccctgcggcagacagcctctgtgaccctgcaggccatcgccgcccagaatgctgctgtgcaggccgtgaatgcccacagcaacatcctgaaggccgccatggacaacagcgagattgctggggagaagaagagcgcccagtggaggacagtggagggcgccctgaaggagaggaggaaggctgtggatgaagctgctgatgccctgctgaaggccaaggaggagctggagaagatgaagtctgtgattgaaaatgccaagaagaaggaggtggccggggccaagccccacatcacagctgctgagggcaagctgcacaacatgattgtggacctggacaacgtggtgcaggccagagatgacttcaagcgggagctggacagcatcaccccagaggtgctgcccggctggaagggcatgtctgtgtctgacctggccgacaagctgagcacagatgacctgaacagcctcatcgcccacgcccacagaagaattgaccagctgaaccgggagctggccgagcagaaggccacagagaagcagcacatcaccctggccctggagaagcagaagctggaggagaagagggcctttgacagcgctgtggccaaggccctggagcaccacaggtctgagatccaggccgagcaggacaggaagattgaggaggtgagagatgccatggagaatgagatgaggacccagctgcggcggcaggccgccgcccacacagaccacctgagagatgtgctgcgggtgcaggagcaggagctgaagtcagaatttgagcagaacctgtctgagaagctgtctgagcaggagctgcagttccggcggctgagccaggagcaggtggacaacttcaccctggacatcaacacagcctatgcccggctgcggggcatcgagcaggccgtgcagagccatgctgtggccgaggaggaggccaggaaggcccaccagctgtggctgtctgtggaggccctgaagtacagcatgaagaccagcagcgctgagacccccaccatccccctgggcagcgctgtggaggccatcaaggccaactgcagcgacaatgagttcacccaggccctgacagctgccatccccccagagagcctgacccggggcgtgtacagcgaggagaccctgcgggcccgcttctatgctgtgcagaagctggcccggcgggtggccatgattgatgagaccaggaacagcctgtaccagtacttcctgagctacctgcagagcctgctgctcttccccccccagcagctgaagcccccacctgagctgtgcccagaggacatcaacaccttcaagctgctgtcctatgccagctactgcattgaacatggagacctggagctggccgccaagtttgtgaaccagctgaagggggagagcagaagagtggcccaggactggctgaaggaggccaggatgaccctggagaccaagcagatcgtggagatcctgacagcctatgccagcgctgtgggcatcggcaccacccaggtgcagcctgagtag

SEQ ID NO: 278696 - DNA, 1980 bp, Artificial Sequence
  derived and/or modified sequence
atgctgcgggcctgccagctgagcggcgtgaccgccgccgcccagtcctgtctctgtgggaaattcgttttgagacccctccggccatgtcgcagatacagcacttccggaagtagcgggcttacgaccggtaagatagctggcgctggactcttatttgtcggtggggggatcggcggcaccattctgtatgcaaagtgggactcccatttcagagagtccgtggaaaagacgattccatacagtgataagctattcgaaatggtactgggacctgcagcatataatgtccccctcccgaaaaaatcaatacaaagcggtccactgaaaatctcttccgtgagcgaagtgatgaaggagtccaagcagcctgcttcacagctccagaagcaaaagggagatactcccgcgtccgctacagcactggccaaaagtcttgaggacgcccttaggcaaacagcaagcgtaacacttcaggccattgctgcacagaacgccgcagttcaggccgtcaatgcgcatagtaacatccttaaggctgctatggacaactccgaaattgccggcgaaaaaaagagcgcacagtggagaaccgtcgaaggggccctgaaggagaggcgtaaggccgtggacgaggcggctgatgctttgttaaaagcgaaggaggagctggaaaagatgaagagtgtcatcgaaaatgctaagaagaaggaggtggcaggcgccaaaccccatattaccgcggccgaggggaagctgcacaatatgatcgtcgacctggacaacgtagtgcaggccagggatgactttaaaagggagctggattctataacaccagaggtgcttcccggatggaagggaatgagcgtttccgatctggccgataaactatccaccgacgacctgaacagtctgatcgcccatgcccacagacgcatcgatcagctgaacagagaactggctgaacagaaggcaactgaaaaacaacatataactttggccctggaaaaacagaaactcgaagagaagagagctttcgacagcgctgtggccaaggcactggaacaccacagaagcgaaatccaagctgagcaggatagaaaaatcgaagaggtgcgcgacgctatggaaaatgaaatgagaacccaacttcgacgccaagccgccgcacacaccgatcatctgagagatgtgcttcgggtgcaagagcaggagttgaaatcggagtttgaacaaaatctgtccgagaagcttagtgaacaggaacttcagttccggaggctcagccaggagcaggtcgataacttcacgctcgacattaacacagcgtatgcccgcttaaggggaatcgagcaggcagtccaaagccatgccgtcgctgaagaggaagctcgcaaggcgcatcagctgtggctttccgtggaggccctaaaatattctatgaagacatcctccgctgagaccccgactatcccactgggctccgcggtcgaggccatcaaggccaactgctccgataatgaattcactcaggcactgactgccgctattccaccagagagcctgactcgcggagtgtactcagaagagacccttcgcgcccgcttttacgccgtccaaaaactggcaaggagggtggccatgatagacgaaaccaggaactccctctatcaatatttcctgtcatacctgcagagtcttcttctgtttcccccgcagcagttgaaacctcctcccgaactttgccctgaggacattaacacattcaaactgctaagttatgcctcctactgtatagagcacggagacttggaactggccgctaagtttgttaaccagcttaagggtgaaagtaggagggtcgcacaagactggctgaaagaggcgcgtatgaccttggagacaaaacagatcgtcgaaatacttaccgcttatgcaagtgctgtgggtattggcacaacacaagtgcagcccgaatag

SEQ ID NO: 278697 - DNA, 1980 bp, Artificial Sequence
  derived and/or modified sequence
atgctgcgagcttgccagctatccggcgtgacggctgccgcacaatcatgcctgtgcggcaagtttgtgctgcgccctctccgcccatgccgacgttactctaccagcggctcctctggcttaaccaccggaaagatagccggtgctggtttgctttttgtggggggaggtattggtggaaccattctgtatgcaaaatgggatagccatttccgggaatcagtcgagaaaacgatcccctacagcgacaaactgtttgaaatggtccttggcccagcagcatacaacgtgcctttgcccaaaaagtctattcagtcaggtcctctcaagataagtagtgtttctgaggttatgaaagagagcaagcagcctgctagccagctccaaaaacaaaagggggacacccccgcatccgccacggctctcgctaaaagtttggaagatgcccttagacagactgctagtgttaccttgcaggctatcgccgcacagaatgcggcagtgcaagccgtgaacgctcacagcaacatcctgaaagctgctatggataacagcgagattgccggtgaaaaaaaatctgcacaatggcgtacggtcgaaggagccttgaaggagcgccgaaaggccgtcgatgaggctgccgatgcgctgctcaaggcaaaggaagaactggagaagatgaagagcgtcattgagaacgctaaaaagaaagaggtcgccggagcaaagccgcacataaccgccgctgaaggtaagctccacaacatgatagtggatctcgataacgtggtgcaggccagagatgactttaaacgcgagctggacagtatcacccctgaggtgctgcccggatggaaaggcatgagtgtgtctgacctggccgacaagttgtctacggatgacctaaattcgctgatagcgcacgcccacaggcgaatcgaccagcttaaccgagagttggccgaacagaaggcaactgagaagcaacacatcacattagcactcgaaaaacagaaattggaagaaaaacgagcctttgactctgccgtcgcaaaagccctggagcaccaccggtcagagattcaggcagaacaggaccgcaaaattgaggaagtgagggacgcgatggagaatgagatgcggacacagctgagacggcaagccgctgcgcatacggaccatctgagggacgtgctgagggtgcaggagcaggagctcaaaagtgagttcgagcagaacctgtctgagaaactgtctgagcaggagctccagttccggagattgagccaggagcaggttgacaacttcaccctcgacattaatactgcctacgcaagactgcgaggcatcgaacaggccgtccagtctcacgccgttgccgaggaagaagcacgtaaggcacatcaattgtggctgtccgtggaagccctcaaatattccatgaagacttcatccgccgaaacacctaccattccattgggatccgcagtggaagctattaaagcaaactgcagcgataacgaatttacccaagctctgaccgccgcaatcccaccggagtccctgactcgtggggtatacagcgaggagacactgagagctcgcttctacgctgtgcaaaagctcgcacggagggtggcaatgatcgatgagacacgaaacagcctgtatcagtatttcctgtcttaccttcagagcctgctgctgtttcctccgcagcagttaaagccaccaccagagctgtgccccgaagacatcaatactttcaagcttctgtcatacgcgtcgtattgcattgaacatggggatcttgagctggcagcgaagttcgttaaccagctcaagggagagtcgaggagggtggcccaggattggctcaaagaggctagaatgacacttgagactaagcaaatagtcgaaatcctgacagcctatgcgtccgctgtaggtataggaaccacccaggtgcagcccgagtag

SEQ ID NO: 278698 - DNA, 1980 bp, Artificial Sequence
  derived and/or modified sequence
atgctgagagcctgccagctgagcggcgtgaccgccgccgcccagagctgcctgtgcggcaagttcgtgctgagacccctgagaccctgcagaagatacagcaccagcggcagcagcggcctgaccaccggcaagatcgccggcgccggcctgctgttcgtgggcggcggcatcggcggcaccatcctgtacgccaagtgggacagccacttcagagagagcgtggagaagaccatcccctacagcgacaagctgttcgagatggtgctgggccccgccgcctacaacgtgcccctgcccaagaagagcatccagagcggccccctgaagatcagcagcgtgagcgaggtgatgaaggagagcaagcagcccgccagccagctgcagaagcagaagggcgacacccccgccagcgccaccgccctggccaagagcctggaggacgccctgagacagaccgccagcgtgaccctgcaggccatcgccgcccagaacgccgccgtgcaggccgtgaacgcccacagcaacatcctgaaggccgccatggacaacagcgagatcgccggcgagaagaagagcgcccagtggagaaccgtggagggcgccctgaaggagagaagaaaggccgtggacgaggccgccgacgccctgctgaaggccaaggaggagctggagaagatgaagagcgtgatcgagaacgccaagaagaaggaggtggccggcgccaagccccacatcaccgccgccgagggcaagctgcacaacatgatcgtggacctggacaacgtggtgcaggccagagacgacttcaagagagagctggacagcatcacccccgaggtgctgcccggctggaagggcatgagcgtgagcgacctggccgacaagctgagcaccgacgacctgaacagcctgatcgcccacgcccacagaagaatcgaccagctgaacagagagctggccgagcagaaggccaccgagaagcagcacatcaccctggccctggagaagcagaagctggaggagaagagagccttcgacagcgccgtggccaaggccctggagcaccacagaagcgagatccaggccgagcaggacagaaagatcgaggaggtgagagacgccatggagaacgagatgagaacccagctgagaagacaggccgccgcccacaccgaccacctgagagacgtgctgagagtgcaggagcaggagctgaagagcgagttcgagcagaacctgagcgagaagctgagcgagcaggagctgcagttcagaagactgagccaggagcaggtggacaacttcaccctggacatcaacaccgcctacgccagactgagaggcatcgagcaggccgtgcagagccacgccgtggccgaggaggaggccagaaaggcccaccagctgtggctgagcgtggaggccctgaagtacagcatgaagaccagcagcgccgagacccccaccatccccctgggcagcgccgtggaggccatcaaggccaactgcagcgacaacgagttcacccaggccctgaccgccgccatcccccccgagagcctgaccagaggcgtgtacagcgaggagaccctgagagccagattctacgccgtgcagaagctggccagaagagtggccatgatcgacgagaccagaaacagcctgtaccagtacttcctgagctacctgcagagcctgctgctgttccccccccagcagctgaagcccccccccgagctgtgccccgaggacatcaacaccttcaagctgctgagctacgccagctactgcatcgagcacggcgacctggagctggccgccaagttcgtgaaccagctgaagggcgagagcagaagagtggcccaggactggctgaaggaggccagaatgaccctggagaccaagcagatcgtggagatcctgaccgcctacgccagcgccgtgggcatcggcaccacccaggtgcagcccgagtag

SEQ ID NO: 278699 - DNA, 123 bp, Artificial Sequence
  derived and/or modified sequence
atgaagaagctgatggtggtgctgagcctgatcgccgccggcatcttcaggagctcctggggaagcattacttttgggaagggccgggtgccaaggagtcgcgtccttttgtccggcctgtag

SEQ ID NO: 278700 - DNA, 336 bp, Artificial Sequence
  derived and/or modified sequence
atggagcccagagccctggtgaccgccctgagcctgggcctgagcctgtgcagcctgggcctgctggtgaccgccatcttcaccgaccactggtacgagaccgaccccagaagacacaaggagagctgcgagagaagcagagccggcgccgacccccccgaccagaagaacagactgatgcccctgagccacctgctgggccccctggaggaggtgctgctgcccggccacagacccggccacagacacccccaccccgagagatactgcgccgccatgcacggccaccaggtgcccctgttcagcgcccaccccctggccaagcacagcttctag

SEQ ID NO: 278701 - DNA, 336 bp, Artificial Sequence
  derived and/or modified sequence
atggagccccgcgctttggttactgcattgagcctgggcctaagtttgtgcagtctaggcctgttagttaccgcaatattcacagatcattggtacgagactgatcctcgaaggcacaaagaatcttgtgagaggagcagagctggtgccgaccctccagaccaaaaaaatagactgatgcccctgtcacatctgcttggaccactggaagaagtacttctacccgggcatagaccaggacataggcatcctcatcccgagcgctactgcgcggcaatgcacgggcaccaggttcctctcttctccgcccatcccttggcgaaacattctttctag

SEQ ID NO: 278702 - DNA, 336 bp, Artificial Sequence
  derived and/or modified sequence
atggagccccgggccctggtgacagccctgagcctgggcctgagcctgtgcagcctgggcctgctggtgacagccatcttcacagaccactggtatgaaacagaccccaggaggcacaaggagagctgtgagaggagccgggccggggctgaccccccagaccagaagaaccggctgatgcccctgagccacctgctgggccccctggaggaggtgctgctgcccggccacaggcctggccaccgccacccccaccctgagcgctactgtgccgccatgcacggccaccaggtgcccctcttcagcgcccaccccctggccaagcacagcttctag

SEQ ID NO: 278703 - DNA, 336 bp, Artificial Sequence
  derived and/or modified sequence
atggagccccgggccctggtgaccgccctgagcctgggcctgagcctgtgttcactgggactgctggttactgctatctttaccgaccattggtacgaaacggatcccagacgccataaggaaagctgtgaacggtcccgcgctggagccgacccccctgatcagaagaaccgcctgatgcccctcagccatcttcttggccccctagaagaggtactcctgcctggccaccgccccggacacaggcacccacacccagagaggtactgcgccgctatgcacgggcaccaagttcctctgttttcagctcatcccttagctaaacactcattctag

SEQ ID NO: 278704 - DNA, 336 bp, Artificial Sequence
  derived and/or modified sequence
atggagcctagggccctcgtcaccgcactgtctctcggcctctctctgtgtagcttgggactgctcgtgaccgcaattttcacagatcattggtacgagactgaccctcgacgccacaaggaatcctgcgagagatctcgagcgggagctgatcctcctgaccagaagaatcgccttatgcctctgtcgcatctcttgggcccactggaggaggtgctcctgcccggtcatcggcctgggcatcggcacccacatcctgaacggtattgtgcagcaatgcatggccaccaggttccactgttctccgcccaccccctggctaagcatagtttctag

SEQ ID NO: 278705 - protein, 311 aa, Artificial Sequence
  derived and/or modified sequence
MQYISHIFGVINCNGFTLSDQRGLQAVGVGIFPNLGLVNHDCWPNCTVIFNNGKIELRALGKISEGEELTVSYIDFLNVSEERKRQLKKQYYFDCTCEHCQKKLKDDLFLGVKDNPKPSQEVVKEMIQFSKDTLEKIDKARSEGLYHEVVKLCRECLEKQEPVFADTNIYMLRMLSIVSEVLSYLQAFEEASFYARRMVDGYMKLYHPNNAQLGMAVMRAGLTNWHAGNIEVGHGMICKAYAILLVTHGPSHPITKDLEAMRVQTEMELRMFRQNEFMYYKMREAALNNQPMQVMAEPSNEPSPALFHKKQ

SEQ ID NO: 278706 - DNA, 936 bp, Artificial Sequence
  derived and/or modified sequence
atgcagtacatctcacacattttcggcgttataaactgcaatgggtttaccctgtctgatcaacgcggtttgcaggccgtgggtgtaggaatcttcccgaatctgggactggtcaatcacgactgttggccaaactgtacggtgatatttaataacggcaagatcgaattgcgcgctctgggcaaaatctctgagggggaggaactaactgtctcctatattgattttctaaatgtgagtgaggaaagaaagaggcagctcaagaaacaatattactttgactgcacctgcgaacattgtcaaaaaaaacttaaagatgacctcttcctgggtgtcaaggacaatcctaagccgtcccaggaagtagtaaaagaaatgattcaattctccaaggacaccctggagaaaatcgataaggcccgtagtgagggcttgtatcacgaagtcgtgaagctatgccgagaatgccttgaaaagcaagaacctgttttcgccgacaccaatatctacatgctgaggatgctgtctatcgtgagcgaggtcctctcctacctccaggcatttgaagaggccagcttctatgctcgccggatggtcgatgggtacatgaaactgtaccacccaaacaacgcgcagctgggcatggccgtgatgcgtgctggcctgactaactggcacgcaggcaacattgaggtgggccacggaatgatctgtaaggcttacgcgatcctgttagtcacccacggacccagtcaccccatcacaaaagacctcgaggcgatgagagtgcagaccgaaatggagctcaggatgttccgccaaaacgaattcatgtattacaagatgcgggaggccgctctcaacaatcagccaatgcaagttatggcggagccttccaatgagccctcccccgcactcttccataagaaacagtag

SEQ ID NO: 278707 - DNA, 936 bp, Artificial Sequence
  derived and/or modified sequence
atgcagtacatcagccacatctttggagtcatcaactgcaatggcttcaccctgagtgaccagaggggcctgcaggccgtgggcgtgggcatcttccccaacctgggcctggtgaaccacgactgctggcccaactgcaccgtcatcttcaacaacgggaagattgagctgcgggccctgggcaagatcagcgagggggaggagctgactgtgtcctacatcgacttcctgaatgtgtctgaggagaggaagaggcagctgaagaagcagtactactttgactgcacctgtgagcactgccagaagaagctgaaggatgacctcttcctgggcgtgaaggacaaccccaagcccagccaggaggtggtgaaggagatgatccagttcagcaaggacaccctggagaagattgacaaggcccggtctgagggcctgtaccacgaggtggtgaagctgtgcagagaatgtctggagaagcaggagcctgtgtttgctgacaccaacatctacatgctgaggatgctgagcatcgtgtctgaggtgctgagctacctgcaggcctttgaggaggccagcttctacgcccggaggatggtggatggctacatgaagctgtaccaccccaacaatgcccagctgggcatggctgtgatgagagctggcctgaccaactggcatgctggcaacatcgaggtgggccacggcatgatctgcaaggcctatgccatcctgctggtgacccacggccccagccaccccatcaccaaggacctggaggccatgagggtgcagacagagatggagctgaggatgttccggcagaatgagttcatgtactacaagatgagggaggccgccctgaacaaccagcccatgcaggtgatggccgagcccagcaatgagcccagccctgccctcttccacaagaagcagtag

SEQ ID NO: 278708 - DNA, 936 bp, Artificial Sequence
  derived and/or modified sequence
atgcagtacatcagccacatcttcggcgtgatcaactgcaacggctttacgctgagcgaccagcgcggacttcaggcagtcggagtcgggatcttccccaatttgggtctggtgaatcacgattgctggcccaactgcactgtgatttttaataatgggaagattgagctgcgcgcacttggcaaaatcagcgaaggcgaagagctcacagtgtcttacatcgattttttgaacgtgtctgaggagcggaaacgccagctgaagaagcagtactatttcgactgcacctgtgagcattgtcagaaaaaactgaaagatgacttatttctgggcgtgaaggacaatccaaaaccctcgcaggaggtcgtgaaggagatgatccaattctccaaagacaccctggaaaagatcgataaggctaggtccgagggcctgtaccacgaggtcgtcaagctgtgtcgagaatgcctcgagaagcaggaaccggtatttgcggacaccaacatctatatgctccgaatgctcagcatcgtttctgaagtcctctcatacctgcaggccttcgaggaagcaagcttctatgcccgccggatggtggacggatatatgaagctgtaccatcctaataacgcacagctaggcatggcggtgatgcgggccggactgacaaattggcatgctgggaatatagaggtgggacatggcatgatttgcaaagcttacgccattctgctggtcacccacggtcctagtcatccaatcacaaaggatcttgaagcaatgcgcgtgcagactgagatggaactgcggatgttccgccagaacgagttcatgtactacaaaatgagagaagccgccttaaacaaccagcctatgcaggtcatggcggaacccagcaacgaacctagtcccgccctcttccataaaaagcagtag

SEQ ID NO: 278709 - DNA, 936 bp, Artificial Sequence
  derived and/or modified sequence
atgcagtacatctctcatattttcggtgtaataaactgcaacggcttcacactctccgatcagagaggactgcaagccgtcggcgtgggcatcttcccaaatctcgggttggttaaccatgactgctggcctaattgcactgttatttttaataacgggaagattgagttgcgagctttagggaagattagcgaaggcgaggaattgacggtgtcatacatcgatttcttaaacgtgagtgaagagagaaagaggcagctcaagaaacaatattatttcgactgtacttgcgaacactgccagaagaagttaaaggacgacctgtttctgggagtcaaggataacccaaaacctagtcaggaagtggtcaaggagatgatccagtttagcaaggatacactggaaaaaattgacaaggctagatcagagggcctctaccatgaggtagttaagttatgcagagagtgtctagaaaaacaagaaccggtgttcgcggacactaatatttacatgcttcggatgctgagcatagtgagtgaagttttgtcttatctccaggcattcgaggaggcctctttctacgcgaggcgtatggtggatggctacatgaagctctatcacccaaataacgctcaactggggatggccgttatgagagccggtttgaccaattggcatgccggaaacattgaggttggacatggcatgatttgcaaggcttatgctattcttttggtgacccatgggccttctcaccctattaccaaagatcttgaagctatgcgtgtccagaccgagatggagctaagaatgtttcgccagaatgagttcatgtactataagatgcgggaagccgcactgaacaatcagcccatgcaggttatggccgagccatctaacgaacctagcccagcactgtttcacaaaaagcagtag

SEQ ID NO: 278710 - DNA, 4306 bp, Artificial Sequence
  derived and/or modified sequence
gagatgacaatagggagaatggagaacgtggaggtcttcaccgctgagggcaaaggaaggggtctgaaggccaccaaggagttctgggctgcagatatcatctttgctgagcgggcttattccgcagtggtttttgacagccttgttaattttgtgtgccacacctgcttcaagaggcaggagaagctccatcgctgtgggcagtgcaagtttgcccattactgcgaccgcacctgccagaaggatgcttggctgaaccacaagaatgaatgttcggccatcaagagatatgggaaggtgcccaatgagaacatcaggctggcggcgcgcatcatgtggcgggtggagagagaaggcaccgggctcacggagggctgcctggtgtccgtggacgacttgcagaaccacgtggagcactttggggaggaggagcagaaggacctgcgggtggacgtggacacattcttgcagtactggccgccgcagagccagcagttcagcatgcagtacatctcgcacatcttcggagtgattaactgcaacggttttactctcagtgatcagagaggcctgcaggccgtgggcgtaggcatcttccccaacctgggcctggtgaaccatgactgttggcccaactgtactgtcatatttaacaatggcaaaattgagctccgggccctaggcaagatctcagaaggagaggagctgactgtgtcctatattgacttcctcaacgttagtgaagaacgcaagaggcagctgaagaagcagtactactttgactgcacatgtgaacactgccagaaaaaactgaaggatgacctcttcctgggggtgaaagacaaccccaagccctctcaggaagtggtgaaggagatgatacaattctccaaggatacattggaaaagatagacaaggctcgttccgagggtttgtatcatgaggttgtgaaattatgccgggagtgcctggagaagcaggagccagtgtttgctgacaccaacatctacatgctgcggatgctgagcattgtttcggaggtcctttcctacctccaggcctttgaggaggcctcgttctatgccaggaggatggtggacggctatatgaagctctaccaccccaacaatgcccaactgggcatggccgtgatgcgggcagggctgaccaactggcatgctggtaacattgaggtggggcacgggatgatctgcaaagcctatgccattctcctggtgacacacggaccctcccaccccatcactaaggacttagaggccatgcgggtgcagacggagatggagctacgcatgttccgccagaacgaattcatgtactacaagatgcgcgaggctgccctgaacaaccagcccatgcaggtcatggccgagcccagcaatgagccatccccagctctgttccacaagaagcaatgaggactgcccagtggaggaggggcgatgtggctggggagctagggagagactctggaggtggtgggtctctcgggagacccctaatgaggaagttgaggtaatgcttaacattgttgctgtgagaatttactgccctatgtttcccagagccattttggctcaattcaagtctattcaattcaagttaactctagcccagcccagatcaactcctcctacaaatattattggatgataggccctagaacccaataaaggagctccaaatgtcgttgggtggggaagcaaaatgtagagaaacatttaaagcacactgtaataataaatgcaattataaactatatggaggagggtgcagaggagggaatgtgtctggtgtgtgatgtgtgtgtgtgcagtgggggtatcacagagagtatgacatctgagttgagggtagcaggtgcctggagtctcaggtggctgctcacccatctgtgcaggtgtctctggggctgctggtctcacctgtggtctgcagtagacacaattggctgagcaggatatgtgatactgtgtggttggtgtggagttttgaagaaggggctgtgtttgggccacgtaggctctactcagagacctgaaaccacttcagaatggtgcatatgtcgaaagagctggctgggggccttgcccaaaccaactgaggtcttaaagtccagggaaaaaaagtctgggttccaactagaattctagaaatatttctagaacacacagagagggaataagtccctctatcacccttattaccaagccttgtggttccctgtgattttagataatgtctgatatttttctggctatttgcctagtaggatttaaaaaatattttcaaagtgaagctgagagagaatcttggaaacacacatacctgttgatcatgggccctgcagaattggcccttgggggctttatttggttacatgtgcctgggtggtctttaccagcttagactctatcatgggcccccatgaagctccattctcaatactgaataattattacttcccttgttgagtttctttttctgtcatgccctgggggcttctgctcttctcaccagaaagaacatttgaatctggattcttgtacacctgggttagaccctgttcagaggtgtggccaatttatcccgatctcctggaaggctgttgtgatttccatctaagaaatgagggtcttgagaatcaaccagtcccaagattagcctgttatcctgttatctactgagaccccaaatttctcaccaatgttttgggagatcctggaaaagatcccttcagtttggggtgtcaccaagacttctacacaacccaggactaccattgacctcagagctgtaccccacatcttgaagtaaattgatcccaccaggtcccacgtttgttatctctgcctaaatgttagcttctccatcctcaccacatgatgacctgctgtgtccctctgagcactacccagtggctgaaaactctgcaaatgggccacacttttgcaaaatacttgtatctgacacttaggtcttgtttgaagaatttcctttctggaaggttttacaagaagactgatagtctttcaagcccccacatcacaggcttagggacggcactaactttctcccagggatctaactggctagttcaaattatcactcttttaccttcatataaaatgtctcccccaaacctttttcccttctttgtcattgttatctgctaagcccctggtcatttccccatattcgtagtctttttttccatcctatctttctaatatttgttgtctttaacaaactgtgttctgtgtctgtgctcctccttccctctcagaccactggaatgcaagtccttcttccctttggaatgtactctggatcccttcccctgctttgacccccagactttgctccatctattattgcttctccatcctggatccttgacatttgtcaccccactggccttctcaggtgcaatcagtaaaaatgctgagaactcttggatcttaatcttcatgactgagttttttttagttgtatagttatcatctgcctttcttcactttgcatttcttcttgaatccattgcagattgacttccactcccactccttcactaaaagggctcttaccaagatcaaatctaatgggtacattttagttcctatgtgatttggcctttcgatgtcaatcatcactcccagccattgattttggtgacccacttccctgtgatgatcttctgatctagtttctcaggttccttcgctggtcctttttctttccctgcccctgacatattgacatttcctggagttggttttgtccttgattcattctcatgtcattctgcacacagtctctgcatgaactcaggcagacccttcatttaatgaccaccttagggctgatgattctcaaatctgtattccccgatcttgcatttgagctccagccccactcatcctctcggatgttctgcaggcccagcaaactcatcatgtccaaagtgaaactttttctctttcctgtctcctctcctctgatctgttctttcttggaacaccacccaagaacgtcacctcctccatcagattgtgagctcctggagggcaggagctgtgtccttctattcatcttcctatccccagaaccttgcacagatcctggaatgtggtaggtgctcagtaaatgtgtgttgaataaatgaatgaatgaatgaacaaatgaatgaatttgcttacttcaaggcaaaagaaccatgaaactgtattttgagtttctatgttatagcagtcagcaaatcctattaaatactttgtgtttccaagc

SEQ ID NO: 278711 - DNA, 936 bp, Artificial Sequence
  derived and/or modified sequence
atgcagtacatcagccacatcttcggcgtgatcaactgcaacggcttcaccctgagcgaccagagaggcctgcaggccgtgggcgtgggcatcttccccaacctgggcctggtgaaccacgactgctggcccaactgcaccgtgatcttcaacaacggcaagatcgagctgagagccctgggcaagatcagcgagggcgaggagctgaccgtgagctacatcgacttcctgaacgtgagcgaggagagaaagagacagctgaagaagcagtactacttcgactgcacctgcgagcactgccagaagaagctgaaggacgacctgttcctgggcgtgaaggacaaccccaagcccagccaggaggtggtgaaggagatgatccagttcagcaaggacaccctggagaagatcgacaaggccagaagcgagggcctgtaccacgaggtggtgaagctgtgcagagagtgcctggagaagcaggagcccgtgttcgccgacaccaacatctacatgctgagaatgctgagcatcgtgagcgaggtgctgagctacctgcaggccttcgaggaggccagcttctacgccagaagaatggtggacggctacatgaagctgtaccaccccaacaacgcccagctgggcatggccgtgatgagagccggcctgaccaactggcacgccggcaacatcgaggtgggccacggcatgatctgcaaggcctacgccatcctgctggtgacccacggccccagccaccccatcaccaaggacctggaggccatgagagtgcagaccgagatggagctgagaatgttcagacagaacgagttcatgtactacaagatgagagaggccgccctgaacaaccagcccatgcaggtgatggccgagcccagcaacgagcccagccccgccctgttccacaagaagcagtag

SEQ ID NO: 278712 - protein, 590 aa, Artificial Sequence
  derived and/or modified sequence
MIEESGNKRKTMAEKRQLFIEMRAQNFDVIRLSTYRTACKLRFVQKRCNLHLVDIWNMIEAFRDNGLNTLDHTTEISVSRLETVISSIYYQLNKRLPSTHQISVEQSISLLLNFMIAAYDSEGRGKLTVFSVKAMLATMCGGKMLDKLRYVFSQMSDSNGLMIFSKFDQFLKEVLKLPTAVFEGPSFGYTEHSVRTCFPQQRKIMLNMFLDTMMADPPPQCLVWLPLMHRLAHVENVFHPVECSYCRCESMMGFRYRCQQCHNYQLCQNCFWRGHAGGPHSNQHQMKEHSSWKSPAKKLSHAISKSLGCVPTREPPHPVFPEQPEKPLDLAHIVPPRPLTNMNDTMVSHMSSGVPTPTKSVLDSPSRLDEEHRLIARYAARLAAEAGNVTRPPTDLSFNFDANKQQRQLIAELENKNREILQEIQRLRLEHEQASQPTPEKAQQNPTLLAELRLLRQRKDELEQRMSALQESRRELMVQLEELMKLLKAQATGSPHTSPTHGGGRPMPMPVRSTSAGSTPTHCPQDSLSGVGGDVQEAFAQGTRRNLRNDLLVAADSITNTMSSLVKELHSAEEGAEEEEEKMQNGKDRG

SEQ ID NO: 278713 - DNA, 1773 bp, Artificial Sequence
  derived and/or modified sequence
atgattgaagagtctgggaacaaacgaaaaacaatggctgagaaaagacagttatttattgagatgcgggcccagaacttcgacgtgatccgcctgagcacttaccgcaccgcctgcaagctgagattcgtgcaaaaacggtgcaatctacatctggtggatatctggaatatgattgaagctttccgggacaacggtctaaatacccttgatcacacaaccgagatcagcgtgagccgactcgagacagtaatctcttccatctattaccaactgaataagcgtttgccatcaactcaccagatttcagtggaacagtctatctctctgctcctgaatttcatgatcgccgcttatgattccgaaggaagagggaaattgactgtgttcagtgttaaagctatgctggcaaccatgtgtggaggcaagatgctggacaagttgaggtacgtgttttcccagatgtcagattccaacggcctgatgatcttttcaaagtttgatcagttcctcaaggaggtgctgaagttgccaactgctgttttcgaaggtccgtcctttggatacactgagcacagcgtacgcacttgtttcccacagcagcggaaaataatgctgaatatgtttttggataccatgatggcagacccccctccccaatgcctcgtatggctgccgcttatgcaccgtttggcccatgtggagaatgtcttccaccccgttgagtgtagctactgtcgatgtgagagcatgatgggattccgctaccgttgtcagcagtgccacaattaccagttatgccagaactgtttctggagggggcacgcaggcgggcctcactcgaaccagcaccagatgaaggaacatagctcatggaagtctcctgcaaaaaagctgagtcacgcgatatccaaaagcctcgggtgcgtgcctaccagagaaccccctcaccccgtgttcccagagcagccagagaagcctcttgacctggcacacattgtgcccccgcgaccgctaacaaacatgaacgacacaatggtctcacatatgagttccggagtcccaacaccaacaaagagcgtcctcgactccccatcacgcctcgacgaagaacatcggctgattgctcgatacgcagcaagactcgccgctgaagctggcaatgttacacgccccccgactgacttgtccttcaactttgatgctaataaacagcagagacagttgatcgctgagcttgagaacaagaatcgcgagatcctgcaggaaattcaacgtttgcggctggagcacgaacaggccagtcagcctactcctgaaaaggcacagcagaacccaaccttactcgcagaactacgcctgttacggcagaggaaagatgaattagaacagcggatgtccgcactgcaggagtccaggcgggaactgatggtgcagctcgaagagctgatgaagctgctgaaagcccaggctaccggatctcctcatacaagccctactcacgggggaggacgccctatgccgatgccagtaagaagcacttctgctggtagtacacccacccactgtccccaggactctctgtcaggagttggaggtgatgttcaggaggcctttgcgcaaggcacccgccgcaacctcagaaatgatctgcttgtagctgcagacagtattactaatactatgtcctccctggtaaaggagctgcactcagcagaagagggggctgaggaggaggaagagaaaatgcaaaacggcaaggataggggttag

SEQ ID NO: 278714 - DNA, 1773 bp, Artificial Sequence
  derived and/or modified sequence
atgattgaggagagcggcaacaagaggaagaccatggccgagaagaggcagctgttcatcgagatgagggcccagaactttgatgtgatccggctgagcacctacagaacagcctgcaagctgcgctttgtgcagaagcgctgcaacctgcacctggtggacatctggaacatgattgaggccttccgggacaatggcctgaacaccctggaccacaccacagagatctctgtgtcccggctggagaccgtcatcagcagcatctactaccagctgaacaagaggctgcccagcacccaccagatctctgtggagcagagcatcagcctgctgctgaacttcatgattgctgcctatgattctgagggccggggcaagctgaccgtcttctctgtgaaggccatgctggccaccatgtgtggcggcaagatgctggacaagctgcgctacgtgttcagccagatgtctgacagcaatggcctgatgatcttcagcaagtttgaccagttcctgaaggaggtgctgaagctgcccacagctgtgtttgagggccccagctttggctacacagagcacagcgtgaggacctgcttcccccagcagaggaagatcatgctgaacatgttcctggacaccatgatggctgaccccccaccccagtgcctggtgtggctgcccctgatgcaccggctggcccacgtggagaatgtgttccaccctgtggagtgcagctactgccgctgtgagagcatgatgggcttccgctaccgctgccagcagtgccacaactaccagctgtgccagaactgcttctggaggggccacgccggcggcccccacagcaaccagcaccagatgaaggagcacagctcctggaagagccctgccaagaagctgagccacgccatcagcaagagcctgggctgtgtgcccacccgggagcccccccaccctgtgtttcctgagcagcctgagaagcccctggacctggcccacatcgtgcccccccggcccctgaccaacatgaatgacaccatggtgagccacatgagcagcggcgtgcccacccccaccaagtctgtgctggacagccccagccggctggatgaggagcaccggctgattgcccgctatgctgcccggctggccgctgaggccggaaatgtgacccggcccccaacagacctgtccttcaactttgatgccaacaagcagcagaggcagctgattgctgagctggagaacaagaaccgggagatcctgcaggagatccagaggctgcggctggagcacgagcaggccagccagcccaccccagagaaggcccagcagaaccccaccctgctggccgagctgcggctgctgcggcagaggaaggatgagctggagcagaggatgtctgccctgcaggagagcagaagagagctgatggtgcagctggaggagctgatgaagctgctgaaggcccaggccaccggcagcccccacaccagccccacccatggaggcggccggcccatgcccatgcctgtgcgcagcaccagcgctggcagcacccccacccactgcccccaggacagcctgtctggagtgggcggagatgtgcaggaggcctttgcccagggcaccaggaggaacctgagaaatgacctgctggtggccgctgacagcatcaccaacaccatgagcagcctggtgaaggagctgcacagcgctgaggagggcgctgaggaggaggaggagaagatgcagaatggcaaggaccggggctag

SEQ ID NO: 278715 - DNA, 1773 bp, Artificial Sequence
  derived and/or modified sequence
atgatcgaggagagcggcaacaagcggaagaccatggccgagaagcgccagttgtttatagaaatgcgcgcacaaaattttgatgtgattagactgtccacatatagaacggcctgcaagctcagattcgtgcagaaacgctgtaatctccacctggtagacatatggaatatgatagaggctttccgagacaacggattgaatacgttggaccacacgacggagatctccgtctcacgattggaaacagtaatatcaagcatatattaccaattgaacaagagactgccaagcacccatcaaatttccgtcgagcagagtatcagtttgcttctaaatttcatgatcgcagcctacgactcggaaggccggggaaagctcactgttttctcagttaaagcaatgctggctactatgtgtggcggtaagatgctagacaagctgaggtatgtgttctctcagatgtccgactcgaatgggctcatgatctttagcaaatttgatcagtttctgaaggaggtgctgaaactgccaaccgccgtattcgaaggcccaagtttcggctacactgaacactcggtgcggacgtgcttcccacagcagaggaagatcatgctgaacatgtttctcgataccatgatggccgaccccccaccccagtgcctggtctggctgccgcttatgcataggctggcccatgtggagaacgtcttccaccccgttgagtgttcctactgtcgctgcgaatcgatgatggggttccggtaccgttgccaacagtgtcacaactaccagctctgtcaaaattgtttctggcggggacacgccggggggcctcactccaaccagcaccagatgaaggagcacagctcctggaaatctcccgctaaaaagctgagccacgcaatctctaaatcactgggctgcgtcccaaccagggaacctccacatccggtgttcccagagcaacccgagaagcctctcgacctggctcatattgtcccaccacggccactcaccaatatgaacgatacaatggtgagccacatgtcttctggcgtgcccacccctacgaagagcgtactggactctcccagtcggctggatgaagaacacagactgattgcacgctacgccgctcgactcgccgctgaggctggaaacgtaaccaggccaccaaccgacctcagctttaatttcgacgctaataaacagcaacggcagttgattgcagaactggaaaataagaatagagaaatcctccaggagatccagcgcctgagattggagcacgagcaggcgtcccagccaacacctgaaaaagcccagcagaaccccactctcctggccgagctaagactattgcgccagcgaaaggatgagctggaacagaggatgagcgccctccaggaatcacgaagagaactgatggtccaactcgaggaactgatgaaactgctcaaggctcaggccaccgggtcacctcatacatccccaacacacggaggaggtcgccctatgcctatgcctgtgcgttctacaagcgccggatcgaccccaacacactgccctcaggacagtctgtccggcgtcggaggggatgtgcaggaggcttttgcacagggaacccgacggaatttgaggaacgatctcctggttgcagcagatagcattaccaacaccatgtcttccctcgtaaaggagttgcattcagccgaggagggagctgaggaggaggaggaaaaaatgcagaacgggaaggatcggggctag

SEQ ID NO: 278716 - DNA, 1773 bp, Artificial Sequence
  derived and/or modified sequence
atgattgaagaatccggcaataaaaggaagaccatggccgagaagagacagctgtttatcgaaatgagagcacagaacttcgatgtaattagactgtccacatatcggacggcctgtaagctacggtttgttcagaaaagatgtaaccttcacttggttgacatttggaatatgatcgaagccttcagagacaatggactgaacacattagatcatactacagagatttctgtcagtcggctagaaactgtgattagctctatctattatcaactcaataagcgcttacccagcacccaccagatttccgtggagcaatcaatcagcttacttctgaactttatgatcgctgcctacgacagcgagggcagggggaaacttactgtgttcagtgtgaaagcaatgctggctacgatgtgtggcggtaagatgctcgataaactccggtatgtgttttctcaaatgtccgatagcaatgggcttatgatctttagcaagtttgatcaatttctcaaggaggtgctgaagttgccaacagcggtgttcgaaggtccctcctttggctataccgaacactccgtccgaacctgctttcctcagcagcgcaagataatgcttaatatgttccttgacactatgatggctgaccctccacctcagtgcctagtgtggctgccccttatgcacagactcgcccatgtggagaatgtctttcatcccgttgagtgttcttattgtaggtgtgagtcgatgatgggcttccgctatagatgccagcaatgccataactaccagctgtgtcagaattgtttttggagagggcacgctggtgggcctcattcgaatcagcatcaaatgaaggaacattcctcatggaagagccccgcaaaaaaattgtctcacgccattagcaagtcactgggttgtgtgcccaccagagaacctccacatcctgtgtttcctgaacagcctgaaaaaccactcgacctcgcacacatcgttccaccgaggcccctaacaaatatgaatgacaccatggtcagccacatgagcagtggagttcctactcctacaaaaagtgtcttagatagccccagccgactggacgaagagcataggctgatcgccaggtatgcagcaaggctcgccgctgaggctgggaatgtgacccgcccaccgaccgacctgagcttcaatttcgacgctaacaaacagcagcggcaactgatcgccgaattggagaataaaaacagagaaatccttcaggaaattcagagacttcgactcgagcacgaacaggccagtcagccaacaccagagaaggctcaacagaaccccacactgctagcggaactgcggctgctgcgacagcgcaaggacgagttggagcagaggatgagcgcgctgcaggagtctaggagggagcttatggtgcagttagaagaacttatgaagctgctcaaggctcaagccacgggatcccctcatacaagtccgacacatgggggaggacggccaatgcccatgcccgtgcggtctacatccgctggcagtacaccaacacattgcccacaagatagtctgagcggggtggggggtgatgtgcaggaggcttttgctcagggcactcgcaggaacctgcgtaatgacctcctcgtcgccgcagacagtatcactaacactatgtcttccctggtgaaagagcttcacagtgcagaagaaggagcagaggaagaggaagagaagatgcagaatggaaaagaccgaggctag

SEQ ID NO: 278717 - DNA, 1773 bp, Artificial Sequence
  derived and/or modified sequence
atgatcgaggagagcggcaacaagagaaagaccatggccgagaagagacagctgttcatcgagatgagagcccagaacttcgacgtgatcagactgagcacctacagaaccgcctgcaagctgagattcgtgcagaagagatgcaacctgcacctggtggacatctggaacatgatcgaggccttcagagacaacggcctgaacaccctggaccacaccaccgagatcagcgtgagcagactggagaccgtgatcagcagcatctactaccagctgaacaagagactgcccagcacccaccagatcagcgtggagcagagcatcagcctgctgctgaacttcatgatcgccgcctacgacagcgagggcagaggcaagctgaccgtgttcagcgtgaaggccatgctggccaccatgtgcggcggcaagatgctggacaagctgagatacgtgttcagccagatgagcgacagcaacggcctgatgatcttcagcaagttcgaccagttcctgaaggaggtgctgaagctgcccaccgccgtgttcgagggccccagcttcggctacaccgagcacagcgtgagaacctgcttcccccagcagagaaagatcatgctgaacatgttcctggacaccatgatggccgacccccccccccagtgcctggtgtggctgcccctgatgcacagactggcccacgtggagaacgtgttccaccccgtggagtgcagctactgcagatgcgagagcatgatgggcttcagatacagatgccagcagtgccacaactaccagctgtgccagaactgcttctggagaggccacgccggcggcccccacagcaaccagcaccagatgaaggagcacagcagctggaagagccccgccaagaagctgagccacgccatcagcaagagcctgggctgcgtgcccaccagagagcccccccaccccgtgttccccgagcagcccgagaagcccctggacctggcccacatcgtgccccccagacccctgaccaacatgaacgacaccatggtgagccacatgagcagcggcgtgcccacccccaccaagagcgtgctggacagccccagcagactggacgaggagcacagactgatcgccagatacgccgccagactggccgccgaggccggcaacgtgaccagaccccccaccgacctgagcttcaacttcgacgccaacaagcagcagagacagctgatcgccgagctggagaacaagaacagagagatcctgcaggagatccagagactgagactggagcacgagcaggccagccagcccacccccgagaaggcccagcagaaccccaccctgctggccgagctgagactgctgagacagagaaaggacgagctggagcagagaatgagcgccctgcaggagagcagaagagagctgatggtgcagctggaggagctgatgaagctgctgaaggcccaggccaccggcagcccccacaccagccccacccacggcggcggcagacccatgcccatgcccgtgagaagcaccagcgccggcagcacccccacccactgcccccaggacagcctgagcggcgtgggcggcgacgtgcaggaggccttcgcccagggcaccagaagaaacctgagaaacgacctgctggtggccgccgacagcatcaccaacaccatgagcagcctggtgaaggagctgcacagcgccgaggagggcgccgaggaggaggaggagaagatgcagaacggcaaggacagaggctag

SEQ ID NO: 278718 - DNA, 2275 bp, Artificial Sequence
  derived and/or modified sequence
ccgggcggagaagcggcgcgagccgggcgctgcgaacgttcgccgcgggggtggctccggggcctgagtaggcgctgccgctgcctcagccgagggggctgggccggagcgtgcggaggagtgaggccgcaggagaccttcccgacgacccctgctccggcggggaagtgagcaaggatgattgaggaaagtgggaacaagcggaagaccatggcagagaagaggcagctgttcatagaaatgcgtgctcagaattttgatgtcatacgactatcaacttacagaacagcctgcaaattacgatttgtacaaaaacgatgcaaccttcatcttgttgatatctggaacatgattgaagccttccgagacaatggccttaatacactggaccataccaccgagatcagtgtgtcccgcctcgaaactgtcatctcctccatctactatcagttgaacaagcgccttccttctactcaccaaattagtgtggaacaatctatcagcctcctcctcaactttatgattgctgcatatgacagtgagggccgaggcaagttgacggtattttcagttaaagctatgttagcaaccatgtgtggtggaaaaatgctggacaaattgagatatgttttctcccagatgtcagattccaatggcttaatgatatttagcaagtttgaccagtttctgaaggaagttctgaagctcccaacagctgtctttgaagggccatcttttggttacacagagcactcagtccgcacctgttttccacagcagagaaagataatgctaaatatgtttttagacacaatgatggctgaccctcctccccagtgccttgtctggctacctctcatgcacaggcttgcccatgttgagaatgtcttccatcccgtggagtgctcctactgccgatgtgagagtatgatgggtttccggtaccgatgccagcagtgccacaactatcagctctgccagaattgcttttggcgtggccatgccggcggccctcacagcaaccagcaccagatgaaggagcattcctcttggaaatctcctgcaaagaagctgagccatgcaattagtaaatctttggggtgtgtacccacgagagaacccccgcatcctgtttttcctgagcaaccagagaaaccacttgaccttgcacatatagttcctcctcgccctctgactaatatgaatgacaccatggttagccacatgtcctctggagtgcccactcccaccaagagtgttctggacagtcctagccgactggatgaggaacaccgtcttatagctcgctatgctgcccggctggctgcagaagcaggaaacgtgactcgtcctcccactgacttgagctttaactttgatgccaacaaacaacaaagacagcttattgcagaactggaaaacaaaaacagagagatcctgcaggagattcagcgtctccgcctggaacacgagcaggcctcccagcccacccctgagaaggcacagcagaaccccacgctgctggcagagctgcggctgctgaggcaaaggaaggatgaactggagcagaggatgtcggccctgcaggagagcaggcgggagctgatggtccagctggaagagctgatgaagttgctgaaggctcaggccacagggtcaccacatacatcgcccacccatggaggcggccggccaatgcccatgccagtgcgctccacgtctgccggctccacccccacccactgtccgcaggactcgctgagcggagtcgggggagacgtgcaggaggccttcgcacaaggtacgaggagaaacctccgcaatgacctgctggtggcagctgactccatcaccaacaccatgtcatccctggtgaaggagctccattcagcagaggaaggtgcagaggaagaagaagagaagatgcagaatgggaaagacagaggttagcagaggagccggacacagaggaagctcaggcacagaggacgaggagcaagctggcgccgacatggcgaaggcaaggtcttcccccagaggcacattcctctccatctttccaccgcacacctggaccaggcttgcaggctgccagacgtcactccacccgccagggagaggggagccagagccggtgggaagcggggaggggctgcgtggcacagctagtgggcctccccctgcacagccctgcatgtactagcaccttcatcactcccctcagggcatggtctcatctccgcatcaggaattcacctggaggttgaaaagagaa

SEQ ID NO: 278719 - DNA, 567 bp, Artificial Sequence
  derived and/or modified sequence
atgatagaggagtctgggaataaaagaaaaacaatggccgagaaacgccaactcttcattgaaatgcgggcacaaaacttcgacgtgatcaggctgtctacctacaggacggcatgcaagctgaggttcgttcagaaaaggtgtaacctgcatttggtcgacatctggaacatgatcgaggcattcagggataatgggttaaacactctcgaccacacaaccgagatttccgttagccgactggagaccgtcatttcctcgatctattaccagctgaacaaacgccttccctctacccatcagatttccgtggagcagtcgatctcactgttgctgaacttcatgattgccgcctacgacagcgaggggcggggcaagctgacggttttcagtgtgaaagctatgctagctaccatgtgcggagggaagatgttagacaaactacgttacgtcttttctcagatgtctgattccaatgggcttatgatattctcaaaattcgatcagttcctgaaggaagtcctaaagttacccaccgccgtgttcgaagggccttccttcgggtag

SEQ ID NO: 278720 - DNA, 399 bp, Artificial Sequence
  derived and/or modified sequence
atgattgaagaaagcgggaacaagcggaagacgatggcagaaaaacggcagctgttcatagagatgagggcacagaactttgatgtaattcgcctgtcgacttaccgaacagcatgcaaacttcggttcgttcagaagcgctgtaacttgcatctggtcgatatatggaatatgattgaagcctttcgtgacaacgggctgaacaccctcgaccataccactgagatctctgtttctagactagagactgtgatctcctccatttactaccagctgaataagcgtctcccaagtactcaccagatctctgttgagcagagtattagcctacttttgaattttatgattgctgcgtacgattctgaaggtagggggaaattgacagtcttctccgtatag

SEQ ID NO: 278721 - DNA, 450 bp, Artificial Sequence
  derived and/or modified sequence
atgatagaagagtccggcaacaagaggaagacaatggccgagaagagacagctgttcatagaaatgcgtgcccagaactttgacgtgatccgattgagtacctatcgaaccgcctgcaagcttcgcttcgtccagaagagatgcaacctccacctggtggacatctggaatatgattgaagcatttagggataacggtctgaacacgctagaccacactacagagatttcggtgtctaggctcgagacagtaatttcttccatctactatcagctgaataaaagactgccaagcacacatcagatatcagttgaacagtcaattagtttgcttctaaacttcatgattgccgcctacgactccgaggggcgagggaagctcacagttttttccgttaaagcaatgctagctactatgtgtggaggcaaaatgctagataaactgcgctag

SEQ ID NO: 278722 - DNA, 567 bp, Artificial Sequence
  derived and/or modified sequence
atgattgaggagagcggcaacaagaggaagaccatggccgagaagaggcagctgttcatcgagatgagggcccagaactttgatgtgatccggctgagcacctacagaacagcctgcaagctgcgctttgtgcagaagcgctgcaacctgcacctggtggacatctggaacatgattgaggccttccgggacaatggcctgaacaccctggaccacaccacagagatctctgtgtcccggctggagaccgtcatcagcagcatctactaccagctgaacaagaggctgcccagcacccaccagatctctgtggagcagagcatcagcctgctgctgaacttcatgattgctgcctatgattctgagggccggggcaagctgaccgtcttctctgtgaaggccatgctggccaccatgtgtggcggcaagatgctggacaagctgcgctacgtgttcagccagatgtctgacagcaatggcctgatgatcttcagcaagtttgaccagttcctgaaggaggtgctgaagctgcccacagctgtgtttgagggccccagctttggatag

SEQ ID NO: 278723 - DNA, 399 bp, Artificial Sequence
  derived and/or modified sequence
atgattgaggagagcggcaacaagaggaagaccatggccgagaagaggcagctgttcatcgagatgagggcccagaactttgatgtgatccggctgagcacctacagaacagcctgcaagctgcgctttgtgcagaagcgctgcaacctgcacctggtggacatctggaacatgattgaggccttccgggacaatggcctgaacaccctggaccacaccacagagatctctgtgtcccggctggagaccgtcatcagcagcatctactaccagctgaacaagaggctgcccagcacccaccagatctctgtggagcagagcatcagcctgctgctgaacttcatgattgctgcctatgattctgagggccggggcaagctgaccgtcttctctgtgtag

SEQ ID NO: 278724 - DNA, 450 bp, Artificial Sequence
  derived and/or modified sequence
atgattgaggagagcggcaacaagaggaagaccatggccgagaagaggcagctgttcatcgagatgagggcccagaactttgatgtgatccggctgagcacctacagaacagcctgcaagctgcgctttgtgcagaagcgctgcaacctgcacctggtggacatctggaacatgattgaggccttccgggacaatggcctgaacaccctggaccacaccacagagatctctgtgtcccggctggagaccgtcatcagcagcatctactaccagctgaacaagaggctgcccagcacccaccagatctctgtggagcagagcatcagcctgctgctgaacttcatgattgctgcctatgattctgagggccggggcaagctgaccgtcttctctgtgaaggccatgctggccaccatgtgtggcggcaagatgctggacaagctgaggtag

SEQ ID NO: 278725 - DNA, 567 bp, Artificial Sequence
  derived and/or modified sequence
atgatcgaggagagcggcaacaagcggaagaccatggccgagaagcgccagctgtttatcgagatgagggcccagaacttcgacgtcattcgtctgagcacgtatcgcactgcatgcaagctgaggtttgtgcaaaagagatgtaatctgcatttggttgacatctggaacatgatcgaggctttccgagacaatggtctcaatactctagaccacaccacagagatttccgtgtctcgactcgagactgtcattagctcaatctattaccagctcaacaaacgcctgccctctacacaccagattagcgtagaacagtcaatatctctcctgttgaatttcatgatcgctgcgtatgacagcgagggacgcgggaagcttacagtgtttagcgtgaaagcaatgctggcgacaatgtgcgggggaaaaatgctagataagctcaggtatgtgttctcccagatgtctgatagtaatggcctgatgattttcagtaagttcgaccagttcctcaaggaggttctgaagttacccaccgctgtgtttgagggtccttctttcggttag

SEQ ID NO: 278726 - DNA, 399 bp, Artificial Sequence
  derived and/or modified sequence
atgatcgaggagagcggcaacaagcggaagaccatggccgagaagcgccagctcttcattgaaatgcgtgcccagaactttgatgtcattagactgtcaacctacagaactgcatgcaaactgaggtttgttcagaagagatgtaaccttcaccttgttgatatatggaatatgatagaagcctttagggataatggtctgaacacgctcgaccacacaaccgagataagcgtgtccagactggagactgtgatatcgtcaatttactaccaattaaacaagaggctaccctccacccatcagattagcgtagagcagtccatctccttgttgctgaactttatgatcgccgcatatgactctgagggtcggggcaagctgaccgtgttcagcgtgtag

SEQ ID NO: 278727 - DNA, 450 bp, Artificial Sequence
  derived and/or modified sequence
atgatcgaggagagcggcaacaagcggaagaccatggccgagaagcgccagctgttcatcgagatgagagcccaaaactttgacgtgatccgtctctcaacataccgaaccgcttgcaaactaagatttgtgcagaaacgttgtaatcttcatctcgtggatatttggaatatgatcgaggccttcagagacaatggattgaatactcttgaccacacaacagagatcagcgtgtccagattggaaaccgtgatttcttccatctactatcagctaaataaacggctcccatcgacccaccaaatttcagtggaacagtccatttctttgctgttgaatttcatgatcgctgcttacgactcagagggcaggggcaagctgacagtgttctctgtcaaggcgatgcttgctaccatgtgtggtggcaaaatgctcgataaactgcggtag

SEQ ID NO: 278728 - DNA, 567 bp, Artificial Sequence
  derived and/or modified sequence
atgattgaggaaagcgggaacaagagaaagaccatggccgagaaaagacagctgttcattgagatgagagcgcagaatttcgacgtgataagactttcaacttatcggaccgcttgtaagcttcggtttgtgcagaagcgctgtaacctgcacctggtggatatctggaatatgatcgaggcctttagggataacggcttaaataccctggaccacacaacagagatttctgtctcgagactcgagaccgttatcagctcaatctactaccaactcaacaagcgactgcccagcacgcaccagatctccgtggaacagagcatctccctcctgttgaatttcatgatcgccgcatatgacagcgaaggtagaggcaagcttacggtcttcagtgtgaaggccatgctggcaaccatgtgtggtggaaagatgcttgacaagctcagatacgtgttctctcagatgtcagacagcaatggactgatgatttttagtaaattcgaccagtttttaaaggaagtgctgaagctgccaacagctgttttcgaggggccaagtttcggctag

SEQ ID NO: 278729 - DNA, 399 bp, Artificial Sequence
  derived and/or modified sequence
atgatagaagaaagcgggaataagcgcaagaccatggctgagaagagacagctcttcatcgaaatgagggcacagaattttgacgttattaggctgtcaacttaccggacagcctgtaaactccggtttgttcagaagcggtgtaatctgcatctggtcgacatttggaacatgatcgaggcttttcgggataatggactgaatacacttgaccacaccaccgaaatcagtgtatcccggttagaaaccgtaatatcctccatttattaccagttgaataagcggttaccatctacacaccaaatcagtgtggaacagtcaatttcacttttgctaaacttcatgattgccgcttacgactcagagggacgcggaaaacttaccgtgttttcagtgtag

SEQ ID NO: 278730 - DNA, 450 bp, Artificial Sequence
  derived and/or modified sequence
atgatcgaagaatctggcaacaagcgaaaaacgatggcagaaaagcgccagctgttcatcgagatgcgggcacaaaactttgacgtcatccgactctctacttaccgcaccgcgtgcaaattacggtttgtccagaaacgttgtaatttgcaccttgtcgatatctggaatatgattgaagcattccgcgataacggactgaacacactggaccataccaccgaaatcagtgtcagccgcctggaaactgttatcagttcaatctattatcagctcaataaaaggttgccctccacccatcagatttcagtcgaacagtctattagtctccttctgaactttatgatcgccgcatatgattctgaaggccgtggcaagctgacagttttttctgtgaaggctatgctggctaccatgtgcggcggaaaaatgctggataagctgcggtag

SEQ ID NO: 278731 - DNA, 567 bp, Artificial Sequence
  derived and/or modified sequence
atgatcgaggagagcggcaacaagagaaagaccatggccgagaagagacagctgttcatcgagatgagagcccagaacttcgacgtgatcagactgagcacctacagaaccgcctgcaagctgagattcgtgcagaagagatgcaacctgcacctggtggacatctggaacatgatcgaggccttcagagacaacggcctgaacaccctggaccacaccaccgagatcagcgtgagcagactggagaccgtgatcagcagcatctactaccagctgaacaagagactgcccagcacccaccagatcagcgtggagcagagcatcagcctgctgctgaacttcatgatcgccgcctacgacagcgagggcagaggcaagctgaccgtgttcagcgtgaaggccatgctggccaccatgtgcggcggcaagatgctggacaagctgagatacgtgttcagccagatgagcgacagcaacggcctgatgatcttcagcaagttcgaccagttcctgaaggaggtgctgaagctgcccaccgccgtgttcgagggccccagcttcggctag

SEQ ID NO: 278732 - DNA, 399 bp, Artificial Sequence
  derived and/or modified sequence
atgatcgaggagagcggcaacaagagaaagaccatggccgagaagagacagctgttcatcgagatgagagcccagaacttcgacgtgatcagactgagcacctacagaaccgcctgcaagctgagattcgtgcagaagagatgcaacctgcacctggtggacatctggaacatgatcgaggccttcagagacaacggcctgaacaccctggaccacaccaccgagatcagcgtgagcagactggagaccgtgatcagcagcatctactaccagctgaacaagagactgcccagcacccaccagatcagcgtggagcagagcatcagcctgctgctgaacttcatgatcgccgcctacgacagcgagggcagaggcaagctgaccgtgttcagcgtgtag

SEQ ID NO: 278733 - DNA, 450 bp, Artificial Sequence
  derived and/or modified sequence
atgatcgaggagagcggcaacaagagaaagaccatggccgagaagagacagctgttcatcgagatgagagcccagaacttcgacgtgatcagactgagcacctacagaaccgcctgcaagctgagattcgtgcagaagagatgcaacctgcacctggtggacatctggaacatgatcgaggccttcagagacaacggcctgaacaccctggaccacaccaccgagatcagcgtgagcagactggagaccgtgatcagcagcatctactaccagctgaacaagagactgcccagcacccaccagatcagcgtggagcagagcatcagcctgctgctgaacttcatgatcgccgcctacgacagcgagggcagaggcaagctgaccgtgttcagcgtgaaggccatgctggccaccatgtgcggcggcaagatgctggacaagctgagatag

SEQ ID NO: 278734 - DNA, 822 bp, Artificial Sequence
  derived and/or modified sequence
attcaagttgagaattggatggggacacagccaaaccgtatcagggattaatacctgatttctttaatatgaaattgaatattcatgtatattttatgtataagctaactgttcttatgtcctttattacagcctttcattacatttattttctaaattatatttagtaacatgtttatccatataaaacagtagagatatgggaagttacctcaactaatccaggactctgcagagaaaataatcaaagttagaagatgattgaggaaagtgggaacaagcggaagaccatggcagagaagaggcagctgttcatagaaatgcgtgctcagaattttgatgtcatacgactatcaacttacagaacagcctgcaaattacgatttgtacaaaaacgatgcaaccttcatcttgttgatatctggaacatgattgaagccttccgagacaatggccttaatacactggaccataccaccgagatcagtgtgtcccgcctcgaaactgtcatctcctccatctactatcagttgaacaagcgccttccttctactcaccaaattagtgtggaacaatctatcagcctcctcctcaactttatgattgctgcatatgacagtgagggccgaggcaagttgacggtattttcagttaaagctatgttagcaaccatgtgtggtggaaaaatgctggacaaattgagatatgttttctcccagatgtcagattccaatggcttaatgatatttagcaagtttgaccagtttctgaaggaagttctgaagctcccaacagctgtctttgaagggccatcttttggtt

SEQ ID NO: 278735 - DNA, 565 bp, Artificial Sequence
  derived and/or modified sequence
agatcaccccaaatcactgtttcccgaggcgcctaatagcgaacctgtccaggaggtcaccctggacaggaaagaagtgtcccgagacgaggatgccggtgacgaatacttgcccttaaattcctgtgccaggccttgggattaggaagaccttccagctaccgtaggatgattgaggaaagtgggaacaagcggaagaccatggcagagaagaggcagctgttcatagaaatgcgtgctcagaattttgatgtcatacgactatcaacttacagaacagcctgcaaattacgatttgtacaaaaacgatgcaaccttcatcttgttgatatctggaacatgattgaagccttccgagacaatggccttaatacactggaccataccaccgagatcagtgtgtcccgcctcgaaactgtcatctcctccatctactatcagttgaacaagcgccttccttctactcaccaaattagtgtggaacaatctatcagcctcctcctcaactttatgattgctgcatatgacagtgagggccgaggcaagttgacggtattttcagtta

SEQ ID NO: 278736 - protein, 1660 aa, Artificial Sequence
  derived and/or modified sequence
MDSGPVYHGDSRQLSASGVPVNGAREPAGPSLLGTGGPWRVDQKPDWEAAPGPAHTARLEDAHDLVAFSAVAEAVSSYGALSTRLYETFNREMSREAGNNSRGPRPGPEGCSAGSEDLDTLQTALALARHGMKPPNCNCDGPECPDYLEWLEGKIKSVVMEGGEERPRLPGPLPPGEAGLPAPSTRPLLSSEVPQISPQEGLPLSQSALSIAKEKNISLQTAIAIEALTQLSSALPQPSHSTPQASCPLPEALSPPAPFRSPQSYLRAPSWPVVPPEEHSSFAPDSSAFPPATPRTEFPEAWGTDTPPATPRSSWPMPRPSPDPMAELEQLLGSASDYIQSVFKRPEALPTKPKVKVEAPSSSPAPAPSPVLQREAPTPSSEPDTHQKAQTALQQHLHHKRSLFLEQVHDTSFPAPSEPSAPGWWPPPSSPVPRLPDRPPKEKKKKLPTPAGGPVGTEKAAPGIKPSVRKPIQIKKSRPREAQPLFPPVRQIVLEGLRSPASQEVQAHPPAPLPASQGSAVPLPPEPSLALFAPSPSRDSLLPPTQEMRSPSPMTALQPGSTGPLPPADDKLEELIRQFEAEFGDSFGLPGPPSVPIQDPENQQTCLPAPESPFATRSPKQIKIESSGAVTVLSTTCFHSEEGGQEATPTKAENPLTPTLSGFLESPLKYLDTPTKSLLDTPAKRAQAEFPTCDCVEQIVEKDEGPYYTHLGSGPTVASIRELMEERYGEKGKAIRIEKVIYTGKEGKSSRGCPIAKWVIRRHTLEEKLLCLVRHRAGHHCQNAVIVILILAWEGIPRSLGDTLYQELTDTLRKYGNPTSRRCGLNDDRTCACQGKDPNTCGASFSFGCSWSMYFNGCKYARSKTPRKFRLAGDNPKEEEVLRKSFQDLATEVAPLYKRLAPQAYQNQVTNEEIAIDCRLGLKEGRPFAGVTACMDFCAHAHKDQHNLYNGCTVVCTLTKEDNRCVGKIPEDEQLHVLPLYKMANTDEFGSEENQNAKVGSGAIQVLTAFPREVRRLPEPAKSCRQRQLEARKAAAEKKKIQKEKLSTPEKIKQEALELAGITSDPGLSLKGGLSQQGLKPSLKVEPQNHFSSFKYSGNAVVESYSVLGNCRPSDPYSMNSVYSYHSYYAQPSLTSVNGFHSKYALPSFSYYGFPSSNPVFPSQFLGPGAWGHSGSSGSFEKKPDLHALHNSLSPAYGGAEFAELPSQAVPTDAHHPTPHHQQPAYPGPKEYLLPKAPLLHSVSRDPSPFAQSSNCYNRSIKQEPVDPLTQAEPVPRDAGKMGKTPLSEVSQNGGPSHLWGQYSGGPSMSPKRTNGVGGSWGVFSSGESPAIVPDKLSSFGASCLAPSHFTDGQWGLFPGEGQQAASHSGGRLRGKPWSPCKFGNSTSALAGPSLTEKPWALGAGDFNSALKGSPGFQDKLWNPMKGEEGRIPAAGASQLDRAWQSFGLPLGSSEKLFGALKSEEKLWDPFSLEEGPAEEPPSKGAVKEEKGGGGAEEEEEELWSDSEHNFLDENIGGVAVAPAHGSILIECARRELHATTPLKKPNRCHPTRISLVFYQHKNLNQPNHGLALWEAKMKQLAERARARQEEAARLGLGQQEAKLYGKKRKWGGTVVAEPQQKEKKGVVPTRQALAVPTDSAVTVSSYAYTKVTGPYSRWI

SEQ ID NO: 278737 - protein, 116 aa, Artificial Sequence
  derived and/or modified sequence
MTEETHPDDDSYIVRVKAVVMTRDDSSGGWFPQEGGGISRVGVCKVMHPEGNGRSGFLIHGERQKDKLVVLECYVRKDLVYTKANPTFHHWKVDNRKFGLTFQSPADARAFDRGVR

SEQ ID NO: 278738 - DNA, 351 bp, Artificial Sequence
  derived and/or modified sequence
atgaccgaggagacccaccccgacgacgacagctacatcgtgagagtgaaggccgtggtgatgaccagagacgacagcagcggcggctggttcccccaggagggcggcggcatcagcagagtgggcgtgtgcaaggtgatgcaccccgagggcaacggcagaagcggcttcctgatccacggcgagagacagaaggacaagctggtggtgctggagtgctacgtgagaaaggacctggtgtacaccaaggccaaccccaccttccaccactggaaggtggacaacagaaagttcggcctgaccttccagagccccgccgacgccagagccttcgacagaggcgtgagatag

SEQ ID NO: 278739 - DNA, 351 bp, Artificial Sequence
  derived and/or modified sequence
atgactgaggagacccacccagacgatgacagctacattgttcgcgtcaaggcagtcgtgatgacacgcgacgattccagtggaggctggtttcctcaggagggaggcggaatcagccgcgtgggagtgtgcaaggtcatgcaccccgaaggcaatggtagaagcgggtttctcatccatggcgagcggcagaaagacaaactcgttgtgctggaatgctacgttagaaaagacctggtgtatactaaggcaaatcctacattccaccactggaaggtggataataggaagtttggactcacttttcagagccctgcagatgccagggcattcgatcgcggtgtgcgatag

SEQ ID NO: 278740 - DNA, 351 bp, Artificial Sequence
  derived and/or modified sequence
atgacagaggagacccacccagatgatgacagctacatcgtgcgggtgaaggctgtggtgatgaccagagatgacagcagcggcggctggttcccccaggagggcggcggcatcagccgggtgggcgtgtgcaaggtgatgcaccctgagggcaatggccgcagcggcttcctgatccacggggagcggcagaaggacaagctggtggtgctggagtgctacgtgaggaaggacctggtgtacaccaaggccaaccccaccttccaccactggaaggtggacaacaggaagtttggcctgaccttccagagccctgcagatgcccgggcctttgaccggggcgtgaggtag

SEQ ID NO: 278741 - DNA, 351 bp, Artificial Sequence
  derived and/or modified sequence
atgaccgaggagacccaccccgacgacgacagctacatcgtgcgggtgaaagccgtggtcatgacccgggacgacagctccggaggttggttcccccaggaagggggcggcatttccagagttggtgtgtgtaaggtgatgcatcctgaaggtaacggacggtccggcttcctcattcatggggaacgacaaaaggacaaactcgtcgttcttgaatgctatgtccgtaaggaccttgtatacactaaggctaaccccactttccaccattggaaggtggataaccgtaagtttggtttgacattccagagtcccgctgacgccagggcgttcgatcgtggagtgaggtag

SEQ ID NO: 278742 - DNA, 351 bp, Artificial Sequence
  derived and/or modified sequence
atgactgaagaaacccatccggatgatgactcgtatatcgtcagagtgaaagccgttgtgatgacacgcgatgacagcagcggcggttggttcccacaggagggaggcggtatctcacgtgtcggggtttgcaaagtgatgcaccccgaagggaatggcaggtcagggttcctgatccacggggaacggcagaaagacaaactggtcgtgctggagtgctatgtgcggaaagaccttgtgtacacaaaggcaaaccctacctttcatcattggaaggtagacaatagaaaattcgggctcacctttcagtctcctgccgatgctcgtgccttcgaccggggtgttcgttag

SEQ ID NO: 278743 - DNA, 555 bp, Artificial Sequence
  derived and/or modified sequence
cttctccctttttttcggtcgcaagtaggaagctttttgcactccaccacctctggccgctgggaagacgtcatcgcttccgccctacttcctcctcctgttggcggcggcgatctccggagatgtgaagaaggggggcgagcggacaggaagatgaagggagcaaagctgcccgccgcgggacaggcgtctaggtgaacaagaaaatgaccgaagaaacacacccagacgatgacagctatattgtgcgtgtcaaggctgtggttatgaccagagatgactccagcgggggatggttcccacaggaaggaggcgggatcagtcgcgtcggggtctgtaaggtcatgcaccccgaaggcaatggacgaagcggctttctcatccatggtgaacgacagaaagacaaactggtggtattggaatgctatgtaagaaaggacttggtctacaccaaagccaatccaacgtttcatcactggaaggtcgataataggaagtttggacttactttccaaagccctgctgatgcccgagcctttgacaggggagtaagga

SEQ ID NO: 278744 - protein, 52 aa, Artificial Sequence
  derived and/or modified sequence
MLKALFLTMLTLALVKSQDTEETITYTQCTDGYEWDPVRQQCKDIDECDIVP

SEQ ID NO: 278745 - protein, 27 aa, Artificial Sequence
  derived and/or modified sequence
MLKALFLTMLTLALVKSQDTEETITYT

SEQ ID NO: 278746 - protein, 355 aa, Artificial Sequence
  derived and/or modified sequence
MKCVNHYGGYLCLPKTAQIIVNNEQPQQETQPAEGTSGATTGVVAASSMATSGVLPGGGFVASAAAVAGPEMQTGRNNFVIRRNPADPQRIPSNPSHRIQCAAGYEQSEHNVCQDIDECTAGTHNCRADQVCINLRGSFACQCPPGYQKRGEQCVDIDECRTSSYLCQYQCVNEPGKFSCMCPQGYQVVRSRTCQDINECETTNECREDEMCWNYHGGFRCYPRNPCQDPYILTPENRCVCPVSNAMCRELPQSIVYKYMSIRSDRSVPSDIFQIQATTIYANTINTFRIKSGNENGEFYLRQTSPVSAMLVLVKSLSGPREHIVDLEMLTVSSIGTFRTSSVLRLTIIVGPFSF

SEQ ID NO: 278747 - protein, 172 aa, Artificial Sequence
  derived and/or modified sequence
MLKALFLTMLTLALVKSQDTEETITYTQCTDGYEWDPVRQQCKDIDECDIVPDACKGGMKCVNHYGGYLCLPKTAQIIVNNEQPQQETQPAEGTSGATTGVVAASSMATSGVLPGGGFVASAAAVAGPEMQTGRNNFVIRRNPADPQRIPSNPSHRIQCAAGYEQSEHNVCQ

SEQ ID NO: 278748 - protein, 119 aa, Artificial Sequence
  derived and/or modified sequence
MLKALFLTMLTLALVKSQDTEETITYTQCTDGYEWDPVRQQCKDIDECDIVPDACKGGMKCVNHYGGYLCLPKTAQIIVNNEQPQQETQPAEGTSGATTGVVAASSMATSGVLPGGGFV

SEQ ID NO: 278749 - protein, 106 aa, Artificial Sequence
  derived and/or modified sequence
MLKALFLTMLTLALVKSQDTEETITYTQCTDGYEWDPVRQQCKDIDECDIVPDACKGGMKCVNHYGGYLCLPKTAQIIVNNEQPQQETQPAEGTSGATTGVVAASS

SEQ ID NO: 278750 - protein, 62 aa, Artificial Sequence
  derived and/or modified sequence
MLKALFLTMLTLALVKSQDTEETITYTQCTDGYEWDPVRQQCKDIDECDIVPDACKGGMKCV

SEQ ID NO: 278751 - DNA, 84 bp, Artificial Sequence
  derived and/or modified sequence
atgctcaaggccctgttccttactatgttaacccttgccctggtgaaatctcaggatacggaggagaccatcacatacacctag

SEQ ID NO: 278752 - DNA, 1068 bp, Artificial Sequence
  derived and/or modified sequence
atgaagtgtgtgaaccactatggcggatatctgtgcttaccaaaaacggctcagattatagtaaacaatgaacagccccagcaggagacacagcccgctgaaggcacatccggcgctactacaggagtggtggctgcctctagtatggctacaagcggcgtcctgccagggggagggttcgtggcctctgcggccgccgtggctgggcccgagatgcagactgggcgtaataactttgtcatcaggagaaacccagccgacccgcagcggataccctctaacccatcccaccggatccagtgtgccgcggggtatgaacagagtgagcacaatgtatgtcaggatattgatgagtgcaccgccggtacccataattgcagagcagaccaagtttgcattaatctaaggggttcatttgcttgtcagtgcccacccggataccaaaagagaggcgaacagtgtgtggatatcgatgaatgtcgaacttcatcttacctctgccagtaccagtgcgtgaacgagccaggaaagttttcttgcatgtgtccccagggatatcaggtcgtgagaagtaggacgtgtcaggatatcaatgaatgcgaaacaacaaatgagtgccgtgaagacgaaatgtgctggaattatcacgggggcttccgctgctaccctaggaacccttgtcaggatccatacatcttaacccctgagaatcggtgcgtttgcccagtgtcgaacgccatgtgtcgggagttgccccagtctatagtatataaatacatgtcaatccggagtgaccgtagcgtgccctcagacatttttcagatccaggccaccacaatctatgcaaatacaatcaataccttcagaattaaatccggaaacgaaaacggcgagttctacctgcggcagacctcaccggtgtctgccatgctcgttctggtgaagtctctcagcggaccaagggaacacatagtcgatttggaaatgctgacagtgtcctccattggaaccttcagaacatcctccgtcttgcggttgacaataattgtcggacctttctccttttag

SEQ ID NO: 278753 - DNA, 84 bp, Artificial Sequence
  derived and/or modified sequence
atgctgaaggccctcttcctgaccatgctgaccctggccctggtgaagagccaggacacagaggagaccatcacctacacctag

SEQ ID NO: 278754 - DNA, 1068 bp, Artificial Sequence
  derived and/or modified sequence
atgaagtgtgtgaaccactatggaggctacctgtgcctgcccaagacagcccagatcatcgtgaacaatgagcagccccagcaggagacccagcctgctgagggcaccagcggggccaccactggagtggtggccgccagctccatggccaccagcggcgtgctgcccggcggcggctttgtggccagcgctgctgctgtggccggccctgagatgcagacaggcaggaacaactttgtgatcagaagaaatcctgctgacccccagaggatccccagcaaccccagccaccgcatccagtgtgccgccggctatgagcagagcgagcacaacgtgtgccaggacattgatgagtgcacagctggcacccacaactgcagagctgaccaggtgtgcatcaacctgcggggcagctttgcctgccagtgccccccaggctaccagaagagaggagagcagtgtgtggacattgatgaatgtaggaccagcagctacctgtgccagtaccagtgtgtgaatgaacctgggaagttcagctgcatgtgcccccagggctaccaggtggtgcgcagcaggacctgccaggacatcaatgaatgtgagaccaccaatgaatgtcgggaggatgagatgtgctggaactaccacggcggcttccgctgctaccccaggaacccctgccaggacccctacatcctgaccccagagaacagatgtgtgtgccctgtgtccaatgccatgtgccgggagctgccccagagcatcgtgtacaagtacatgagcatccgcagtgacagatctgtgcccagcgacatcttccagatccaggccaccaccatctatgccaacaccatcaacaccttccgcatcaagtctggaaatgaaaatggagagttctacctgcggcagaccagccctgtgtctgccatgctggtgctggtgaagagcctgagcggcccccgggagcacatcgtggacctggagatgctgactgtgagcagcatcggcaccttccgcaccagctctgtgctgcggctgaccatcatcgtgggccccttctccttctag

SEQ ID NO: 278755 - DNA, 84 bp, Artificial Sequence
  derived and/or modified sequence
atgctgaaggccctgttcctgaccatgctgaccctggccctggtgaaaagtcaggatactgaggagaccattacgtacacatag

SEQ ID NO: 278756 - DNA, 1068 bp, Artificial Sequence
  derived and/or modified sequence
atgaagtgcgtgaaccactacggcggctacctgtgcctgcccaagacagcacagatcatcgtaaacaatgaacagccccagcaggagactcagccagccgaggggacttccggggctaccaccggagtggtcgctgcaagcagtatggcaactagtggggtgttacctggaggaggatttgtggcttccgcagccgcagtggctggtcccgagatgcagacaggcaggaataacttcgtgataagaaggaaccccgctgaccctcagagaatcccttcaaacccctcacaccggatacagtgtgccgctggatacgaacagtcagagcataacgtgtgtcaggatatcgacgagtgcaccgccggaacacacaactgccgcgccgatcaggtgtgtatcaacctgcggggctcatttgcatgccagtgtccacctgggtaccaaaaacgcggtgagcagtgcgttgatatcgatgaatgtagaacctcctcatatctgtgccagtaccaatgcgtgaatgaaccaggcaagttttcatgcatgtgtccccagggatatcaggtcgtacgctcacgcacttgccaggacataaatgagtgtgagacaaccaatgagtgtagagaggatgaaatgtgttggaattatcacggtggctttagatgctacccgcggaacccctgccaggatccatatattttaacaccggaaaatcgatgcgtatgcccagtgagcaacgccatgtgcagagaactcccgcaatccattgtgtacaagtacatgtctattcgttccgacaggagcgttccaagcgatatatttcagattcaggccactaccatctacgcgaacactataaacactttcagaatcaagagtggaaatgagaacggcgagttttatctcaggcagacatcgccggtctccgccatgttggttctcgtcaaatctttatccggtcccagagagcacattgtggatcttgaaatgctgaccgtgtcttctattggcacctttcgcacatcttccgtactgcgccttaccatcatcgtggggccttttagcttctag

SEQ ID NO: 278757 - DNA, 84 bp, Artificial Sequence
  derived and/or modified sequence
atgcttaaagcgctgtttcttaccatgctaaccctggctcttgttaagagtcaggacacagaggaaactatcacgtatacatag

SEQ ID NO: 278758 - DNA, 1068 bp, Artificial Sequence
  derived and/or modified sequence
atgaaatgtgtcaatcattatggaggctatctgtgtctgccgaagactgctcagatcattgtgaataacgaacagcctcaacaggagactcaaccagctgaaggcacatccggggcaacgactggtgttgtggccgcaagcagtatggctacctccggagtcttacctggaggaggatttgtggcctctgccgctgccgtcgctggccctgaaatgcaaactggacggaacaatttcgtgattcggaggaaccctgctgatccacaacggatcccctctaatccaagccaccggattcaatgcgcagctgggtatgaacagtccgagcacaacgtctgtcaagacattgacgagtgcacagccggaacacacaattgccgagcagatcaggtttgcataaacctccgcggaagcttcgcgtgtcagtgcccaccaggctaccagaagaggggagaacagtgcgttgatattgatgagtgtcgaaccagtagctatctatgccagtaccagtgtgtgaatgaacctggtaagttcagctgcatgtgccctcaaggctaccaagtggtgaggtcacgcacatgtcaggatatcaacgaatgtgagaccacaaacgaatgtagagaagatgagatgtgttggaactatcacggcggattcaggtgttatccccgaaatccatgccaggatccatatattttgacgccggagaaccggtgcgtgtgtcccgtgagtaatgctatgtgtcgtgagctcccccagtccatcgtctacaagtacatgagcatcagatccgaccgtagcgtgccgtcggacatctttcagattcaggctacgactatttatgcaaataccatcaacactttcagaatcaaaagtggcaatgagaatggcgagttctacttaagacagacaagcccagttagtgctatgctggtactggttaagtcgctgagtggtccaagagagcatatcgtggacttggaaatgctgacagtatcatccatcggtacctttcgcactagctccgtgctgagattgaccatcatcgttgggcctttttctttctag

SEQ ID NO: 278759 - DNA, 84 bp, Artificial Sequence
  derived and/or modified sequence
atgctgaaggccctgttcctgaccatgctgaccctggccctggtgaagagccaggacaccgaggagaccatcacctacacctag

SEQ ID NO: 278760 - DNA, 1068 bp, Artificial Sequence
  derived and/or modified sequence
atgaagtgcgtgaaccactacggcggctacctgtgcctgcccaagaccgcccagatcatcgtgaacaacgagcagccccagcaggagacccagcccgccgagggcaccagcggcgccaccaccggcgtggtggccgccagcagcatggccaccagcggcgtgctgcccggcggcggcttcgtggccagcgccgccgccgtggccggccccgagatgcagaccggcagaaacaacttcgtgatcagaagaaaccccgccgacccccagagaatccccagcaaccccagccacagaatccagtgcgccgccggctacgagcagagcgagcacaacgtgtgccaggacatcgacgagtgcaccgccggcacccacaactgcagagccgaccaggtgtgcatcaacctgagaggcagcttcgcctgccagtgcccccccggctaccagaagagaggcgagcagtgcgtggacatcgacgagtgcagaaccagcagctacctgtgccagtaccagtgcgtgaacgagcccggcaagttcagctgcatgtgcccccagggctaccaggtggtgagaagcagaacctgccaggacatcaacgagtgcgagaccaccaacgagtgcagagaggacgagatgtgctggaactaccacggcggcttcagatgctaccccagaaacccctgccaggacccctacatcctgacccccgagaacagatgcgtgtgccccgtgagcaacgccatgtgcagagagctgccccagagcatcgtgtacaagtacatgagcatcagaagcgacagaagcgtgcccagcgacatcttccagatccaggccaccaccatctacgccaacaccatcaacaccttcagaatcaagagcggcaacgagaacggcgagttctacctgagacagaccagccccgtgagcgccatgctggtgctggtgaagagcctgagcggccccagagagcacatcgtggacctggagatgctgaccgtgagcagcatcggcaccttcagaaccagcagcgtgctgagactgaccatcatcgtgggccccttcagcttctag

SEQ ID NO: 278761 - DNA, 547 bp, Artificial Sequence
  derived and/or modified sequence
acttcgccagatcagacccacggggctgccctcccctgcgcactcccctcgctgcccgggcccggagcgcagcgcggccgcacagcctgctttgtaggtgcagtataaaatgcacgctgaatgtcttttgtatgtaaacagcgtagcaggatggagtaacgtgaaatgcaattctacagcagtttttacgtctttgctgcctcgttcgttggctaccgagaaggttcaggagggggaggggagatgagaaagcagattggaagttgagtatggtggagcctcagcctctcccaccctcctttcctcgcttgtgctcactgctaaagttttgttactttccccgcagcagatactaaacattagtttgtcctgtattttctttgagattcacaatgttgaaagcccttttcctaactatgctgactctggcgctggtcaagtcacaggacaccgaagaaaccatcacgtacacgcaatgcactgacggatatgagtgggatcctgtgagacagcaatgcaaagatattgatgaatgtgacattgtccc

SEQ ID NO: 278762 - DNA, 339 bp, Artificial Sequence
  derived and/or modified sequence
agacccacggggctgccctcccctgcgcactcccctcgctgcccgggcccggagcgcagcgcggccgcacaggtatttttgctgtgctgtgcaaggaactctgctagctcaagcctgctttgtaggtgcagtataaaatgcacgctgaatgtcttttgtatgtaaacagcgtagcaggatggagtaacgtgaaatgcaattctacagcagtttttacgtctttgctgcctcgttcgttggctaccgagaagattcacaatgttgaaagcccttttcctaactatgctgactctggcgctggtcaagtcacaggacaccgaagaaaccatcacgtacacg

SEQ ID NO: 278763 - DNA, 1809 bp, Artificial Sequence
  derived and/or modified sequence
acggggctgccctcccctgcgcactcccctcgctgcccgggcccggagcgcagcgcggccgcacagattcacaatgttgaaagcccttttcctaactatgctgactctggcgctggtcaagtcacaggacaccgaagaaaccatcacgtacacgcaatgcactgacggatatgagtgggatcctgtgagacagcaatgcaaagaagattcctgacttattttattactgaccacagatattgatgaatgtgacattgtcccagacgcttgtaaaggtggaatgaagtgtgtcaaccactatggaggatacctctgccttccgaaaacagcccagattattgtcaataatgaacagcctcagcaggaaacacaaccagcagaaggaacctcaggggcaaccaccggggttgtagctgccagcagcatggcaaccagtggagtgttgcccgggggtggttttgtggccagtgctgctgcagtcgcaggccctgaaatgcagactggccgaaataactttgtcatccggcggaacccagctgaccctcagcgcattccctccaacccttcccaccgtatccagtgtgcagcaggctacgagcaaagtgaacacaacgtgtgccaagacatagacgagtgcactgcagggacgcacaactgtagagcagaccaagtgtgcatcaatttacggggatcctttgcatgtcagtgccctcctggatatcagaagcgaggggagcagtgcgtagacattgatgaatgcagaacctcaagctacctgtgtcaatatcaatgtgtcaatgaacctgggaaattctcatgtatgtgcccccagggataccaagtggtgagaagtagaacatgtcaagatataaatgagtgtgagaccacaaatgaatgccgggaggatgaaatgtgttggaattatcatggcggcttccgttgttatccacgaaatccttgtcaagatccctacattctaacaccagagaaccgatgtgtttgcccagtctcaaatgccatgtgccgagaactgccccagtcaatagtctacaaatacatgagcatccgatctgataggtctgtgccatcagacatcttccagatacaggccacaactatttatgccaacaccatcaatacttttcggattaaatctggaaatgaaaatggagagttctacctacgacaaacaagtcctgtaagtgcaatgcttgtgctcgtgaagtcattatcaggaccaagagaacatatcgtggacctggagatgctgacagtcagcagtatagggaccttccgcacaagctctgtgttaagattgacaataatagtggggccattttcattttagtcttttctaagagtcaaccacaggcatttaagtcagccaaagaatattgttaccttaaagcactattttatttatagatatatctagtgcatctacatctctatactgtacactcacccataattcaaacaattacaccatggtataaagtgggcatttaatatgtaaagattcaaagtttgtctttattactatatgtaaattagacattaatccactaaactggtcttcttcaagagagctaagtatacactatctggtgaaacttggattctttcctataaaagtgggaccaagcaatgatgatcttctgtggtgcttaaggaaacttactagagctccactaacagtctcataaggaggcagccatcataaccattgaatagcatgcaagggtaagaatgagtttttaactgctttgtaagaaaatggaaaaggtcaataaagatatatttctttag

SEQ ID NO: 278764 - DNA, 558 bp, Artificial Sequence
  derived and/or modified sequence
agacccacggggctgccctcccctgcgcactcccctcgctgcccgggcccggagcgcagcgcggccgcacaggtatttttgctgtgctgtgcaaggaactctgctagctcaagcctgctttgtaggtgcagtataaaatgcacgctgaatgtcttttgtatgtaaacagcgtagcaggatggagtaacgtgaaatgcaattctacagcagtttttacgtctttgctgcctcgttcgttggctaccgagaaggttcaggagggggaggggagatgagaaagcagattggaaattcacaatgttgaaagcccttttcctaactatgctgactctggcgctggtcaagtcacaggacaccgaagaaaccatcacgtacacgcaatgcactgacggatatgagtgggatcctgtgagacagcaatgcaaagatattgatgaatgtgacattgtcccagacgcttgtaaaggtggaatgaagtgtgtcaaccactatggaggatacctctgccttccgaaaacagcccagattattgtcaataatgaacagcctcagcaggaa

SEQ ID NO: 278765 - DNA, 733 bp, Artificial Sequence
  derived and/or modified sequence
gacccacggggctgccctcccctgcgcactcccctcgctgcccgggcccggagcgcagcgcggccgcacagcctgctttgtaggtgcagtataaaatgcacgctgaatgtcttttgtatgtaaacagcgtagcaggatggagtaacgtgaaatgcaattctacagcagtttttacgtctttgctgcctcgttcgttggctaccgagaagattcacaatgttgaaagcccttttcctaactatgctgactctggcgctggtcaagtcacaggacaccgaagaaaccatcacgtacacgcaatgcactgacggatatgagtgggatcctgtgagacagcaatgcaaagatattgatgaatgtgacattgtcccagacgcttgtaaaggtggaatgaagtgtgtcaaccactatggaggatacctctgccttccgaaaacagcccagattattgtcaataatgaacagcctcagcaggaaacacaaccagcagaaggaacctcaggggcaaccaccggggttgtagctgccagcagcatggcaaccagtggagtgttgcccgggggtggttttgtggccagtgctgctgcagtcgcaggccctgaaatgcagactggccgaaataactttgtcatccggcggaacccagctgaccctcagcgcattccctccaacccttcccaccgtatccagtgtgcagcaggctacgagcaaagtgaacacaacgtgtgccaag

SEQ ID NO: 278766 - DNA, 572 bp, Artificial Sequence
  derived and/or modified sequence
acttcgccagatcagacccacggggctgccctcccctgcgcactcccctcgctgcccgggcccggagcgcagcgcggccgcacaggtatttttgctgtgctgtgcaaggaactctgctagctcaagcgtagcaggatggagtaacgtgaaatgcaattctacagcagtttttacgtctttgctgcctcgttcgttggctaccgagaagattcacaatgttgaaagcccttttcctaactatgctgactctggcgctggtcaagtcacaggacaccgaagaaaccatcacgtacacgcaatgcactgacggatatgagtgggatcctgtgagacagcaatgcaaagatattgatgaatgtgacattgtcccagacgcttgtaaaggtggaatgaagtgtgtcaaccactatggaggatacctctgccttccgaaaacagcccagattattgtcaataatgaacagcctcagcaggaaacacaaccagcagaaggaacctcaggggcaaccaccggggttgtagctgccagcagcatggcaaccagtggagtgttgcccgggggtggttttgtg

SEQ ID NO: 278767 - DNA, 559 bp, Artificial Sequence
  derived and/or modified sequence
agacccacggggctgccctcccctgcgcactcccctcgctgcccgggcccggagcgcagcgcggccgcacaggtatttttgctgtgctgtgcaaggaactctgctagctcaagcgtagcaggatggagtaacgtgaaatgcaattctacagcagtttttacgtctttgctgcctcgttcgttggctaccgagaaggttcaggagggggaggggagatgagaaagcagattggaaattcacaatgttgaaagcccttttcctaactatgctgactctggcgctggtcaagtcacaggacaccgaagaaaccatcacgtacacgcaatgcactgacggatatgagtgggatcctgtgagacagcaatgcaaagatattgatgaatgtgacattgtcccagacgcttgtaaaggtggaatgaagtgtgtcaaccactatggaggatacctctgccttccgaaaacagcccagattattgtcaataatgaacagcctcagcaggaaacacaaccagcagaaggaacctcaggggcaaccaccggggttgtagctgccagcagc

SEQ ID NO: 278768 - DNA, 552 bp, Artificial Sequence
  derived and/or modified sequence
atcagacccacggggctgccctcccctgcgcactcccctcgctgcccgggcccggagcgcagcgcggccgcacaggtatttttgctgtgctgtgcaaggaactctgctagctcaagcgtagcaggatggagtaacgtgaaatgcaattctacagcagtttttacgtctttgctgcctcgttcgttggctaccgagaaggttcaggagggggaggggagatgagaaagcagattggaagttgagtatggtggagcctcagcctctcccaccctcctttcctcgcttgtgctcactgctaaagttttgttactttccccgcagcagatactaaacattagtttgtcctgtattttctttgagattcacaatgttgaaagcccttttcctaactatgctgactctggcgctggtcaagtcacaggacaccgaagaaaccatcacgtacacgcaatgcactgacggatatgagtgggatcctgtgagacagcaatgcaaagatattgatgaatgtgacattgtcccagacgcttgtaaaggtggaatgaagtgtgt

SEQ ID NO: 278769 - protein, 1196 aa, Artificial Sequence
  derived and/or modified sequence
MASVWKRLQRVGKHASKFQFVASYQELMVECTKKWQPDKLVVVWTRRSRRKSSKAHSWQPGIKNPYRGVVVWPVPENIEITVTLFKDPHAEEFEDKEWTFVIENESPSGRRKALATSSINMKQYASPMPTQTDVKLKFKPLSKKVVSAALQFSLSCIFLREGKATDEDMQSLASLMSMKQADIGNLDDFEEDNEDDDENRVNQEEKAAKITELINKLNFLDEAEKDLATVNSNPFDDPDAAELNPFGDPDSEEPITETASPRKTEDSFYNNSYNPFKEVQTPQYLNPFDEPEAFVTIKDSPPQSTKRKNIRPVDMSKYLYADSSKTEEEELDESNPFYEPKSTPPPNNLVNPVQELETERRVKRKAPAPPVLSPKTGVLNENTVSAGKDLSTSPKPSPIPSPVLGRKPNASQSLLVWCKEVTKNYRGVKITNFTTSWRNGLSFCAILHHFRPDLIDYKSLNPQDIKENNKKAYDGFASIGISRLLEPSDMVLLAIPDKLTVMTYLYQIRAHFSGQELNVVQIEENSSKSTYKVGNYETDTNSSVDQEKFYAELSDLKREPELQQPISGAVDFLSQDDSVFVNDSGVGESESEHQTPDDHLSPSTASPYCRRTKSDTEPQKSQQSSGRTSGSDDPGICSNTDSTQAQVLLGKKRLLKAETLELSDLYVSDKKKDMSPPFICEETDEQKLQTLDIGSNLEKEKLENSRSLECRSDPESPIKKTSLSPTSKLGYSYSRDLDLAKKKHASLRQTESDPDADRTTLNHADHSSKIVQHRLLSRQEELKERARVLLEQARRDAALKAGNKHNTNTATPFCNRQLSDQQDEERRRQLRERARQLIAEARSGVKMSELPSYGEMAAEKLKERSKASGDENDNIEIDTNEEIPEGFVVGGGDELTNLENDLDTPEQNSKLVDLKLKKLLEVQPQVANSPSSAAQKAVTESSEQDMKSGTEDLRTERLQKTTERFRNPVVFSKDSTVRKTQLQSFSQYIENRPEMKRQRSIQEDTKKGNEEKAAITETQRKPSEDEVLNKGFKDTSQYVVGELAALENEQKQIDTRAALVEKRLRYLMDTGRNTEEEEAMMQEWFMLVNKKNALIRRMNQLSLLEKEHDLERRYELLNRELRAMLAIEDWQKTEAQKRREQLLLDELVALVNKRDALVRDLDAQEKQAEEEDEHLERTLEQNKGKMAKKEEKCVLQ

SEQ ID NO: 278770 - DNA, 3591 bp, Artificial Sequence
  derived and/or modified sequence
atggccagcgtgtggaagagactgcagagagtgggcaagcacgccagcaagttccagttcgtggccagctaccaggagctgatggtggagtgcaccaagaagtggcagcccgacaagctggtggtggtgtggaccagaagaagcagaagaaagagcagcaaggcccacagctggcagcccggcatcaagaacccctacagaggcgtggtggtgtggcccgtgcccgagaacatcgagatcaccgtgaccctgttcaaggacccccacgccgaggagttcgaggacaaggagtggaccttcgtgatcgagaacgagagccccagcggcagaagaaaggccctggccaccagcagcatcaacatgaagcagtacgccagccccatgcccacccagaccgacgtgaagctgaagttcaagcccctgagcaagaaggtggtgagcgccgccctgcagttcagcctgagctgcatcttcctgagagagggcaaggccaccgacgaggacatgcagagcctggccagcctgatgagcatgaagcaggccgacatcggcaacctggacgacttcgaggaggacaacgaggacgacgacgagaacagagtgaaccaggaggagaaggccgccaagatcaccgagctgatcaacaagctgaacttcctggacgaggccgagaaggacctggccaccgtgaacagcaaccccttcgacgaccccgacgccgccgagctgaaccccttcggcgaccccgacagcgaggagcccatcaccgagaccgccagccccagaaagaccgaggacagcttctacaacaacagctacaaccccttcaaggaggtgcagaccccccagtacctgaaccccttcgacgagcccgaggccttcgtgaccatcaaggacagccccccccagagcaccaagagaaagaacatcagacccgtggacatgagcaagtacctgtacgccgacagcagcaagaccgaggaggaggagctggacgagagcaaccccttctacgagcccaagagcacccccccccccaacaacctggtgaaccccgtgcaggagctggagaccgagagaagagtgaagagaaaggcccccgccccccccgtgctgagccccaagaccggcgtgctgaacgagaacaccgtgagcgccggcaaggacctgagcaccagccccaagcccagccccatccccagccccgtgctgggcagaaagcccaacgccagccagagcctgctggtgtggtgcaaggaggtgaccaagaactacagaggcgtgaagatcaccaacttcaccaccagctggagaaacggcctgagcttctgcgccatcctgcaccacttcagacccgacctgatcgactacaagagcctgaacccccaggacatcaaggagaacaacaagaaggcctacgacggcttcgccagcatcggcatcagcagactgctggagcccagcgacatggtgctgctggccatccccgacaagctgaccgtgatgacctacctgtaccagatcagagcccacttcagcggccaggagctgaacgtggtgcagatcgaggagaacagcagcaagagcacctacaaggtgggcaactacgagaccgacaccaacagcagcgtggaccaggagaagttctacgccgagctgagcgacctgaagagagagcccgagctgcagcagcccatcagcggcgccgtggacttcctgagccaggacgacagcgtgttcgtgaacgacagcggcgtgggcgagagcgagagcgagcaccagacccccgacgaccacctgagccccagcaccgccagcccctactgcagaagaaccaagagcgacaccgagccccagaagagccagcagagcagcggcagaaccagcggcagcgacgaccccggcatctgcagcaacaccgacagcacccaggcccaggtgctgctgggcaagaagagactgctgaaggccgagaccctggagctgagcgacctgtacgtgagcgacaagaagaaggacatgagcccccccttcatctgcgaggagaccgacgagcagaagctgcagaccctggacatcggcagcaacctggagaaggagaagctggagaacagcagaagcctggagtgcagaagcgaccccgagagccccatcaagaagaccagcctgagccccaccagcaagctgggctacagctacagcagagacctggacctggccaagaagaagcacgccagcctgagacagaccgagagcgaccccgacgccgacagaaccaccctgaaccacgccgaccacagcagcaagatcgtgcagcacagactgctgagcagacaggaggagctgaaggagagagccagagtgctgctggagcaggccagaagagacgccgccctgaaggccggcaacaagcacaacaccaacaccgccacccccttctgcaacagacagctgagcgaccagcaggacgaggagagaagaagacagctgagagagagagccagacagctgatcgccgaggccagaagcggcgtgaagatgagcgagctgcccagctacggcgagatggccgccgagaagctgaaggagagaagcaaggccagcggcgacgagaacgacaacatcgagatcgacaccaacgaggagatccccgagggcttcgtggtgggcggcggcgacgagctgaccaacctggagaacgacctggacacccccgagcagaacagcaagctggtggacctgaagctgaagaagctgctggaggtgcagccccaggtggccaacagccccagcagcgccgcccagaaggccgtgaccgagagcagcgagcaggacatgaagagcggcaccgaggacctgagaaccgagagactgcagaagaccaccgagagattcagaaaccccgtggtgttcagcaaggacagcaccgtgagaaagacccagctgcagagcttcagccagtacatcgagaacagacccgagatgaagagacagagaagcatccaggaggacaccaagaagggcaacgaggagaaggccgccatcaccgagacccagagaaagcccagcgaggacgaggtgctgaacaagggcttcaaggacaccagccagtacgtggtgggcgagctggccgccctggagaacgagcagaagcagatcgacaccagagccgccctggtggagaagagactgagatacctgatggacaccggcagaaacaccgaggaggaggaggccatgatgcaggagtggttcatgctggtgaacaagaagaacgccctgatcagaagaatgaaccagctgagcctgctggagaaggagcacgacctggagagaagatacgagctgctgaacagagagctgagagccatgctggccatcgaggactggcagaagaccgaggcccagaagagaagagagcagctgctgctggacgagctggtggccctggtgaacaagagagacgccctggtgagagacctggacgcccaggagaagcaggccgaggaggaggacgagcacctggagagaaccctggagcagaacaagggcaagatggccaagaaggaggagaagtgcgtgctgcagtag

SEQ ID NO: 278771 - DNA, 5057 bp, Artificial Sequence
  derived and/or modified sequence
gggcgccgtccgcctgaggggctgcagatcccggctaccgcgagcgccgtggctggcttggctgttccatgtggctccggcggggatggaggactcggtggcggcggcggctgctgctgcggcggcgacggaggagcggctatgagaagggaacggggccagactcagcccgacagcgggattagagccctccagaatacccatcatatagcccctgaggtggcatggtgatgtctccatgagggaaccccttcccactcatcctgtcacgtatatcatagtgttcttgactgggccattcatctaagatgggatttaccctgtgaaacagggagaagacttatggaccccaagcatcatttcgagttgtagttgagtttttaaaagacatacatgcaaagttcctttgctttggaccctctgcattattaaagctgctgtattgctaacccagaactgctccagtgtcttgactgatcatcatggcttcagtttggaagagactgcagcgtgtgggaaaacatgcatccaagttccagtttgtggcctcctaccaggagctcatggttgagtgtacgaagaaatggcaaccagataaactggtggtagtttggaccagaagaagccgaaggaagtcttctaaggcacatagctggcaacctggaataaaaaatccctatcgtggtgttgttgtgtggcctgttcctgaaaacattgaaatcactgtaacactttttaaggatcctcatgcggaagaatttgaagacaaagagtggacatttgtcatagaaaatgaatccccttctggtcgaaggaaagctcttgctactagcagcatcaatatgaaacagtatgcaagccctatgccaactcagactgatgtcaagttaaaattcaagccattatctaaaaaagttgtatctgccgctcttcagttttcattatcttgcatttttctgagggaaggaaaagccacagatgaagacatgcaaagtttggctagtttgatgagtatgaagcaggctgacattggcaatttagatgacttcgaagaagataatgaagatgatgatgagaacagagtgaaccaagaagaaaaggcagctaaaattacagagcttatcaacaaacttaactttttggatgaagcagaaaaggacttggccaccgtgaattcaaatccatttgatgatcctgatgctgcagaattaaatccatttggagatcctgactcagaagaacctatcactgaaacagcttcacctagaaaaacagaagactctttttataataacagctataatccctttaaagaggtgcagactccacagtatttgaacccattcgatgagccagaagcatttgtgaccataaaggattctcctccccagtctacaaaaagaaaaaatataagacctgtggatatgagcaagtacctctatgctgatagttctaaaactgaagaagaagaattggatgaatcaaatcctttttatgaacctaaatcaactcctcctccaaataatttggtaaatcctgttcaagaactagaaactgaaaggcgagtgaaaagaaaggccccggctccaccagtcctctcaccaaaaacaggagtattaaatgaaaacacagtttctgcaggaaaagatctctctacttctcctaagccaagccctataccaagtcctgttttggggcgaaagccaaatgctagtcagtctttgcttgtatggtgtaaagaagttacaaagaactaccgaggagtaaaaatcaccaattttactacatcgtggagaaatggtttatctttttgtgcaatattacaccactttagaccagatttaattgactacaagtctctgaatcctcaagatattaaagagaacaacaaaaaggcatacgatggatttgccagcataggaatttcccgattattggaaccttctgatatggtattattagcaattcctgataaactgactgttatgacttatctctatcaaataagggcacatttcagtggccaagaactaaatgtcgttcagatagaggaaaacagcagtaaaagcacatataaagttggaaactatgaaacagatacaaacagttctgttgatcaagaaaaattctatgcagagcttagtgatctgaagcgggagcctgaactacaacagcctatcagcggagcagtagacttcttatcacaggatgactctgtatttgtaaatgatagcggggttggagagtcagaaagtgagcatcaaactcctgatgatcaccttagtccaagcacagcctccccttactgtcgcaggactaaaagtgacacagaaccccagaagtctcagcagagctctggaaggacttcaggatctgatgaccctggaatatgttccaatacagattcaacccaagcacaggttttgttaggcaaaaagagactattgaaagctgagactttagaattgagtgacttatatgttagtgataagaagaaggatatgtctccaccctttatttgtgaggagacagatgaacaaaagcttcaaactctagacatcggtagtaacttggagaaagaaaaattagagaattccagatccttagaatgcagatcagatccagaatctcctatcaaaaaaacaagtttatctcctacttctaaacttggatactcatatagtagagatctagaccttgctaagaaaaaacatgcttccctgaggcagacggagtctgatccagatgctgatagaaccactttaaatcatgcagatcattcatcaaaaatagtccagcatcgattgttatctagacaagaagaacttaaggaaagagcaagagttctgcttgagcaagcaagaagagatgcagccttaaaggcggggaataagcacaataccaacacagccaccccattctgcaacaggcagctaagtgatcagcaagatgaagagcgacgtcggcagctgagagagagagctcgtcagctaatagcagaagctcgatctggagtgaagatgtcagaacttcccagctatggtgaaatggctgcagaaaagttgaaagaaaggtcaaaggcatctggagatgaaaatgataatattgagatagatactaacgaggagatccctgaaggctttgttgtaggaggtggagatgaacttactaacttagaaaatgaccttgatactcccgaacaaaacagtaagttggtggacttgaagctgaagaagctcctagaagttcagccacaggtggcaaattcaccctccagtgctgcccagaaagctgtaactgagagctcagagcaggacatgaaaagtggcacagaagatctccggactgaacgattacaaaaaacaacagaacgttttagaaatcctgttgtgttcagcaaagattctacagtcagaaaaactcaacttcagtctttcagccaatatattgagaatagaccagagatgaaaaggcagagatcaatacaggaagatacaaagaaaggaaatgaggagaaggcagcgataactgaaactcagaggaagccatcagaagatgaagtgcttaataaagggttcaaagacaccagtcagtatgtagtaggagaattggcagcactagagaatgagcaaaagcaaattgacacccgtgccgcgctggtggagaagcgccttcgctatctcatggacacaggaaggaacacagaagaagaagaagctatgatgcaggaatggtttatgttagttaataagaaaaatgccttaataaggagaatgaatcagctctctcttctggaaaaagaacatgatttagaacgacggtatgagctgctgaaccgggaattgagggcaatgctagccattgaagactggcagaagaccgaggcccagaagcgacgcgaacagcttctgctagatgagctggtggccctggtgaacaagcgcgatgcgctcgtcagggacctggacgcgcaggagaagcaggccgaagaagaagatgagcatttggagcgaactctggagcaaaacaaaggcaagatggccaagaaagaggagaaatgtgttcttcagtagccatcagatcagaaagaatctctcccaacattttagagtcttgcttcccaaaccagaaaaagtcagactcattgttgatttaaaacttttaacattttgtttggctggattgtactactttacctctactttaccaccaccacccttttcctccctcctttccaaataatatacagaactccaaaatagcttcatttaaggatttttttgtgagttaacaatttccttgaaatcctgtgaaatagatttgcacagacaccttgtgagtgattggtattggaggtgttcaagaaactgttcgaaaaagaacaaaaacacttccctcgttattttctctcattttttgatgagaggaaaatttgaaacattattcttgttgttgttggtaatagcataatgacagtgggaggggtacaaggggataagaaaaatgtcatgatttttttccggtcctgccacatgtaacacttactctgttacctaaattttatagttagatcatatccaatctacttattaaactgtgttctatttaccagtggagtttttctgcagtggttgcgtttcactgtaaggataatggagttcctctcctctgctttcctcagaggatggtcctttaacatagccagaaacaagccctgtggtttgaaggtgagctgtgaggatgggactaattgatatgcaccagtttacaaagacagtcttatcatccgagaatacaccatctttttctctggataattatttcttacatcatgcttgattcctacattttgttgggtctcaacattggctcacgaatgctgttaatatttattctgtattgataaaaagtctgtcttgccactacaagtaaatcccccatttaatattttcttctttagcatagcactgtcattttttgtgaaaatggttatgtttatttattacaatactgagtcatatataaattttcaataaaagcagaaactttcttacctt

SEQ ID NO: 278772 - DNA, 3591 bp, Artificial Sequence
  derived and/or modified sequence
atggcttcagtttggaagagactgcagcgtgtgggaaaacatgcatccaagttccagtttgtggcctcctaccaggagctcatggttgagtgtacgaagaaatggcaaccagataaactggtggtagtttggaccagaagaagccgaaggaagtcttctaaggcacatagctggcaacctggaataaaaaatccctatcgtggtgttgttgtgtggcctgttcctgaaaacattgaaatcactgtaacactttttaaggatcctcatgcggaagaatttgaagacaaagagtggacatttgtcatagaaaatgaatccccttctggtcgaaggaaagctcttgctactagcagcatcaatatgaaacagtatgcaagccctatgccaactcagactgatgtcaagttaaaattcaagccattatctaaaaaagttgtatctgccgctcttcagttttcattatcttgcatttttctgagggaaggaaaagccacagatgaagacatgcaaagtttggctagtttgatgagtatgaagcaggctgacattggcaatttagatgacttcgaagaagataatgaagatgatgatgagaacagagtgaaccaagaagaaaaggcagctaaaattacagagcttatcaacaaacttaactttttggatgaagcagaaaaggacttggccaccgtgaattcaaatccatttgatgatcctgatgctgcagaattaaatccatttggagatcctgactcagaagaacctatcactgaaacagcttcacctagaaaaacagaagactctttttataataacagctataatccctttaaagaggtgcagactccacagtatttgaacccattcgatgagccagaagcatttgtgaccataaaggattctcctccccagtctacaaaaagaaaaaatataagacctgtggatatgagcaagtacctctatgctgatagttctaaaactgaagaagaagaattggatgaatcaaatcctttttatgaacctaaatcaactcctcctccaaataatttggtaaatcctgttcaagaactagaaactgaaaggcgagtgaaaagaaaggccccggctccaccagtcctctcaccaaaaacaggagtattaaatgaaaacacagtttctgcaggaaaagatctctctacttctcctaagccaagccctataccaagtcctgttttggggcgaaagccaaatgctagtcagtctttgcttgtatggtgtaaagaagttacaaagaactaccgaggagtaaaaatcaccaattttactacatcgtggagaaatggtttatctttttgtgcaatattacaccactttagaccagatttaattgactacaagtctctgaatcctcaagatattaaagagaacaacaaaaaggcatacgatggatttgccagcataggaatttcccgattattggaaccttctgatatggtattattagcaattcctgataaactgactgttatgacttatctctatcaaataagggcacatttcagtggccaagaactaaatgtcgttcagatagaggaaaacagcagtaaaagcacatataaagttggaaactatgaaacagatacaaacagttctgttgatcaagaaaaattctatgcagagcttagtgatctgaagcgggagcctgaactacaacagcctatcagcggagcagtagacttcttatcacaggatgactctgtatttgtaaatgatagcggggttggagagtcagaaagtgagcatcaaactcctgatgatcaccttagtccaagcacagcctccccttactgtcgcaggactaaaagtgacacagaaccccagaagtctcagcagagctctggaaggacttcaggatctgatgaccctggaatatgttccaatacagattcaacccaagcacaggttttgttaggcaaaaagagactattgaaagctgagactttagaattgagtgacttatatgttagtgataagaagaaggatatgtctccaccctttatttgtgaggagacagatgaacaaaagcttcaaactctagacatcggtagtaacttggagaaagaaaaattagagaattccagatccttagaatgcagatcagatccagaatctcctatcaaaaaaacaagtttatctcctacttctaaacttggatactcatatagtagagatctagaccttgctaagaaaaaacatgcttccctgaggcagacggagtctgatccagatgctgatagaaccactttaaatcatgcagatcattcatcaaaaatagtccagcatcgattgttatctagacaagaagaacttaaggaaagagcaagagttctgcttgagcaagcaagaagagatgcagccttaaaggcggggaataagcacaataccaacacagccaccccattctgcaacaggcagctaagtgatcagcaagatgaagagcgacgtcggcagctgagagagagagctcgtcagctaatagcagaagctcgatctggagtgaagatgtcagaacttcccagctatggtgaaatggctgcagaaaagttgaaagaaaggtcaaaggcatctggagatgaaaatgataatattgagatagatactaacgaggagatccctgaaggctttgttgtaggaggtggagatgaacttactaacttagaaaatgaccttgatactcccgaacaaaacagtaagttggtggacttgaagctgaagaagctcctagaagttcagccacaggtggcaaattcaccctccagtgctgcccagaaagctgtaactgagagctcagagcaggacatgaaaagtggcacagaagatctccggactgaacgattacaaaaaacaacagaacgttttagaaatcctgttgtgttcagcaaagattctacagtcagaaaaactcaacttcagtctttcagccaatatattgagaatagaccagagatgaaaaggcagagatcaatacaggaagatacaaagaaaggaaatgaggagaaggcagcgataactgaaactcagaggaagccatcagaagatgaagtgcttaataaagggttcaaagacaccagtcagtatgtagtaggagaattggcagcactagagaatgagcaaaagcaaattgacacccgtgccgcgctggtggagaagcgccttcgctatctcatggacacaggaaggaacacagaagaagaagaagctatgatgcaggaatggtttatgttagttaataagaaaaatgccttaataaggagaatgaatcagctctctcttctggaaaaagaacatgatttagaacgacggtatgagctgctgaaccgggaattgagggcaatgctagccattgaagactggcagaagaccgaggcccagaagcgacgcgaacagcttctgctagatgagctggtggccctggtgaacaagcgcgatgcgctcgtcagggacctggacgcgcaggagaagcaggccgaagaagaagatgagcatttggagcgaactctggagcaaaacaaaggcaagatggccaagaaagaggagaaatgtgttcttcagtag

SEQ ID NO: 278773 - DNA, 3591 bp, Artificial Sequence
  derived and/or modified sequence
atggcgtccgtctggaaacgcctccaaagagtaggcaagcacgcctcgaaattccaattcgtggcatcatatcaggagctcatggtggagtgtaccaaaaaatggcagccggacaaactggtggtcgtatggacccggaggtcacgaaggaaaagcagtaaagcccactcatggcagccaggcattaaaaatccatacagaggggtggtggtttggcccgtccccgagaacatcgagatcacagtgacgctgtttaaagacccccacgccgaagagtttgaggacaaagaatggaccttcgtcatcgaaaatgagtctccctcaggacgcaggaaagcgctggcgacgtcttccataaacatgaagcaatacgcaagccccatgcctactcagacagatgtcaaactcaaattcaaacccctttcaaagaaagttgttagtgctgcgctgcagtttagcctcagctgcatattcctccgcgaaggcaaagcaacagacgaggacatgcaatccctggcgagcctcatgtcaatgaaacaggcggatatagggaatctcgacgattttgaggaagacaatgaagatgacgacgagaatcgagtcaatcaggaagaaaaagccgccaagattaccgaactcataaataagttaaactttttggatgaggcagaaaaggacctcgccaccgttaactctaacccatttgacgaccctgacgctgccgagctcaacccctttggcgatcccgatagtgaggagccaataacagaaacggcttctccccggaaaacagaagactctttctacaacaactcctataaccctttcaaggaagtgcagacaccccagtacctcaatcctttcgacgaacccgaggctttcgtcaccataaaagactcacccccccagtctacgaagcgaaagaatatccggcctgtggatatgtcgaagtatctgtatgcagactcctccaagactgaggaggaggagttggatgaaagcaaccctttctacgagccaaaatccacccctccacccaataaccttgtcaatccggtacaggagctcgagaccgagcgacgtgtgaagaggaaggctcccgccccaccagtactcagtcctaaaacgggcgtgctgaatgaaaacacagtctcggcagggaaagatctctcaacctcccccaaaccttcacccattcccagcccagtgcttggacgcaagcccaacgcctctcagtccttactcgtgtggtgtaaagaggtcacaaagaattatcggggggtgaagataaccaatttcactacttcctggcgcaacgggttgagcttttgcgcaattttacatcacttcaggccagatctgattgattataagtccttgaatccccaagatatcaaagagaataataagaaggcctatgacggctttgccagcataggaatctccaggcttttggaacccagcgacatggttctgcttgcaatccctgacaagcttaccgtcatgacttatctgtatcagattcgagctcatttctctggtcaggaactcaatgttgtgcaaatcgaagaaaacagctctaagtctacctataaggtgggcaattacgaaaccgacaccaatagctcagtcgaccaggagaaattctacgccgaattgtcagatctaaaacgtgagccggagcttcaacaacctatcagcggagccgtcgattttctctcgcaggacgattctgttttcgtaaatgattcaggggtgggagaatcggaaagcgaacatcaaaccccagatgatcatctctctcccagcactgccagcccctattgtagacggaccaagtctgatactgaaccccagaagtctcagcaaagtagcgggagaacgtctgggtctgatgatcctggaatttgttctaacacagattcaactcaggcccaggtcttgttgggcaagaaacgtctactcaaagccgagaccttggagctgtccgacctttatgtatctgacaaaaaaaaagacatgagcccaccctttatttgcgaagagaccgatgaacaaaagctgcagaccctggatatcgggtcaaacttagaaaaagagaagctggaaaacagcaggtcattggaatgccggagcgatcccgagtcccctatcaaaaagacatcactctcccccacctctaagctgggatactcatacagcagggacctggacttagcgaagaaaaaacatgcgagtctgcgccaaaccgagagtgatcccgacgcagataggacaacattgaaccacgccgaccatagctcgaagattgtgcagcaccgtctactgagccggcaggaggagctgaaagaacgtgccagagttctacttgagcaagcacggcgcgacgcggccctgaaggccggtaataaacacaatactaacacagccacacctttctgcaataggcaactgagcgatcaacaggacgaagaacgccgccgccagctcagggagcgggccagacagctgattgctgaagcacgttcaggcgtgaaaatgtctgagctgcccagctacggagaaatggccgcagaaaagctgaaggaaaggagtaaagccagcggcgacgaaaatgacaatatagagattgacacaaatgaggagatcccggaagggttcgtcgtaggaggtggggatgaattgacaaacctagaaaatgatctggatacaccagaacagaatagtaagctggtggacctcaaactcaagaagctgctcgaagtgcaaccacaagtggccaactcaccaagctccgctgcccaaaaggcagttactgaatcaagtgagcaggatatgaaaagtgggaccgaagacctccgtactgaacggctgcagaaaaccactgaaaggtttagaaaccctgtcgtgtttagcaaagatagcactgtccgtaagacacagttacagagtttctctcaatatatagaaaacaggcctgaaatgaagaggcaaagatccatccaggaggacaccaagaaggggaatgaggaaaaagcagccatcacagagactcagagaaagccatccgaagacgaggtgctgaataaaggctttaaagatactagccagtacgtggtgggggagctggccgccctagaaaacgagcagaagcagattgatacccgtgcagcactcgtcgaaaaacgcctgcggtacctgatggataccggacgcaatacggaagaggaagaagccatgatgcaggagtggttcatgctcgtgaataagaagaacgcactcatccgccgtatgaaccagctatcactgctggagaaggaacacgatttggaacgccgctacgagctgctaaacagggaactccgagcaatgctcgcaatagaagattggcagaaaacagaagcccagaagcggcgagaacaattgctcctggatgaactcgtagcactcgttaataagcgcgatgcgttggtgagagatctggatgctcaggaaaagcaggcagaggaagaggatgaacatcttgagaggactctcgagcagaacaagggaaaaatggccaaaaaagaggaaaagtgcgtattacagtag

SEQ ID NO: 278774 - DNA, 3591 bp, Artificial Sequence
  derived and/or modified sequence
atggcatccgtgtggaagcgcctgcagagggtgggtaagcacgcatctaaattccagtttgtcgccagctaccaggaattaatggtggagtgtaccaaaaaatggcagccggacaagctggttgtagtatggaccaggcgaagccggcggaagagcagcaaagcgcacagctggcagcccggcatcaagaacccttacaggggcgtcgtggtctggccagttcccgagaatatcgagattaccgtcacactatttaaggatccgcacgctgaagagttcgaggataaagaatggacattcgtgattgaaaacgaaagtccatccggtcgcagaaaagctctggctacttcaagcatcaatatgaaacagtacgcgagcccaatgccaacccagactgacgtgaaattgaaattcaagccgttgtccaaaaaagtggtatccgctgcactccagttctcactgtcttgcatttttctgagagaggggaaggcaaccgatgaagatatgcagtccctagcaagcttgatgtccatgaaacaggctgacattgggaatcttgatgacttcgaagaggataatgaagacgatgacgagaaccgggtaaaccaggaggagaaggccgccaagatcaccgagctcatcaacaagttgaattttctggatgaagcagaaaaggacctggccaccgtcaactccaacccgtttgacgaccctgacgccgcggaattaaacccttttggggatccagactccgaagagcctatcacggagacggcgagccctcggaaaactgaggacagcttttacaataactcatacaatcccttcaaagaggtacaaacgccgcaatacctgaatccgttcgatgaacccgaagccttcgttactatcaaggactcccccccccagagcaccaagaggaagaatatccgcccagtggatatgtcaaagtacctatacgccgactccagcaaaactgaggaggaggaactggatgagagcaatcctttctatgagcctaaatctactccaccaccgaacaatttagtgaatcccgtgcaggaactcgaaaccgaacgcagagtgaagcgcaaagcacccgccccacctgttctgtcaccaaagacgggcgtactgaacgaaaatacggtgtcagctggtaaagacctgagcacctcaccgaagccaagccctatcccaagcccagtgctggggcgaaagccgaacgccagccagagcctgctcgtgtggtgcaaagaggtgactaaaaactaccgcggcgtcaaaattactaactttactacttcttggaggaatggcctgtctttttgcgcaattctgcatcacttccgccctgatttgattgattacaaatccctgaaccctcaggacattaaggagaataacaagaaggcctacgacgggttcgcttcaatcggcatcagcaggttgcttgaaccctctgacatggtgctccttgcaatccctgataagctgaccgtgatgacttacctgtaccaaattagagcccatttcagtggtcaggagctgaatgtggtacagatcgaagaaaattccagcaagtccacctacaaggtgggaaattacgaaactgacaccaattcctccgtcgatcaagaaaaattttacgctgaactgtccgatcttaagagggagcctgaacttcagcagccgatctcaggcgctgttgatttcctgagccaggatgattcggtgttcgttaacgattcaggtgtgggggaaagtgaatccgaacatcagactccagatgaccacctgtctccatccactgcctccccatactgccgccgcacgaaatccgacactgagcctcagaagtcccagcaatcgtccggtagaacatctggatccgacgacccagggatctgtagtaataccgactctacacaggctcaggtgttgctcgggaaaaagagactcctgaaggctgagaccctagaattaagcgatctctacgtgtcggataagaaaaaagacatgtctcccccatttatctgcgaggaaactgacgagcagaaactgcaaaccctagacattgggagcaacctggagaaagagaaactggagaacagtcgcagtttggaatgccgttcagacccagagagcccgattaagaagacaagcctctctcccacaagcaaattgggctactcatacagccgagatctcgacctggcaaagaaaaaacacgccagtctgcgtcaaacggaaagcgatccagacgccgacagaaccactttaaaccacgcagatcactcctctaagatcgtgcagcaccggctgcttagccgccaggaagaattgaaggagcgggctcgcgtgctcctagagcaggcaagaagggatgctgccttaaaagctggcaataaacataatacaaacaccgcgacacccttctgcaatcggcagctctctgatcaacaggatgaggagagacgtcggcagttgagagaaagggcacggcagctcatcgcagaagccagaagcggcgtgaaaatgtcagagttgccctcatatggcgaaatggccgctgagaagcttaaggaacgatcgaaggcatccggcgatgaaaatgataacattgaaattgacacgaacgaggagattccagaggggtttgtcgtcggaggtggggatgagcttactaacttggagaacgacttggatacccctgagcagaactccaaacttgtagacctcaagctgaagaagctccttgaggtacaacctcaggtggctaatagccccagtagtgccgcacagaaggcagttacggagagttccgagcaggacatgaagagtgggacagaggatttacgcactgagaggctgcaaaagaccaccgaacgcttccgcaacccagtggtctttagtaaggatagcaccgtgagaaagactcagttacaatcattctcccaatacatcgagaataggccagagatgaaaagacaacggtctatccaagaggacactaagaaggggaacgaggaaaaagctgccattacagagacgcagagaaaaccttcagaggatgaggtgctgaataaaggctttaaggatacctcccagtacgttgtaggagagcttgccgcactggaaaatgaacagaaacagatcgatacaagggcagctctggtcgagaagcgcctgcgatacctgatggacacggggagaaataccgaagaggaggaagcaatgatgcaggagtggttcatgctggtgaacaagaagaacgccctgatacgcagaatgaatcagttgagtctattagagaaggaacatgacctcgaacgcagatacgaattgctgaacagagaactgagagctatgctagctatagaggactggcagaagactgaggcccagaaacggcgtgagcagctcctgttggatgagctcgtggccctagtgaacaagagagacgcattagtaagagatctcgacgctcaggaaaagcaggccgaagaagaagatgaacatctagagcggaccttggaacagaataagggcaaaatggccaagaaggaggagaaatgcgttctgcagtag

SEQ ID NO: 278775 - DNA, 3591 bp, Artificial Sequence
  derived and/or modified sequence
atggcctctgtgtggaagaggctgcagagggtgggcaagcacgccagcaagttccagtttgtggccagctaccaggagctgatggtggagtgcaccaagaagtggcagcctgacaagctggtggtggtgtggacccggcgcagcaggaggaagagcagcaaggcccacagctggcagcccggcatcaagaacccctaccggggcgtggtggtgtggcctgtgcctgagaacatcgagatcaccgtgaccctcttcaaggacccccacgccgaggagtttgaggacaaggagtggacctttgtgattgaaaatgaaagccccagcggccgcaggaaggccctggccaccagcagcatcaacatgaagcagtatgccagccccatgcccacccagacagatgtgaagctgaagttcaagcccctgagcaagaaggtggtgtctgctgccctgcagttcagcctgagctgcatcttcctgcgggagggcaaggccacagatgaggacatgcagagcctggccagcctgatgtccatgaagcaggccgacatcggcaacctggatgactttgaagaagataatgaagatgatgatgagaacagagtgaaccaggaggagaaggccgccaagatcacagagctgatcaacaagctgaacttcctggatgaagctgagaaggacctggccaccgtgaacagcaacccctttgatgatcctgatgctgctgagctgaacccctttggagaccctgattctgaggagcccatcacagaaacagccagccccaggaagacagaagattccttctacaacaacagctacaaccccttcaaggaggtgcagaccccccagtacctgaacccctttgatgagcctgaggcctttgtgaccatcaaggacagccccccccagagcaccaagaggaagaacatccggcctgtggacatgagcaagtacctgtatgctgacagcagcaagacagaggaggaggagctggatgagagcaaccccttctatgagcccaagagcaccccaccacccaacaacctggtgaaccctgtgcaggagctggagacagagcggcgggtgaagaggaaggccccagcccctcctgtgctgagccccaagacaggagtgctgaatgaaaatacagtgtctgctgggaaggacctgagcaccagccccaagcccagccccatccccagccctgtgctgggcaggaagcccaatgccagccagagcctgctggtgtggtgcaaggaggtgaccaagaactacagaggagtgaagatcaccaacttcaccacctcctggagaaatggcctgtccttctgtgccatcctgcaccacttccggccagacctgattgactacaagagcctgaacccccaggacatcaaggagaacaacaagaaggcctatgatggctttgccagcatcggcatcagccggctgctggagcccagcgacatggtgctgctggccatcccagacaagctgactgtgatgacctacctgtaccagatccgggcccacttcagcggccaggagctgaatgtggtgcagatcgaggagaacagcagcaagagcacctacaaggtgggcaactatgaaacagacaccaacagctctgtggaccaggagaagttctatgcagagctgagtgacctgaagcgggagcctgagctgcagcagcccatctctggagctgtggacttcctgagccaggatgacagcgtgtttgtgaatgacagcggcgtgggggagagcgagagcgagcaccagaccccagatgaccacctgagccccagcacagccagcccctactgcaggaggaccaagagtgacacagagccccagaagagccagcagagcagcggccgcaccagcggcagtgatgaccccggcatctgcagcaacacagacagcacccaggcccaggtgctgctgggcaagaagaggctgctgaaggccgagaccctggagctgagtgacctgtatgtgtctgacaagaagaaggacatgagcccccccttcatctgtgaggagacagatgagcagaagctgcagaccctggacatcggcagcaacctggagaaggagaagctggagaacagccgcagcctggagtgccgcagtgaccctgagagccccatcaagaagaccagcctgagccccaccagcaagctgggctacagctacagccgggacctggacctggccaagaagaagcacgccagcctgcggcagacagaaagtgaccctgatgctgacaggaccaccctgaaccacgccgaccacagcagcaagatcgtgcagcaccggctgctgagccggcaggaggagctgaaggagcgggcccgggtgctgctggagcaggccaggagagatgctgccctgaaggccggcaacaagcacaacaccaacacagccacccccttctgcaaccggcagctgagtgaccagcaggatgaggagcggcggcggcagctgcgggagcgggcccggcagctgattgctgaggcccggtctggagtgaagatgtctgagctgcccagctatggagagatggctgctgagaagctgaaggagaggagcaaggccagcggagatgaaaatgacaacattgaaattgacaccaatgaggagatccctgagggctttgtggtgggcggcggagatgagctgaccaacctggagaatgacctggacaccccagagcagaacagcaagctggtggacctgaagctgaagaagctgctggaggtgcagccccaggtggccaacagccccagcagcgctgcccagaaggctgtgacagagagcagcgagcaggacatgaagagcggcacagaggacctgaggacagagcggctgcagaagaccacagagcgcttcaggaaccctgtggtgttcagcaaggacagcacagtgaggaagacccagctgcagagcttcagccagtacatcgagaacagacctgagatgaagaggcagaggagcatccaggaggacaccaagaagggaaatgaggagaaggccgccatcacagagacccagaggaagcccagtgaagatgaggtgctgaacaagggcttcaaggacaccagccagtatgtggtgggggagctggccgccctggagaatgagcagaagcagattgacaccagggctgccctggtggagaagaggctgcgctacctgatggacaccggcaggaacacagaggaggaggaggccatgatgcaggagtggttcatgctggtgaacaagaagaatgccctgatccggaggatgaaccagctgagcctgctggagaaggagcatgacctggagcggcgctatgagctgctgaaccgggagctgcgggccatgctggccatcgaggactggcagaagacagaggcccagaagaggcgggagcagctgctgctggatgagctggtggccctggtgaacaagagagatgccctggtgcgggacctggatgcccaggagaagcaggccgaggaggaggatgagcacctggagaggaccctggagcagaacaagggcaagatggccaagaaggaggagaagtgtgtgctgcagtag

SEQ ID NO: 278776 - DNA, 3591 bp, Artificial Sequence
  derived and/or modified sequence
atggccagcgtgtggaagcggctgcagcgggtgggcaagcacgccagtaagttccaattcgtcgcttcttatcaggaactcatggttgagtgtaccaaaaaatggcagcctgacaaactcgtcgtggtctggactcggagatcccgcaggaaatcaagcaaggcccattcctggcagccaggtattaaaaatccctacagaggcgtggtggtgtggccagtccccgaaaacatcgagataacagtgactctttttaaggaccctcacgctgaggagttcgaggataaagaatggactttcgtcatcgagaacgagtctcccagcggaagaagaaaagctcttgctaccagctctataaacatgaaacagtacgcgtcacccatgccaactcagaccgacgttaagctgaagttcaagccgctctctaaaaaagtggtttctgcggccttgcagtttagcctcagttgcatattccttcgtgagggtaaggctactgacgaagatatgcagtccttggccagccttatgtcgatgaaacaggccgatattggtaacttggatgacttcgaagaggacaatgaggacgacgatgaaaaccgagtaaaccaggaggagaaagctgcaaaaataaccgaactgatcaataagctcaacttcctggacgaggcggaaaaggatctggccaccgtcaattcgaacccgtttgacgatcccgacgcagccgaactcaacccctttggggacccggattctgaagaacctatcacggaaacggcctccccccgaaaaacagaggatagcttctacaataattcctataatccttttaaggaagtgcagacgccccagtacctaaatcccttcgatgagccagaggccttcgtgacgattaaagattcaccaccccagtcaactaaacgaaagaacattcggcctgttgatatgtcgaagtacctgtacgccgactcctcgaagaccgaggaggaggagttggatgaatctaacccattctacgagcccaagtctacacccccccctaataacctcgttaaccccgtgcaggagcttgagacagaaagacgcgtgaagagaaaagcaccagccccccccgtgctatctcctaaaacaggggtcctgaatgaaaataccgtatccgcgggcaaagatttgtctaccagcccgaagccctctccgattcctagtcctgtcctgggtaggaaacctaatgccagccaaagtttgctggtttggtgcaaagaggtaacaaaaaactatagaggcgtgaaaatcacaaactttacgacaagttggaggaatggcttgagcttttgcgcaatccttcaccattttcggccggatctcatcgactataaatcactgaaccctcaggacatcaaggagaataataagaaagcctacgacggatttgcctcgattggtatcagtagattacttgagccatccgacatggtgttgctcgccatcccagacaaattaacagtgatgacatacctgtatcagattagggcccactttagcggacaggagttgaacgttgtgcagatcgaagagaactcttctaaatcaacatacaaggtcggcaactacgagaccgataccaatagctccgtcgaccaggagaaattttacgcggagctctccgacctgaaacgggagcctgaactccagcagccgatctctggtgcagtcgacttcctctcccaggacgattccgtgttcgtgaacgatagtggcgtgggagaatccgagagtgaacaccaaactccagacgatcacctgtccccctccactgcttctccatattgccggaggacaaagtccgacaccgaaccccagaagagccagcagtctagcgggcgcactagcggaagcgacgaccccggcatctgttcaaatacagattctacacaagcccaggtgttgctggggaaaaagcgcttgctgaaggccgagaccctggagctttctgacctgtatgtttccgacaaaaaaaaagacatgagccccccttttatatgcgaggagacggatgagcagaaattacagaccctcgacatcggctctaatctggagaaagaaaaactcgagaatagccgctcgttagagtgccggtcagaccccgaaagcccaattaagaagacgtccctctcacccacttctaaactggggtactcttactctcgcgatttagacctggccaagaaaaagcacgcttccttgcgccagacagagagcgatccagacgctgataggaccacattgaatcacgcagatcacagtagcaagattgtacagcatcgactgctttccaggcaggaagagttgaaggagagagctagagtcctgttggaacaggctcgcagagacgcagcactgaaagccgggaataagcacaacactaataccgccacacccttttgtaacaggcagctaagcgaccagcaggatgaagaacgaaggagacagctgcgagaacgggcccgccagttaatcgccgaagccaggagtggggtgaagatgtctgagcttcctagctatggtgaaatggccgctgagaagttgaaagagagatccaaagcaagcggcgacgaaaatgataacattgagatcgacacaaacgaggaaattcctgaaggttttgttgtggggggaggggacgagctcacaaaccttgagaatgacttggatactcctgaacagaactccaagttggttgatttgaagcttaaaaaactcttggaggtgcaaccacaggttgcaaacagtcctagcagcgcagcccagaaggctgttactgagtcctctgagcaggatatgaagtccggcactgaggacctcagaactgaaaggctgcagaagactaccgaacgttttcgaaaccctgtagtgttttctaaagactccactgtccggaaaacgcaactgcagagctttagccaatatatagagaatcgaccagaaatgaagcgccaaagatccatccaggaagacactaaaaaagggaacgaagagaaagcagccatcactgagacacagcgaaaaccgtcagaagacgaggtgttgaacaagggtttcaaagacacctctcaatacgtagtgggcgaactggctgccctggagaacgagcagaaacagatcgatactagggcggcgttagtcgagaagcgtctgagatacttgatggacacagggagaaatacagaggaagaggaagccatgatgcaggagtggtttatgttagtcaacaaaaagaacgctctgattcggcgcatgaaccagctgtccctgcttgagaaagaacacgacctcgaacgtcgttatgaattgctcaatagggagcttcgtgctatgctggctatcgaggactggcaaaagactgaggcacagaaacgcagagaacagctgctactagacgagctggtggcactcgtgaataagagggacgccttggtacgggacctcgatgcacaggagaagcaggcagaagaagaagatgagcacttggagcggacactagaacaaaataaaggaaagatggcaaagaaagaagaaaagtgtgttctgcaatag

SEQ ID NO: 278777 - DNA, 3591 bp, Artificial Sequence
  derived and/or modified sequence
atggccagcgtgtggaagcggctgcagcgggtgggcaagcacgcctcaaaatttcaatttgtcgcatcctaccaggaactgatggtggagtgtactaagaagtggcagcctgataagctcgtcgtggtgtggacccgcagaagcaggcgaaagtcctccaaggcccactcgtggcagccggggatcaaaaacccctaccggggtgtagttgtgtggccagtgccagagaacatagagatcacagtgaccctatttaaggatccacacgcggaagaatttgaagataaagaatggacgttcgtaattgagaacgagtccccatcaggtcgacggaaagctcttgcaacttcctccatcaacatgaagcagtatgccagtccaatgcctacgcagacggacgtcaaactgaaatttaaacccttgtccaaaaaggtggtgagcgcagctttgcagttttccctctcatgtatctttctgagagaaggtaaggcaacagacgaggatatgcagagtcttgcatctctgatgtctatgaagcaggccgacatcgggaacctcgacgactttgaggaggacaatgaagacgatgacgagaatagggtcaaccaggaagaaaaggcagcaaaaatcaccgaactgatcaataaactcaacttcctcgacgaggccgagaaagaccttgccacagtgaattcaaatccttttgacgacccggatgccgcagagcttaacccattcggcgaccccgatagtgaagagcccatcacggaaacggcatccccaaggaaaacagaggactctttttacaataatagctataacccttttaaggaggtgcagacacctcagtatttaaatcccttcgatgagcctgaggcctttgtgaccattaaagacagccctccgcagtcgacaaagaggaagaatataaggcccgtggacatgagcaagtacctttatgcggacagtagtaaaactgaggaggaggagcttgacgagtcgaaccccttctacgagcctaaaagcactcctccaccaaacaaccttgtcaatcctgtgcaggaactggagactgaacgcagagtcaagagaaaagctccagctccccctgtcctgtcccccaagaccggcgttctcaacgagaatacagtgagtgccgggaaggatttgtcaacaagccccaagcccagtccaattccttctccagttcttggccgaaagcccaatgcaagccaatcgctactggtatggtgtaaagaagtcacaaaaaactacagaggcgtcaagataacgaactttaccacatcgtggcggaatggtctttcattctgcgctattctgcatcactttcgccctgacttgatagattacaagtctctcaacccgcaggatataaaggagaacaacaaaaaggcttacgacggtttcgcctccattgggatcagcagattattggagccaagcgatatggttctgttagccatccctgataaacttaccgtgatgacatacctgtaccagatccgggcccacttttctggccaggaactgaacgtggtccaaattgaagagaattcttctaagagcacctataaagtcggcaactatgagactgacacgaattcctctgtggatcaggaaaagttttatgcagaactgtccgaccttaagagagagcccgaactgcaacaacctatcagcggcgcggtggatttcctctcgcaggacgactcagttttcgtgaacgactcgggcgttggggagagcgagtcggagcaccagactcctgatgatcacctaagcccgtctactgccagtccgtactgcaggagaaccaagtcagatacagagccacagaagagtcagcaaagctccggacgcactagtggcagcgacgaccctggtatctgtagcaacacagactcaacacaagctcaagttttattgggtaagaagcgcctcctgaaagcagaaacgctggaactcagcgatctatacgttagcgataaaaagaaagacatgagcccacctttcatctgcgaagagacagatgagcagaaactgcagacacttgatattggctcgaatctagagaaagagaaactcgagaactcccgcagcctcgagtgcagatccgatcctgagagtccaattaaaaagacctctttatcccctacatcgaagttgggttacagctactcgagggacctagatttggctaaaaagaagcatgcttccttacggcagacggaaagcgaccccgatgctgacagaacaacccttaaccatgccgatcacagctcaaaaatcgtgcagcaccggctgctgtctaggcaggaggaactgaaagaacgggcacgggttttactggaacaagccaggagggacgcagcccttaaagccggaaataagcataatactaacactgctacaccattctgcaatagacagctttctgatcagcaggacgaagaaagacgccgccagctgagggagcgggcaaggcaacttatcgccgaggcccgcagcggtgtgaaaatgtccgaactgccatcctatggtgaaatggctgctgagaagttgaaagagagatccaaagcgagtggcgatgagaacgacaatatagaaatagataccaatgaagaaatccccgagggcttcgtggtgggtggcggagatgaacttacaaatttggagaacgacctcgatacacctgaacaaaactctaagctggtggatctcaagctgaagaagctcttagaagtccagcctcaggtggccaactccccttctagtgccgcccagaaagcggtcaccgagtcctctgaacaggatatgaaatcagggactgaggatctgagaaccgagagactgcagaaaacgactgagcgcttccgtaacccagtcgtattcagtaaggactctactgtcaggaagacacagctgcagtctttctcccaatatatcgagaacagacctgaaatgaaacgccaacgaagcatccaggaggatactaagaaggggaatgaagagaaagcggcgatcaccgaaactcagcgcaaacccagtgaagatgaagtcctgaacaagggcttcaaagacacatcacagtatgtagtgggcgagctggcggcactagagaatgaacagaaacagatcgatacccgggctgctcttgtagagaagagattaagatatctgatggacactggtagaaacaccgaggaggaggaagccatgatgcaagaatggtttatgctcgtgaataagaagaacgccctcatcaggcgaatgaaccagcttagccttttggagaaagaacacgacttagagaggcgatacgagctcctgaacagagagctccgtgcgatgctcgcgatagaggattggcagaagacagaggcccaaaagcgacgagagcagctgcttctggacgagctggttgcgctcgtgaacaagagggatgcccttgtcagagatcttgacgctcaggagaagcaggcggaggaggaagacgagcacctggagcgaactctggagcagaataaaggcaagatggccaaaaaggaggagaagtgcgttctgcagtag

SEQ ID NO: 278778 - DNA, 3591 bp, Artificial Sequence
  derived and/or modified sequence
atggcttccgtctggaaaaggctgcagcgggtcgggaagcatgcgtctaagttccagttcgtagcgagctaccaggagctcatggttgaatgcacgaaaaagtggcaacccgataaactggtggtggtatggacgaggaggtccaggcgcaagtcatctaaggcccactcgtggcagccgggtattaaaaacccctataggggggtggtggtgtggccggtgccagagaatatcgaaataacggtgaccctgtttaaagacccacatgcagaagagtttgaagataaggaatggacctttgtgattgaaaacgaatctccttcaggcagacggaaggcccttgcaaccagctccattaatatgaagcagtacgccagtcccatgccaacacagacagatgttaaactcaagtttaagcctctctccaaaaaagtggtgtcagctgcactgcagttcagcctgtcttgcatcttcctgcgcgaggggaaagccactgatgaggatatgcaaagcctggcctccctgatgagcatgaagcaggcagacattggaaatctcgatgatttcgaggaagacaatgaagacgatgacgaaaatagggtcaatcaggaggaaaaagccgcaaaaattaccgaactgatcaataagttgaactttctagacgaagctgaaaaggatcttgctacagtgaacagtaatccttttgacgatcctgatgccgctgaacttaatccgtttggggaccctgatagtgaagagcctattactgaaaccgcgtcgcctcggaaaacagaggacagtttctacaacaattcatataacccttttaaggaagttcagactccccagtacttgaacccttttgatgagcccgaagcctttgttaccattaaagacagcccccctcaaagcacaaaacgcaaaaacattcggcctgtcgacatgtctaaatatttgtatgccgactcgtctaaaacagaggaagaagagctggatgagtcaaacccattctacgagccaaagagcacgcccccaccaaacaatctggtgaatcctgtccaggaactggagacggagcgcagggtcaaacggaaagccccagctccgccagtgctaagccccaagaccggcgtgcttaacgagaataccgtgagcgccggaaaggacctgtccacatctcccaaaccgagccccattccctctccggtgctgggcagaaaaccaaatgcaagtcagtcactgctggtgtggtgcaaggaagtgaccaagaattacagaggagttaagatcacaaatttcactaccagctggagaaacggcctgtctttctgtgccatcctgcatcattttcgcccagacctcatcgactataagtcactgaatccacaggatattaaggaaaataataaaaaggcctacgacggcttcgcctccattggaatcagcagattactggaaccctctgacatggttctcctggcaatacccgacaaattgaccgttatgacgtatctgtaccagataagggcccacttcagcggccaagaactgaatgtggttcaaattgaggaaaactccagtaagtcgacctataaggtgggcaactacgagaccgacaccaacagttccgtggatcaggagaaattttacgccgagctgtcggatctgaagagagagccagaactgcagcagcctatatccggggctgttgactttctgtcccaagatgactctgtatttgtcaatgactcaggggttggcgagagtgagtcggagcatcagacccccgacgatcacctgagtccaagtaccgccagcccctactgtcgtagaactaaaagcgatactgaaccccaaaagagtcagcagtcctccggacgcacaagcgggtcagacgatcccggaatttgctccaacactgactccacccaggcccaggtgcttctgggtaagaagaggctgctgaaagcagaaaccctggaactgtcagacctgtacgtgagcgataaaaagaaggacatgagtcccccatttatttgcgaagagacagacgaacaaaagctgcagaccctcgacattggctccaacttggagaaggaaaagcttgagaacagccgatcgctggagtgccgaagcgacccagaatccccaatcaaaaaaaccagtctgagccccacgagcaaacttggctacagttattcaagagatttagacctggccaaaaagaaacatgcttctctgcggcagaccgaatctgaccctgacgctgatcggactacattgaatcatgccgaccacagctccaaaatcgtgcagcatcgactgctttcaagacaggaagaactgaaagagagagcacgggttctgttagagcaggctcgacgggacgctgcactgaaggcaggaaacaaacacaataccaataccgccactccattctgtaatcgtcagctgtcagatcaacaagacgaagagcgtagaagacagctgcgtgagcgggcaaggcagttaattgcagaggctaggagtggtgtcaagatgtcagaactgccttcttacggcgaaatggccgctgaaaagctaaaagaaagatccaaggcgagcggggatgaaaacgacaatattgagattgataccaacgaagaaatccctgaggggtttgtcgtggggggtggcgatgaattgactaatcttgaaaacgacctggatactcctgaacagaatagcaagctggttgatctgaagttaaaaaagctcctcgaagtgcagccccaagtggccaattctcccagtagcgcagcgcaaaaagcagtcaccgaaagctccgaacaggacatgaaaagcggcacagaggatcttaggactgagcgtctgcagaaaacgacagaaagattccgtaaccccgttgttttctctaaagatagcactgtccggaaaacacagctgcagtccttcagccagtatatagaaaataggcctgagatgaagcgacagcggtcaattcaggaggatacaaaaaaaggaaatgaagagaaggccgcaatcacagagacgcagcggaagccatcagaggatgaagtgcttaacaaagggttcaaggatacttcccagtacgtcgttggcgagctggctgccttagaaaacgagcagaaacaaattgataccagagcagccttggtagaaaaacggctccgctatttgatggatacagggaggaatacagaagaagaagaagccatgatgcaggagtggtttatgctggtgaataagaagaacgctctcatcagacgaatgaatcagctctccctcctcgaaaaggaacatgatctggagagaaggtatgagctcctcaaccgggagttacgggcaatgttggccatcgaggactggcagaaaaccgaggcacaaaaaagacgcgaacagctcttactggacgagctggtagcattagtgaacaagcgcgatgccttggtgcgcgacctcgatgctcaggagaagcaggccgaagaggaagacgaacaccttgagcgaacactcgagcagaataaaggaaagatggccaaaaaggaagagaaatgcgtactccagtag

SEQ ID NO: 278779 - DNA, 3591 bp, Artificial Sequence
  derived and/or modified sequence
atggctagtgtgtggaagcggctccagcgggtgggaaaacatgcctctaaatttcagtttgtggcctcttaccaggaattgatggtagagtgcactaagaaatggcagcctgacaaattagtcgtggtctggactcggagatcccgcagaaaatcctctaaggctcactcctggcaacctggcatcaaaaatccataccggggtgttgtcgtttggcctgtgcccgaaaacatagagatcaccgtcaccctgttcaaagacccacatgctgaggagttcgaggataaggagtggacttttgtgatcgaaaacgaaagcccttccgggcgaagaaaggcactggccacttcaagtatcaacatgaagcagtatgcgtcgcctatgccgacgcagactgatgtcaagctcaaatttaaaccacttagtaagaaggtggtgtcagctgcgctgcagttttcgctctcttgcatatttctgcgcgaaggtaaggccacagacgaggacatgcagagcctcgcgagcctgatgtccatgaagcaggccgacatcggaaacctcgacgacttcgaggaggacaacgaggacgatgatgagaatagagtcaatcaggaagaaaaggccgctaaaatcaccgagctaatcaacaaacttaatttcctggatgaagcagagaaggacctcgcaaccgttaactctaacccattcgacgatccagatgcggctgaactgaatccgttcggggaccctgattccgaagagcctataacagagacagccagtcctaggaaaaccgaagactctttctacaacaatagttataacccgttcaaagaggtccagactccacagtacctgaatcccttcgatgaacctgaggctttcgttaccataaaggacagtccccctcagtccacgaaacgcaagaacatcaggcccgtcgacatgagtaagtatttgtacgctgactcttctaaaaccgaagaagaggaactggatgaatccaaccctttctacgagccaaagagcacgccgccacccaacaacctcgtgaatcctgtccaggagttggagaccgagcgaagagtgaagcgcaaggctcctgcgcctcccgttttgagccctaagaccggcgtgctgaacgagaacacagtctccgccggaaaggacctgtcaacaagtccaaaaccatcccccattccttctcccgtcctcggcagaaagccaaatgcatcacaaagcctgctcgtgtggtgcaaggaagtcactaaaaattataggggcgtgaagattactaactttaccacgagctggcgaaacggactatccttttgtgctattcttcaccattttaggcctgatttaattgactataaaagtttaaaccctcaggacatcaaggagaataataagaaagcctacgatggcttcgctagcattggtatttcccgcctgctggagcctagcgatatggtcttactcgcgattcctgacaagctgaccgttatgacctacttatatcagatccgtgcacacttttctggccaggagctgaatgtggtgcagatagaagaaaactcatctaaaagtacatataaagtggggaattatgagaccgatacaaactccagcgtcgaccaagaaaagttttacgcggaactgtcagacctgaagcgcgaacccgaactgcaacagcccatctccggcgcagttgactttctgtcacaggacgattcagttttcgtgaatgactctggcgttggagagtcggaatcagagcaccagacccctgatgatcatctctctccctcgacagccagcccatactgtcggcgtaccaagtccgatacggaaccccaaaagtctcagcagagttccggccgaacaagcggctccgacgatcctggcatctgtagtaataccgactccactcaggcccaggtcctgctaggcaaaaagcggctgttgaaggccgagactctggaattatctgatttgtatgtctcggataagaagaaggacatgtctcctccctttatttgcgaggagaccgatgaacagaagctgcagaccctagacataggctctaacctcgagaaggagaagctggaaaactcaaggagtttagaatgccggagtgatcccgaaagcccgatcaagaagacaagcctgtcacccactagcaaactggggtattcgtattcaagggacttggatctggccaaaaagaagcacgctagccttagacaaactgagtcagaccccgacgccgatcgaactacactgaatcacgcggaccactcctcaaaaattgtccaacaccggctcctgagtcgccaggaagagctcaaagaacgagcacgggtgctgctagagcaagccagacgtgatgccgctctcaaagccggtaacaagcacaacaccaacacagctactcctttctgcaatagacagttgtctgatcagcaggacgaggagcgccgaaggcagctacgggagagggctaggcagctgattgccgaggcaagatctggagtgaaaatgagcgagttgccgagctacggagagatggccgcagagaaacttaaagaaagatcaaaagccagtggcgacgagaatgacaacattgagatagataccaatgaggaaatccccgaagggttcgttgtgggcggaggtgatgagttaactaatctggaaaacgacctggacacacccgagcagaatagtaaacttgtggacttgaaactgaaaaaattactcgaagtgcagcctcaggtggctaactccccctcttctgccgcacagaaggccgtaacggaatctagtgagcaggatatgaagtctggcactgaggacctacgcacagagagactgcagaaaacaactgagcgattcagaaaccccgtggtgttctctaaggattcgactgtgagaaaaacacaactgcagtcgttctcccagtatatcgaaaaccgccctgagatgaaacggcagcgtagtatccaggaagacacaaaaaagggaaatgaagagaaggccgctattaccgagactcagcggaagccaagtgaggatgaggtcctcaataaggggttcaaggatactagccaatatgtcgtcggcgagcttgccgctctcgagaatgaacagaagcaaatcgatacgcgagcggcacttgttgagaaacgattgagatacctcatggacacaggcaggaacaccgaagaggaggaagctatgatgcaagagtggttcatgctagttaacaagaaaaacgctctgatccgcagaatgaatcaactgagccttctcgagaaagaacacgacctggagagacggtacgaactgctgaaccgcgaacttagagcaatgctcgctattgaggattggcaaaaaactgaggcacaaaagagaagagagcagttacttctggacgagctggttgccctggtcaacaaaagagacgctcttgtgcgcgacttggatgctcaggaaaagcaagcggaagaagaagacgagcatctcgaacggacacttgagcagaacaaggggaagatggccaagaaggaggaaaaatgcgtgctgcagtag

SEQ ID NO: 278780 - DNA, 234 bp, Artificial Sequence
  derived and/or modified sequence
atggccagcgtgtggaagagactgcagagagtgggcaagcacgccagcaagttccagttcgtggccagctaccaggagctgatggtggagtgcaccaagaagtggcagcccgacaagctggtggtggtgtggaccagaagaagcagaagaaagagcagcaaggcccacagctggcagcccggcatcaagaacccctacagaggcgtggtggtgtggcccgtgcccgagaactag

SEQ ID NO: 278781 - DNA, 609 bp, Artificial Sequence
  derived and/or modified sequence
atgaagagacagagaagcatccaggaggacaccaagaagggcaacgaggagaaggccgccatcaccgagacccagagaaagcccagcgaggacgaggtgctgaacaagggcttcaaggacaccagccagtacgtggtgggcgagctggccgccctggagaacgagcagaagcagatcgacaccagagccgccctggtggagaagagactgagatacctgatggacaccggcagaaacaccgaggaggaggaggccatgatgcaggagtggttcatgctggtgaacaagaagaacgccctgatcagaagaatgaaccagctgagcctgctggagaaggagcacgacctggagagaagatacgagctgctgaacagagagctgagagccatgctggccatcgaggactggcagaagaccgaggcccagaagagaagagagcagctgctgctggacgagctggtggccctggtgaacaagagagacgccctggtgagagacctggacgcccaggagaagcaggccgaggaggaggacgagcacctggagagaaccctggagcagaacaagggcaagatggccaagaaggaggagaagtgcgtgctgcagtag

SEQ ID NO: 278782 - DNA, 581 bp, Artificial Sequence
  derived and/or modified sequence
acgcgcggggcctggccaatggcggcggggcggtggaggttgagctgccgtggccctccagaatacccatcatatagcccctgaggtggcatggtgatgtctccatgagggaaccccttcccactcatcctgtcacgtatatcatagtgttcttgactgggccattcatctaagatgggatttaccctgtgaaacagggagaagacttatggaccccaagcatcatttcgagttgtagttgagtttttaaaagacatacatgcaaagttcctttgctttggaccctctgcattattaaagctgctgtattgctaacccagaactgctccagtgtcttgactgatcatcatggcttcagtttggaagagactgcagcgtgtgggaaaacatgcatccaagttccagtttgtggcctcctaccaggagctcatggttgagtgtacgaagaaatggcaaccagataaactggtggtagtttggaccagaagaagccgaaggaagtcttctaaggcacatagctggcaacctggaataaaaaatccctatcgtggtgttgttgtgtggcctgttcctgaaaacat

SEQ ID NO: 278783 - DNA, 1999 bp, Artificial Sequence
  derived and/or modified sequence
gatactcatatagtagagatctagaccttgctaagaaaaaacatgcttccctgaggcagacggagtctgatccagatgctgatagaaccactttaaatcatgcagatcattcatcaaaaatagtccagcatcgattgttatctagacaagaagaacttaaggaaagagcaagagttctgcttgagcaagcaagaagagatgcagccttaaaggcggggaataagcacaataccaacacagccaccccattctgcaacaggcagctaagtgatcagaagatctccggactgaacgattacaaaaaacaacagaacgttttagaaatcctgttgtgttcagcaaagattctacagtcagaaaaactcaacttcagtctttcagccaatatattgagaatagaccagagatgaaaaggcagagatcaatacaggaagatacaaagaaaggaaatgaggagaaggcagcgataactgaaactcagaggaagccatcagaagatgaagtgcttaataaagggttcaaagacaccagtcagtatgtagtaggagaattggcagcactagagaatgagcaaaagcaaattgacacccgtgccgcgctggtggagaagcgccttcgctatctcatggacacaggaaggaacacagaagaagaagaagctatgatgcaggaatggtttatgttagttaataagaaaaatgccttaataaggagaatgaatcagctctctcttctggaaaaagaacatgatttagaacgacggtatgagctgctgaaccgggaattgagggcaatgctagccattgaagactggcagaagaccgaggcccagaagcgacgcgaacagcttctgctagatgagctggtggccctggtgaacaagcgcgatgcgctcgtcagggacctggacgcgcaggagaagcaggccgaagaagaagatgagcatttggagcgaactctggagcaaaacaaaggcaagatggccaagaaagaggagaaatgtgttcttcagtagccatcagatcagaaagaatctctcccaacattttagagtcttgcttcccaaaccagaaaaagtcagactcattgttgatttaaaacttttaacattttgtttggctggattgtactactttacctctactttaccaccaccacccttttcctccctcctttccaaataatatacagaactccaaaatagcttcatttaaggatttttttgtgagttaacaatttccttgaaatcctgtgaaatagatttgcacagacaccttgtgagtgattggtattggaggtgttcaagaaactgttcgaaaaagaacaaaaacacttccctcgttattttctctcattttttgatgagaggaaaatttgaaacattattcttgttgttgttggtaatagcataatgacagtgggaggggtacaaggggataagaaaaatgtcatgatttttttccggtcctgccacatgtaacacttactctgttacctaaattttatagttagatcatatccaatctacttattaaactgtgttctatttaccagtggagtttttctgcagtggttgcgtttcactgtaaggataatggagttcctctcctctgctttcctcagaggatggtcctttaacatagccagaaacaagccctgtggtttgaaggtgagctgtgaggatgggactaattgatatgcaccagtttacaaagacagtcttatcatccgagaatacaccatctttttctctggataattatttcttacatcatgcttgattcctacattttgttgggtctcaacattggctcacgaatgctgttaatatttattctgtattgataaaaagtctgtcttgccactacaagtaaatcccccatttaatattttcttctttagcatagcactgtcattttttgtgaaaatggttatgtttatttattacaatactgagtcatatataaattttcaataaaagcagaaactttcttacctt

SEQ ID NO: 278784 - DNA, 234 bp, Artificial Sequence
  derived and/or modified sequence
atggcctcggtgtggaagcgtctgcaaagagtgggaaaacacgccagtaagtttcaattcgtagccagctaccaagaactgatggtggaatgtaccaagaagtggcagccagacaaattagtggtcgtatggactagaagaagccgcaggaaaagtagcaaagctcacagctggcagccaggcatcaaaaacccctatcggggagtggtcgtctggccagtgcccgagaattag

SEQ ID NO: 278785 - DNA, 609 bp, Artificial Sequence
  derived and/or modified sequence
atgaagcgccagagaagtattcaggaggatacgaaaaaaggtaacgaggagaaggcggcaatcaccgaaacacagcgtaagccctctgaagacgaggtcctgaacaagggcttcaaggacacatcacagtacgtagttggcgagctcgctgcccttgaaaacgaacagaagcagatagatacccgagctgcactcgtggagaaacgccttcggtacttgatggacaccgggagaaatacagaggaggaggaggcaatgatgcaggaatggttcatgctcgtcaacaagaaaaatgcactgatacggcgcatgaatcagctatccttacttgagaaggagcatgacctcgagaggcggtacgagctcctgaatagagaactaagggccatgttagcaatcgaagattggcaaaaaacagaggcccaaaagcggcgggaacagctattgcttgacgagctcgtcgccctcgtgaataaacgcgatgcactggtccgtgatctggacgctcaagaaaaacaggctgaagaagaagacgagcatcttgaacggactcttgaacagaataaggggaaaatggcaaaaaaggaggagaagtgcgtactgcaatag

SEQ ID NO: 278786 - DNA, 234 bp, Artificial Sequence
  derived and/or modified sequence
atggcctctgtgtggaagaggctgcagagggtgggcaagcacgccagcaagttccagtttgtggccagctaccaggagctgatggtggagtgcaccaagaagtggcagcctgacaagctggtggtggtgtggacccggcgcagcaggaggaagagcagcaaggcccacagctggcagcccggcatcaagaacccctaccggggcgtggtggtgtggcctgtgcctgagaactag

SEQ ID NO: 278787 - DNA, 609 bp, Artificial Sequence
  derived and/or modified sequence
atgaagaggcagaggagcatccaggaggacaccaagaagggaaatgaggagaaggccgccatcacagagacccagaggaagcccagtgaagatgaggtgctgaacaagggcttcaaggacaccagccagtatgtggtgggggagctggccgccctggagaatgagcagaagcagattgacaccagggctgccctggtggagaagaggctgcgctacctgatggacaccggcaggaacacagaggaggaggaggccatgatgcaggagtggttcatgctggtgaacaagaagaatgccctgatccggaggatgaaccagctgagcctgctggagaaggagcatgacctggagcggcgctatgagctgctgaaccgggagctgcgggccatgctggccatcgaggactggcagaagacagaggcccagaagaggcgggagcagctgctgctggatgagctggtggccctggtgaacaagagagatgccctggtgcgggacctggatgcccaggagaagcaggccgaggaggaggatgagcacctggagaggaccctggagcagaacaagggcaagatggccaagaaggaggagaagtgtgtgctgcagtag

SEQ ID NO: 278788 - DNA, 234 bp, Artificial Sequence
  derived and/or modified sequence
atggccagcgtgtggaagcggctgcagcgggtgggcaagcacgcctcaaagtttcaattcgtggctagctatcaagaactgatggtcgagtgtaccaagaagtggcagcctgacaagctggtggtggtgtggacccgacgctcccggcgcaaatcctcaaaggctcattcctggcagcctggcatcaagaacccgtacaggggcgtggtcgtctggcccgtaccagaaaactag

SEQ ID NO: 278789 - DNA, 609 bp, Artificial Sequence
  derived and/or modified sequence
atgaagcggcagcggagcatccaggaggacaccaagaagggcaacgaggagaaggcagcaatcaccgagactcagaggaagccttctgaggacgaagtcctgaacaaaggctttaaagacaccagccagtatgtggtcggagaactggccgctctcgagaatgaacagaaacagattgatacccgcgcggcactcgtggagaaacggttacgttatctaatggacacaggccggaacactgaggaagaagaggccatgatgcaggagtggttcatgctggtcaataagaagaatgctctgatcaggagaatgaaccagctgtcactcctcgagaaggagcacgacttggaaagaaggtacgagttgttaaacagggagttgcgtgcaatgctggccattgaagattggcaaaaaactgaggctcagaaaagacgtgaacaattgctcctggatgagctggtcgctctcgtgaacaagcgtgatgccctggtgcgcgatctggacgcccaggagaagcaagcagaggaggaggatgaacatctagaacggaccttggaacaaaacaaagggaagatggccaagaaagaagagaagtgcgtgcttcaatag

SEQ ID NO: 278790 - DNA, 234 bp, Artificial Sequence
  derived and/or modified sequence
atggcatctgtttggaagaggttgcagcgagttgggaagcatgcaagtaagtttcagtttgtggctagttatcaggagctaatggtcgagtgtaccaagaaatggcagccggataagctcgtggtggtctggactcggcgaagtcgcagaaaatcatcaaaggcgcatagctggcagccaggaatcaaaaatccctaccgaggcgtggtcgtttggccagtccctgaaaattag

SEQ ID NO: 278791 - DNA, 609 bp, Artificial Sequence
  derived and/or modified sequence
atgaagcgacagcggtctatccaggaagacacgaaaaaaggcaatgaggaaaaggccgcaatcaccgaaacccagagaaaacccagcgaggacgaagtgcttaataaaggcttcaaagatacatctcaatatgtcgtcggggagctggctgcgttagagaacgaacaaaaacagatcgatacacgcgctgccctggtcgagaaacgcctccggtacctcatggataccgggaggaacacggaggaagaggaggcaatgatgcaggagtggttcatgctggttaataagaagaacgctctcattaggaggatgaaccaactgtcacttttagaaaaggagcacgatttggagcgacgctatgagctgttaaaccgagagttacgggcaatgctcgcgattgaagattggcagaaaactgaagcgcagaagaggcgggagcagctgcttctggacgagctcgtcgctctggtaaacaagcgcgacgccctcgtgcgggaccttgatgcccaggaaaaacaggccgaagaagaggacgagcacctggaacgtacgctcgaacagaacaagggaaaaatggcgaagaaggaagagaagtgtgttctccagtag

SEQ ID NO: 278792 - protein, 890 aa, Artificial Sequence
  derived and/or modified sequence
MSANNSPPSAQKSVLPTAIPAVLPAASPCSSPKTGLSARLSNGSFSAPSLTNSRGSVHTVSFLLQIGLTRESVTIEAQELSLSAVKDLVCSIVYQKFPECGFFGMYDKILLFRHDMNSENILQLITSADEIHEGDLVEVVLSALATVEDFQIRPHTLYVHSYKAPTFCDYCGEMLWGLVRQGLKCEGCGLNYHKRCAFKIPNNCSGVRKRRLSNVSLPGPGLSVPRPLQPEYVALPSEESHVHQEPSKRIPSWSGRPIWMEKMVMCRVKVPHTFAVHSYTRPTICQYCKRLLKGLFRQGMQCKDCKFNCHKRCASKVPRDCLGEVTFNGEPSSLGTDTDIPMDIDNNDINSDSSRGLDDTEEPSPPEDKMFFLDPSDLDVERDEEAVKTISPSTSNNIPLMRVVQSIKHTKRKSSTMVKEGWMVHYTSRDNLRKRHYWRLDSKCLTLFQNESGSKYYKEIPLSEILRISSPRDFTNISQGSNPHCFEIITDTMVYFVGENNGDSSHNPVLAATGVGLDVAQSWEKAIRQALMPVTPQASVCTSPGQGKDHKDLSTSISVSNCQIQENVDISTVYQIFADEVLGSGQFGIVYGGKHRKTGRDVAIKVIDKMRFPTKQESQLRNEVAILQNLHHPGIVNLECMFETPERVFVVMEKLHGDMLEMILSSEKSRLPERITKFMVTQILVALRNLHFKNIVHCDLKPENVLLASAEPFPQVKLCDFGFARIIGEKSFRRSVVGTPAYLAPEVLRSKGYNRSLDMWSVGVIIYVSLSGTFPFNEDEDINDQIQNAAFMYPPNPWREISGEAIDLINNLLQVKMRKRYSVDKSLSHPWLQDYQTWLDLREFETRIGERYITHESDDARWEIHAYTHNLVYPKHFIMAPNPDDMEEDP

SEQ ID NO: 278793 - DNA, 2673 bp, Artificial Sequence
  derived and/or modified sequence
atgagcgccaacaacagcccccccagcgcccagaagagcgtgctgcccaccgccatccccgccgtgctgcccgccgccagcccctgcagcagccccaagaccggcctgagcgccagactgagcaacggcagcttcagcgcccccagcctgaccaacagcagaggcagcgtgcacaccgtgagcttcctgctgcagatcggcctgaccagagagagcgtgaccatcgaggcccaggagctgagcctgagcgccgtgaaggacctggtgtgcagcatcgtgtaccagaagttccccgagtgcggcttcttcggcatgtacgacaagatcctgctgttcagacacgacatgaacagcgagaacatcctgcagctgatcaccagcgccgacgagatccacgagggcgacctggtggaggtggtgctgagcgccctggccaccgtggaggacttccagatcagaccccacaccctgtacgtgcacagctacaaggcccccaccttctgcgactactgcggcgagatgctgtggggcctggtgagacagggcctgaagtgcgagggctgcggcctgaactaccacaagagatgcgccttcaagatccccaacaactgcagcggcgtgagaaagagaagactgagcaacgtgagcctgcccggccccggcctgagcgtgcccagacccctgcagcccgagtacgtggccctgcccagcgaggagagccacgtgcaccaggagcccagcaagagaatccccagctggagcggcagacccatctggatggagaagatggtgatgtgcagagtgaaggtgccccacaccttcgccgtgcacagctacaccagacccaccatctgccagtactgcaagagactgctgaagggcctgttcagacagggcatgcagtgcaaggactgcaagttcaactgccacaagagatgcgccagcaaggtgcccagagactgcctgggcgaggtgaccttcaacggcgagcccagcagcctgggcaccgacaccgacatccccatggacatcgacaacaacgacatcaacagcgacagcagcagaggcctggacgacaccgaggagcccagcccccccgaggacaagatgttcttcctggaccccagcgacctggacgtggagagagacgaggaggccgtgaagaccatcagccccagcaccagcaacaacatccccctgatgagagtggtgcagagcatcaagcacaccaagagaaagagcagcaccatggtgaaggagggctggatggtgcactacaccagcagagacaacctgagaaagagacactactggagactggacagcaagtgcctgaccctgttccagaacgagagcggcagcaagtactacaaggagatccccctgagcgagatcctgagaatcagcagccccagagacttcaccaacatcagccagggcagcaacccccactgcttcgagatcatcaccgacaccatggtgtacttcgtgggcgagaacaacggcgacagcagccacaaccccgtgctggccgccaccggcgtgggcctggacgtggcccagagctgggagaaggccatcagacaggccctgatgcccgtgaccccccaggccagcgtgtgcaccagccccggccagggcaaggaccacaaggacctgagcaccagcatcagcgtgagcaactgccagatccaggagaacgtggacatcagcaccgtgtaccagatcttcgccgacgaggtgctgggcagcggccagttcggcatcgtgtacggcggcaagcacagaaagaccggcagagacgtggccatcaaggtgatcgacaagatgagattccccaccaagcaggagagccagctgagaaacgaggtggccatcctgcagaacctgcaccaccccggcatcgtgaacctggagtgcatgttcgagacccccgagagagtgttcgtggtgatggagaagctgcacggcgacatgctggagatgatcctgagcagcgagaagagcagactgcccgagagaatcaccaagttcatggtgacccagatcctggtggccctgagaaacctgcacttcaagaacatcgtgcactgcgacctgaagcccgagaacgtgctgctggccagcgccgagcccttcccccaggtgaagctgtgcgacttcggcttcgccagaatcatcggcgagaagagcttcagaagaagcgtggtgggcacccccgcctacctggcccccgaggtgctgagaagcaagggctacaacagaagcctggacatgtggagcgtgggcgtgatcatctacgtgagcctgagcggcaccttccccttcaacgaggacgaggacatcaacgaccagatccagaacgccgccttcatgtacccccccaacccctggagagagatcagcggcgaggccatcgacctgatcaacaacctgctgcaggtgaagatgagaaagagatacagcgtggacaagagcctgagccacccctggctgcaggactaccagacctggctggacctgagagagttcgagaccagaatcggcgagagatacatcacccacgagagcgacgacgccagatgggagatccacgcctacacccacaacctggtgtaccccaagcacttcatcatggcccccaaccccgacgacatggaggaggacccctag

SEQ ID NO: 278794 - DNA, 2673 bp, Artificial Sequence
  derived and/or modified sequence
atgtccgctaataactctccaccctccgcccagaagtctgtgctgcctaccgccatccccgccgtccttcctgccgctagcccttgttcttctcctaagactgggctgtctgcccgcctctctaatgggtccttttcagccccctctctcacaaactcccgcggctccgttcacaccgtcagctttctcctgcaaattggtctgactcgcgagtcggtgacgatcgaggcacaggagctgagcctcagcgcagtgaaagatcttgtttgttctatagtctaccagaaattccctgaatgtggttttttcggcatgtacgataaaatcctgctgttcaggcacgatatgaattccgaaaacatactgcagctgataacttcagctgacgaaatccacgagggagatctggttgaagttgttctcagtgcactggccactgtggaagatttccagattcggcctcatacactgtacgtgcatagctacaaggcccccaccttctgtgattattgcggcgagatgctgtggggcctagtgcgacaaggcttgaaatgcgagggctgtggcctgaactatcacaaacggtgcgccttcaaaattcctaataactgttcaggggtgaggaagcggaggttaagtaacgtgtccctgcctggccctggactgagcgtacctaggcccctgcagcctgaatacgtcgcgttgccatctgaggagagccacgtgcaccaggagccttcaaagagaattccaagctggtcaggacgcccaatctggatggagaaaatggtgatgtgtcgggttaaagtgccccatacctttgccgtgcattcatacacccgaccaaccatatgtcagtattgcaagcgactcctcaagggcctgttccggcaggggatgcagtgtaaggattgtaagtttaactgccataaaagatgtgcttctaaggttcctagggactgtctgggggaggtgacttttaacggtgagccatctagcctcggcaccgatactgatatccccatggatattgacaacaatgatattaactccgattctagccgaggcttggatgatactgaggagccgagcccacccgaggacaagatgttcttccttgatcctagcgacttagacgtggaacgagacgaggaagctgttaagacgatctctccctctactagtaataacattcccctgatgagggtggtgcaatcaattaagcacaccaagagaaaaagttctacaatggtaaaagaaggatggatggtgcactacacatctagagataacctgcgaaagcggcactactggcgtcttgactcaaagtgtctgacactcttccaaaatgaatcaggctctaagtactacaaggaaatccccttgagcgagatattgcgaataagttccccgagggacttcactaatatctctcaagggtctaatccacactgttttgagattattacagacaccatggtttactttgtcggggagaacaatggagactcatctcacaacccggtgctggcggccaccggggtcggactggatgtcgcacaatcctgggagaaagccatccggcaggccttgatgccagtgacccctcaggcttccgtttgcacttcccctggacagggcaaggatcacaaagacctgagcactagtatctcagtgtctaactgtcagatccaggagaacgtggatatctccactgtgtaccagatctttgctgacgaggtcctgggaagcgggcaattcggaattgtgtatgggggtaaacacagaaagaccgggagggatgtggctatcaaggtaatcgataagatgcggttcccaaccaagcaggagagtcagctaaggaatgaggtggccattctgcagaatctgcatcatcccgggattgtcaatctggaatgcatgttcgagaccccagagcgcgtattcgttgtcatggagaagctgcatggagatatgttagagatgatcctgagctctgaaaagagtaggctgccagagaggattacgaaattcatggtgacccagatcctggtggcgctgaggaatcttcatttcaaaaatatagtgcattgcgacctcaagccggagaacgtgctgctcgcaagcgccgaaccatttcctcaagtgaaactgtgcgacttcggatttgccaggattattggggagaagtcattccggcgctcggtggtcggaacgcctgcatacctggccccagaggtacttcgatctaaagggtacaatcggtctctcgatatgtggtcagtaggggtaattatatatgtttcattatccggtacctttccatttaacgaagacgaagatattaacgaccagatccagaatgccgcttttatgtaccctccgaacccatggagagagatctctggcgaagcgattgacttgattaataatttgctgcaagtcaaaatgagaaaaaggtacagtgtcgataagtctctatcccacccttggctccaggattaccagacgtggctcgatctcagggagttcgagacccgaatcggagaaagatacattacccacgaaagcgatgatgcaagatgggaaatccacgcgtacacccacaatctggtctatccaaagcattttatcatggctccgaatcctgacgatatggaagaagatccgtag

SEQ ID NO: 278795 - DNA, 2673 bp, Artificial Sequence
  derived and/or modified sequence
atgtctgccaacaacagccccccatctgcccagaagtctgtgctgcccacagccatcccagctgtgctgcctgctgccagcccctgcagcagccccaagacaggcctgagcgcccggctgagcaatggcagcttcagcgcccccagcctgaccaacagccggggctctgtgcacacagtgtccttcctgctgcagatcggcctgacccgggagagcgtgaccatcgaggcccaggagctgagcctgtctgctgtgaaggacctggtgtgcagcatcgtgtaccagaagttcccagaatgtggcttcttcggcatgtatgacaagatcctgctcttcagacatgacatgaacagcgagaacatcctgcagctgatcaccagcgcagatgagatccacgagggggacctggtggaggtggtgctgagcgccctggccaccgtggaggacttccagatccggccccacaccctgtatgtgcacagctacaaggcccccaccttctgtgactactgtggggagatgctgtggggcctggtgcggcagggcctgaagtgtgagggctgcggcctgaactaccacaagagatgtgccttcaagatccccaacaactgcagcggcgtgaggaagaggcggctgagcaatgtgtccctgcccggccctggcctgtctgtgccccggcccctgcagccagaatatgtggccctgcccagcgaggagagccacgtgcaccaggagcccagcaagaggatccccagctggagcggccggcccatctggatggagaagatggtgatgtgccgggtgaaggtgccccacacctttgctgtgcacagctacacccggcccaccatctgccagtactgcaagaggctgctgaagggcctcttccggcagggcatgcagtgcaaggactgcaagttcaactgccacaagagatgtgccagcaaggtgccccgggactgcctgggggaggtgaccttcaacggggagcccagcagcctgggcacagacacagacatccccatggacatcgacaacaatgacatcaacagcgacagcagccggggcctggatgacacagaggagcccagccccccagaggacaagatgttcttcctggaccccagcgacctggatgtggagagagatgaggaggccgtgaagaccatcagccccagcaccagcaacaacatccccctgatgagggtggtgcagagcatcaagcacaccaagaggaagagcagcaccatggtgaaggagggctggatggtgcactacaccagccgggacaacctgaggaagaggcactactggaggctggacagcaagtgcctgaccctcttccagaatgaaagtggcagcaagtactacaaggagatccccctgtctgagatcctgcgcatcagcagcccccgggacttcaccaacatcagccagggcagcaacccccactgctttgagatcatcacagacaccatggtgtactttgtgggagaaaataatggagacagcagccacaaccctgtgctggccgccactggagtgggcctggatgtggcccagagctgggagaaggccatccggcaggccctgatgcctgtgaccccccaggcctctgtgtgcaccagccctggccagggcaaggaccacaaggacctgagcaccagcatctctgtgagcaactgccagatccaggagaatgtggacatcagcacagtgtaccagatctttgctgatgaggtgctgggcagcggccagtttggaattgtgtatggaggcaagcacaggaagacaggaagagatgtggccatcaaggtgattgacaagatgaggttccccaccaagcaggagagccagctgagaaatgaggtggccatcctgcagaacctgcaccaccctggcatcgtgaacctggagtgcatgtttgagaccccagagcgggtgtttgtggtgatggagaagctgcacggggacatgctggagatgatcctgagcagcgagaagagccggctgcctgagcgcatcaccaagttcatggtgacccagatcctggtggccctgaggaacctgcacttcaagaacatcgtgcactgtgacctgaagccagaaaatgtgctgctggccagcgctgagcccttcccccaggtgaagctgtgtgactttggatttgcccgcatcattggagagaagagcttcagaagatctgtggtgggcaccccagcctacctggcccctgaggtgctgcggagcaagggctacaacagaagcctggacatgtggagcgtgggcgtcatcatctacgtgtccctgagcggcaccttccccttcaatgaagatgaggacatcaatgaccagatccagaatgctgccttcatgtacccacccaacccctggagggagatcagcggggaggccatcgacctgatcaacaacctgctgcaggtgaagatgaggaagcgctacagcgtggacaagagcctgagccacccctggctgcaggactaccagacctggctggacctgcgggagtttgagacccgcatcggggagcgctacatcacccatgaaagtgatgatgcccgctgggagatccacgcctacacccacaacctggtgtaccccaagcacttcatcatggcccccaacccagatgacatggaggaggacccctag

SEQ ID NO: 278796 - DNA, 6111 bp, Artificial Sequence
  derived and/or modified sequence
ctttgtggtctacagccacaccaccccaaatgtgcctgatcttgtctgatcttggaagctaagcattgttgggcctagttaggacctggataggagaaatcccttatggctaactatatgtcagaaagcatcagcttttctcgatggacccattcatctaatgaaatatgcctgtactattttaaaaagctttgtatttcgtcatagaaaagttcatccccccagaatgaaaatgaggacatttgagaaggtgatttaaggtgtggacatttgagaaggtgtcctatcaaattagtaaaccaaaggaaaagtactgaatagattaatccaaaacacttactgttttttaaacgaagaggatttcaccttgacagaaaaacaacttttattcaatatgtatttcctgaaattaaagagacaagtacagactgaaaggaaaatagattcgtaaataagctacgtcaactctatcctgctgaggatagctcagtgatgttaaatcctttacaaatccctggttgtcttcctacagacaagactgctttttgatgggactgatattaagagaaataggacctttggggcattcaactccttgataaaacttaaaagtatcggcatgagtggcttaacagaggaaataaagaagttttcaactaaatccaaaagtgcggtcattttctttactgctgttattttaaaaacctcttcataaccattgaaaaagaatcgacaactattttaaaagattaaagaaaggcagatgtctgcaaataattcccctccatcagcccagaagtctgtattacccacagctattcctgctgtgcttccagctgcttctccgtgttcaagtcctaagacgggactctctgcccgactctctaatggaagcttcagtgcaccatcactcaccaactccagaggctcagtgcatacagtttcatttctactgcaaattggcctcacacgggagagtgttaccattgaagcccaggaactgtctttatctgctgtcaaggatcttgtgtgctccatagtttatcaaaagtttccagagtgtggattctttggcatgtatgacaaaattcttctctttcgccatgacatgaactcagaaaacattttgcagctgattacctcagcagatgaaatacatgaaggagacctagtggaagtggttctttcagctttagccacagtagaagacttccagattcgtccacatactctctatgtacattcttacaaagctcctactttctgtgattactgtggtgagatgctctggggattggtacgtcaaggactgaaatgtgaaggctgtggattaaattaccataaacgatgtgccttcaagattccaaataactgtagtggagtaagaaagagacgtctgtcaaatgtatctttaccaggacccggcctctcagttccaagacccctacagcctgaatatgtagcccttcccagtgaagagtcacatgtccaccaggaaccaagtaagagaattccttcttggagtggtcgcccaatctggatggaaaagatggtaatgtgcagagtgaaagttccacacacatttgctgttcactcttacacccgtcccacgatatgtcagtactgcaagcggttactgaaaggcctctttcgccaaggaatgcagtgtaaagattgcaaattcaactgccataaacgctgtgcatcaaaagtaccaagagactgccttggagaggttactttcaatggagaaccttccagtctgggaacagatacagatataccaatggatattgacaataatgacataaatagtgatagtagtcggggtttggatgacacagaagagccatcacccccagaagataagatgttcttcttggatccatctgatctcgatgtggaaagagatgaagaagccgttaaaacaatcagtccatcaacaagcaataatattccgctaatgagggttgtacaatccatcaagcacacaaagaggaagagcagcacaatggtgaaggaagggtggatggtccattacaccagcagggataacctgagaaagaggcattattggagacttgacagcaaatgtctaacattatttcagaatgaatctggatcaaagtattataaggaaattccactttcagaaattctccgcatatcttcaccacgagatttcacaaacatttcacaaggcagcaatccacactgttttgaaatcattactgatactatggtatacttcgttggtgagaacaatggggacagctctcataatcctgttcttgctgccactggagttggacttgatgtagcacagagctgggaaaaagcaattcgccaagccctcatgcctgttactcctcaagcaagtgtttgcacttctccagggcaagggaaagatcacaaagatttgtctacaagtatctctgtatctaattgtcagattcaggagaatgtggatatcagtactgtttaccagatctttgcagatgaggtgcttggttcaggccagtttggcatcgtttatggaggaaaacatagaaagactgggagggatgtggctattaaagtaattgataagatgagattccccacaaaacaagaaagtcaactccgtaatgaagtggctattttacagaatttgcaccatcctgggattgtaaacctggaatgtatgtttgaaaccccagaacgagtctttgtagtaatggaaaagctgcatggagatatgttggaaatgattctatccagtgagaaaagtcggcttccagaacgaattactaaattcatggtcacacagatacttgttgctttgaggaatctgcattttaagaatattgtgcactgtgatttaaagccagaaaatgtgctgcttgcatcagcagagccatttcctcaggtgaagctgtgtgactttggatttgcacgcatcattggtgaaaagtcattcaggagatctgtggtaggaactccagcatacttagcccctgaagttctccggagcaaaggttacaaccgttccctagatatgtggtcagtgggagttatcatctatgtgagcctcagtggcacatttccttttaatgaggatgaagatataaatgaccaaatccaaaatgctgcatttatgtacccaccaaatccatggagagaaatttctggtgaagcaattgatctgataaacaatctgcttcaagtgaagatgagaaaacgttacagtgttgacaaatctcttagtcatccctggctacaggactatcagacttggcttgaccttagagaatttgaaactcgcattggagaacgttacattacacatgaaagtgatgatgctcgctgggaaatacatgcatacacacataaccttgtatacccaaagcacttcattatggctcctaatccagatgatatggaagaagatccttaatcactgagctaacctaaataaggaaggatttcattttatggactgatattttgctgtgtaacttgttctttgtagattgtcatctgcagtgctgcaaagatatgaagaaatatgataacgaataagtgacaccagtactgtagttcataatgagtaggtacaggcgggaaactgaataataagaagtcataatggaatcaaggtgaagctttttataaacttttttagcctaagcaataactggttttgtattttttcttaatccttcactttaatacaataggctcacttaatttgtcttcccatttctctttatatatatatatataaatataaatatatgtttgtttgtttttttaatgaaaaacaagtcaagctagcatccagttactatatagcttggctaaattatacaagacttacaagattgattactcgacaggcttgtatttaagaggtaactgtgaggttaccattatgtgatgttactataaggacttttaacattggtttaacaaaccatagaggcattgaagggtttttcttagatgcctagaaaaagcgcactgggctgttttacctttcttttttaggtcaatcaagactccaaaatagtgattcctaacctttttggagttgctctgctactctgaatatgttctatacagcataaggattgtcaccttctgtgtgttgcaacagcttctaagataattagggacaaatgatgttacaaaaggaagagtactgctggtctaagtgctgagttgtatgtctttgcatagctccactctgctgctaaatatgcatgttctgactgacaccatcttgatgccagtactggattccagcattcagcaggtgcagatctcggctttacacaatttatctttacctagggttcagtcagtaatttctgctttttagcagggccagtgcagggtcagttaatgctacagttactgtatagcaaacagtatccttttttctccttcccctagcctattgggctttgcagatatctggagtgttttaaagtcaattattttaagcagtttgaggggatgtgtaggagtggagcatgaaacagtttataaggctggggctgtattatcagcacagcaaattaaagaatgaaagaagtacttctttttacatttcagctccagcagccagctatttaaaaaatatttttaaatatcttccccaaagtttaagatgtgggaccatctacttgtaagaaacagtggcttatttcttcatttctcagtaatcattgtaaacctttttttttttcttctccactctaacaaaagtaaaagaacaaaacttttgctgaggtcttggactccactacttgttagttatgttggcctggacagatggcaggtctgtcggcagttcctcagtctgtaaaatgaagattatcattcttgcctctccctttgtcacagtgttgtcgtgaagatcagatatgtatgaatgcagtcaaataaactaaaaactaggaaagtgttaactatcgttgcccaccgaatttgaggtagcaaaaaaaaaaaagaatgttctggtacatgaacagactgagaaggcctttcgacatccctgaagctagtctcctgtctagactaaaaatatccttgaaagaatagtagcaaacagtatgcagtactcctgtgttctaagttcttttatgttttagtttaccctcacagcagccatagtgttaagtcattatgagcttcatcttaaagataagaaaactgaggcaaggggagattaacttactgccaaatttcaaacagttagtagtatttgagaccagtagtatggctctaatcttacccttagccctcccaaccattatgctgtactatctacccataaatacctccaggaaacattcccctcttggtaatttgtccttctatagaagcttcaaagattaaatcaaattaattttcaaaaaaaatttttttttagaaatgttattttccctgtgatagaggatgacttcccagtttcaccaaagtctgtttatatcaacacacacaaaatggaataattctgagtcactaggcaatcaatctactgtggttttactatgtaaggtgaaaattaactggaacgatgtttgtttgctatacttacatagtcaaactttacaagccatgaaattaattgcactctttgtatttgttgttaaatgcctaagaagttttctaaaaattttgtaaaggcactgtcagagaatctggagttgaatgattattccagatactgtataacctgcataactttttgtctttaagtcgtgtttgtaaaagaagtaattgctagaaacatttgataatgtacaaagtagtctataatgactgttcagtacatttttaatatttttttggttatatccaactttttgtaaatatactggaagcttgataataaaatgtatttcctatcaccatacttttccatgtgaaaacctgagcctatttctagtataagtatccaaagaaaagtttgacctggttgtgttattttaccagaccttggtaaaagaactattttggaaacagtatttgtaaatggaactaatgctatatttaaaaacactgatttttttttaacctgccaaaaataaaaaaaagctcattttataattttctactaaa

SEQ ID NO: 278797 - DNA, 2673 bp, Artificial Sequence
  derived and/or modified sequence
atgagcgccaacaacagcccccccagcgcccagaagagcgtgctgcccacagcaattcccgctgtccttcccgccgcaagcccttgctcctcccctaagacaggcctgtccgcccgcctgtctaatggatccttcagtgcccctagcttgaccaattctcggggatccgtgcatactgtctcattcttactgcagatcggtttgacacgagaaagcgtgaccatcgaggctcaagaattatccctgagcgccgtgaaggacctggtctgcagcatagtataccagaagttcccagaatgcggcttctttggcatgtacgacaagatcctcctgtttaggcatgacatgaattctgagaatattctccagctcattacctccgctgacgaaatccacgaaggcgatcttgtggaggtcgtcctttctgctctcgcaacagtcgaagactttcaaatccggccgcatacactgtacgtacattcgtataaagctcctacattctgcgactattgcggggaaatgttatggggccttgtgcgacaggggctaaagtgtgagggatgtggactgaattaccacaaaaggtgcgccttcaagatcccgaacaattgcagcggggtgagaaagagacggttgagcaacgtgagtcttccaggccccgggttatccgtgccccggccattgcagccggaatacgtcgccctgcctagtgaagagagccacgttcaccaggaaccctccaaaaggatcccctcttggagcgggaggccaatttggatggagaagatggtgatgtgtcgggtgaaagtcccacatactttcgctgtgcattcatatactagaccaactatttgccagtattgtaagcgacttttgaagggactctttcggcaaggtatgcaatgcaaagactgtaagtttaattgtcacaaacggtgcgcctccaaggtgccgagggattgtctgggcgaagtgacctttaatggagagccctccagcttggggactgacactgatattccaatggatatcgacaataacgatatcaatagcgactcatcgcggggtttagatgataccgaggagccatcacctccggaagataagatgttttttctggacccatccgatctagatgttgaaagggatgaggaagccgttaagaccattagcccctctacatcgaacaatattcccctgatgcgcgtagtccaaagcatcaagcatacaaagaggaagtcttctactatggttaaagagggttggatggttcactacacgtcacgcgacaacttgcggaaacgtcattattggcgtctggatagcaaatgcctcacactgtttcagaatgaatccggctcaaaatattataaagaaattccgctttctgaaattctgaggattagtagccccagagatttcacaaacatttcgcaggggagtaatccccactgcttcgagatcatcaccgataccatggtttattttgttggcgagaataatggggacagcagccacaacccagtcttggctgccactggtgttggcctggacgtggcccaaagctgggaaaaagcaattagacaggctctcatgccagtcaccccacaggcctccgtctgcaccagtcccggtcagggaaaagaccacaaagatctgtcaaccagcatttccgtgagtaactgtcaaatccaggaaaatgtggatatcagcaccgtgtaccagatattcgctgacgaggtgctgggttccgggcagtttgggattgtgtacgggggaaagcataggaaaactggcagggacgtggcgattaaggtaattgataagatgcggttccccactaaacaggagtcacagctgagaaatgaggttgccatactgcagaacttacatcaccctgggatcgtcaaccttgaatgcatgttcgaaactccagaaagggtgtttgtggttatggagaaactgcacggggacatgctcgagatgatcctcagctcagaaaaaagtaggctgccagagcggattacgaaattcatggtcacacagattctggtcgcactgcgcaatctgcactttaaaaacatcgtccactgcgatttgaaaccagaaaatgttttgctcgcttctgccgagccgttcccccaagttaaactgtgtgattttggttttgcccgcataattggcgagaaatcctttagaagaagtgttgtcgggacacccgcctacctggcgccagaggttctacgctccaaaggatacaatcgtagtctcgatatgtggagtgtcggtgtaatcatctatgtcagtttgtccgggactttcccattcaacgaggatgaagatataaacgaccagatccaaaacgctgccttcatgtatccccccaacccctggcgcgagatctcaggtgaggcaatcgatctcataaacaacctgctccaggtcaagatgcggaaaagatacagtgtggacaaatctctctcgcacccctggctgcaggattatcagacgtggctggatcttcgggaatttgagaccagaattggcgaacggtatatcacgcacgagtcagatgacgctagatgggagattcacgcctacacccacaatcttgtttatcccaagcactttatcatggcacccaatccagatgacatggaagaagacccctag

SEQ ID NO: 278798 - DNA, 5900 bp, Artificial Sequence
  derived and/or modified sequence
aaagttcatccccccagaatgaaaatgaggacatttgagaaggtgatttaaggtgtggacatttgagaaggtgtcctatcaaattagtaaaccaaaggaaaagtactgaatagattaatccaaaacacttactgttttttaaacgaagaggatttcaccttgacagaaaaacaacttttattcaatatgtatttcctgaaattaaagagacaagtacagactgaaaggaaaatagattcgtaaataagctacgtcaactctatcctgctgaggatagctcagtgatgttaaatcctttacaaatccctggttgtcttcctacagacaagactgctttttgatgggactgatattaagagaaataggacctttggggcattcaactccttgataaaacttaaaagtatcggcatgagtggcttaacagaggaaataaagaagttttcaactaaatccaaaagtgcggtcattttctttactgctgttattttaaaaacctcttcataaccattgaaaaagaatcgacaactattttaaaagattaaagaaaggcagatgtctgcaaataattcccctccatcagcccagaagtctgtattacccacagctattcctgctgtgcttccagctgcttctccgtgttcaagtcctaagacgggactctctgcccgactctctaatggaagcttcagtgcaccatcactcaccaactccagaggctcagtgcatacagtttcatttctactgcaaattggcctcacacgggagagtgttaccattgaagcccaggaactgtctttatctgctgtcaaggatcttgtgtgctccatagtttatcaaaagtttccagagtgtggattctttggcatgtatgacaaaattcttctctttcgccatgacatgaactcagaaaacattttgcagctgattacctcagcagatgaaatacatgaaggagacctagtggaagtggttctttcagctttagccacagtagaagacttccagattcgtccacatactctctatgtacattcttacaaagctcctactttctgtgattactgtggtgagatgctctggggattggtacgtcaaggactgaaatgtgaaggctgtggattaaattaccataaacgatgtgccttcaagattccaaataactgtagtggagtaagaaagagacgtctgtcaaatgtatctttaccaggacccggcctctcagttccaagacccctacagcctgaatatgtagcccttcccagtgaagagtcacatgtccaccaggaaccaagtaagagaattccttcttggagtggtcgcccaatctggatggaaaagatggtaatgtgcagagtgaaagttccacacacatttgctgttcactcttacacccgtcccacgatatgtcagtactgcaagcggttactgaaaggcctctttcgccaaggaatgcagtgtaaagattgcaaattcaactgccataaacgctgtgcatcaaaagtaccaagagactgccttggagaggttactttcaatggagaaccttccagtctgggaacagatacagatataccaatggatattgacaataatgacataaatagtgatagtagtcggggtttggatgacacagaagagccatcacccccagaagataagatgttcttcttggatccatctgatctcgatgtggaaagagatgaagaagccgttaaaacaatcagtccatcaacaagcaataatattccgctaatgagggttgtacaatccatcaagcacacaaagaggaagagcagcacaatggtgaaggaagggtggatggtccattacaccagcagggataacctgagaaagaggcattattggagacttgacagcaaatgtctaacattatttcagaatgaatctggatcaaagtattataaggaaattccactttcagaaattctccgcatatcttcaccacgagatttcacaaacatttcacaaggcagcaatccacactgttttgaaatcattactgatactatggtatacttcgttggtgagaacaatggggacagctctcataatcctgttcttgctgccactggagttggacttgatgtagcacagagctgggaaaaagcaattcgccaagccctcatgcctgttactcctcaagcaagtgtttgcacttctccagggcaagggaaagatcacaaagatttgtctacaagtatctctgtatctaattgtcagattcaggagaatgtggatatcagtactgtttaccagatctttgcagatgaggtgcttggttcaggccagtttggcatcgtttatggaggaaaacatagaaagactgggagggatgtggctattaaagtaattgataagatgagattccccacaaaacaagaaagtcaactccgtaatgaagtggctattttacagaatttgcaccatcctgggattgtaaacctggaatgtatgtttgaaaccccagaacgagtctttgtagtaatggaaaagctgcatggagatatgttggaaatgattctatccagtgagaaaagtcggcttccagaacgaattactaaattcatggtcacacagatacttgttgctttgaggaatctgcattttaagaatattgtgcactgtgatttaaagccagaaaatgtgctgcttgcatcagcagagccatttcctcaggtgaagctgtgtgactttggatttgcacgcatcattggtgaaaagtcattcaggagatctgtggtaggaactccagcatacttagcccctgaagttctccggagcaaaggttacaaccgttccctagatatgtggtcagtgggagttatcatctatgtgagcctcagtggcacatttccttttaatgaggatgaagatataaatgaccaaatccaaaatgctgcatttatgtacccaccaaatccatggagagaaatttctggtgaagcaattgatctgataaacaatctgcttcaagtgaagatgagaaaacgttacagtgttgacaaatctcttagtcatccctggctacaggactatcagacttggcttgaccttagagaatttgaaactcgcattggagaacgttacattacacatgaaagtgatgatgctcgctgggaaatacatgcatacacacataaccttgtatacccaaagcacttcattatggctcctaatccagatgatatggaagaagatccttaatcactgagctaacctaaataaggaaggatttcattttatggactgatattttgctgtgtaacttgttctttgtagattgtcatctgcagtgctgcaaagatatgaagaaatatgataacgaataagtgacaccagtactgtagttcataatgagtaggtacaggcgggaaactgaataataagaagtcataatggaatcaaggtgaagctttttataaacttttttagcctaagcaataactggttttgtattttttcttaatccttcactttaatacaataggctcacttaatttgtcttcccatttctctttatatatatatatataaatataaatatatgtttgtttgtttttttaatgaaaaacaagtcaagctagcatccagttactatatagcttggctaaattatacaagacttacaagattgattactcgacaggcttgtatttaagaggtaactgtgaggttaccattatgtgatgttactataaggacttttaacattggtttaacaaaccatagaggcattgaagggtttttcttagatgcctagaaaaagcgcactgggctgttttacctttcttttttaggtcaatcaagactccaaaatagtgattcctaacctttttggagttgctctgctactctgaatatgttctatacagcataaggattgtcaccttctgtgtgttgcaacagcttctaagataattagggacaaatgatgttacaaaaggaagagtactgctggtctaagtgctgagttgtatgtctttgcatagctccactctgctgctaaatatgcatgttctgactgacaccatcttgatgccagtactggattccagcattcagcaggtgcagatctcggctttacacaatttatctttacctagggttcagtcagtaatttctgctttttagcagggccagtgcagggtcagttaatgctacagttactgtatagcaaacagtatccttttttctccttcccctagcctattgggctttgcagatatctggagtgttttaaagtcaattattttaagcagtttgaggggatgtgtaggagtggagcatgaaacagtttataaggctggggctgtattatcagcacagcaaattaaagaatgaaagaagtacttctttttacatttcagctccagcagccagctatttaaaaaatatttttaaatatcttccccaaagtttaagatgtgggaccatctacttgtaagaaacagtggcttatttcttcatttctcagtaatcattgtaaacctttttttttttcttctccactctaacaaaagtaaaagaacaaaacttttgctgaggtcttggactccactacttgttagttatgttggcctggacagatggcaggtctgtcggcagttcctcagtctgtaaaatgaagattatcattcttgcctctccctttgtcacagtgttgtcgtgaagatcagatatgtatgaatgcagtcaaataaactaaaaactaggaaagtgttaactatcgttgcccaccgaatttgaggtagcaaaaaaaaaaaagaatgttctggtacatgaacagactgagaaggcctttcgacatccctgaagctagtctcctgtctagactaaaaatatccttgaaagaatagtagcaaacagtatgcagtactcctgtgttctaagttcttttatgttttagtttaccctcacagcagccatagtgttaagtcattatgagcttcatcttaaagataagaaaactgaggcaaggggagattaacttactgccaaatttcaaacagttagtagtatttgagaccagtagtatggctctaatcttacccttagccctcccaaccattatgctgtactatctacccataaatacctccaggaaacattcccctcttggtaatttgtccttctatagaagcttcaaagattaaatcaaattaattttcaaaaaaaatttttttttagaaatgttattttccctgtgatagaggatgacttcccagtttcaccaaagtctgtttatatcaacacacacaaaatggaataattctgagtcactaggcaatcaatctactgtggttttactatgtaaggtgaaaattaactggaacgatgtttgtttgctatacttacatagtcaaactttacaagccatgaaattaattgcactctttgtatttgttgttaaatgcctaagaagttttctaaaaattttgtaaaggcactgtcagagaatctggagttgaatgattattccagatactgtataacctgcataactttttgtctttaagtcgtgtttgtaaaagaagtaattgctagaaacatttgataatgtacaaagtagtctataatgactgttcagtacatttttaatatttttttggttatatccaactttttgtaaatatactggaagcttgataataaaatgtatttcctatcaccatacttttccatgtgaaaacctgagcctatttctagtataagtatccaaagaaaagtttgacctggttgtgttattttaccagaccttggtaaaagaactattttggaaacagtatttgtaaatggaactaatgctatatttaaaaacactgatttttttttaacctgccaaaaataaaaaaaagctcattttataattttctact

SEQ ID NO: 278799 - DNA, 2673 bp, Artificial Sequence
  derived and/or modified sequence
atgagtgccaacaactccccccctagcgcccagaagagcgtcttgccaaccgccattcccgctgtgcttcccgcagcgtctccatgcagctccccaaagaccggcctgtctgccaggctgtcaaacggatcattttccgcccctagcctgactaattcaaggggatccgtgcacactgtttcttttctcctccaaatcggtctgaccagagagagtgttacaatcgaagctcaagaactctcactgtcggccgtcaaagacctggtgtgcagcattgtgtaccagaagttccctgaatgtgggttttttggaatgtacgataaaatcctgctctttagacatgatatgaatagcgagaatattctccagcttattacctcggctgatgagattcacgaaggggacctggttgaagtagtgctgtccgctctcgcgacggtcgaagacttccagattcggcctcacacgctttatgtccacagctacaaagcgcctacattttgcgattactgtggagaaatgttatggggacttgtgcggcagggcctgaagtgtgaaggctgtggcctgaattaccataagaggtgcgcctttaagattcctaacaactgttctggagtcaggaaacggcgtctgagcaacgtgtcactgccgggacccggtctttccgtaccaaggccattacagcctgaatacgtcgcattgccctctgaggaaagccacgtgcatcaggaaccatctaagaggatcccgagctggagcggtaggccaatctggatggagaaaatggtgatgtgtagagttaaggtgccccatacattcgccgtgcactcctacacgcgtcccaccatttgtcagtattgcaagcgactcctaaaaggactcttccggcagggaatgcagtgcaaagactgtaaatttaattgccataagcggtgcgcctctaaggtgcctcgggactgcctgggagaagtaacttttaacggggagcccagctcccttgggaccgataccgacattcctatggatatagacaataacgatataaacagtgattcttcaaggggcctggacgacactgaggagccgagcccccctgaggataagatgtttttccttgatccctcagacctggatgtcgagagggacgaggaggcagtgaaaactatcagtccttctacctctaacaatatacctcttatgagagtggtccagagtattaaacacacaaaaagaaagagctctaccatggtgaaggaaggctggatggttcattacaccagtagggataacctccgtaagaggcactactggcggctagattcgaaatgcctgaccctattccagaacgaaagtggatctaagtactacaaggagatccctctgtctgagatactaaggatcagctcgcctcgcgactttacaaacattagccagggatctaatccccactgtttcgaaattataaccgacacaatggtgtatttcgtaggagagaacaacggcgattcttcacataaccctgtcctcgcagccaccggagtcggcctggatgtagcccagtcttgggagaaggcaatccgccaggcgctgatgcccgtgaccccccaggcttctgtgtgtacatcccctggccaaggcaaagaccataaggatctctctactagcattagcgtatcaaattgtcagatccaggagaatgtggacatatccacagtgtatcagatattcgcagacgaggttctggggtccggccagtttgggatcgtatacggaggtaagcaccgcaaaactggcagggatgtggctatcaaggtcatcgataagatgcgcttccccaccaaacaagagtcccagctgcgcaatgaggttgcaatcctccaaaatcttcaccaccctgggatcgtgaacttggagtgcatgtttgagaccccagaaagggttttcgtagtgatggagaagctgcacggtgacatgctcgaaatgattttgagcagcgaaaagtccagattgcccgaaagaatcacaaagtttatggtcacccagatcctcgtagcgctgagaaacctccattttaaaaatatcgtgcattgcgatctgaagccggaaaacgtgctgctcgcgagtgcagagccatttccacaagtgaagctgtgcgattttggctttgcgagaattattggcgaaaagagcttcaggaggtctgtggtaggcactcctgcttacctggcccctgaagtcctcaggagcaaagggtacaatcggagccttgacatgtggagcgtgggggtaataatctatgtcagtctgtctggcacgtttcccttcaatgaggacgaggacataaacgaccagatccagaatgctgccttcatgtaccccccaaatccatggcgggagatttccggcgaggccatcgatctgatcaataacctgctacaggttaaaatgcgaaaacgctactctgtggacaaaagcctgtcacatccttggttgcaggactaccagacctggctagacctgcgtgaatttgaaactaggataggtgagcgatacatcacgcacgaatccgacgacgctagatgggagattcacgcgtacacacacaatttggtgtatccaaaacacttcataatggcaccaaaccccgatgacatggaggaggacccatag

SEQ ID NO: 278800 - DNA, 2673 bp, Artificial Sequence
  derived and/or modified sequence
atgtccgctaacaattcaccgccaagtgcccagaagagtgtcctgccgacagctattccagccgtgcttccagccgcaagcccctgctcttctcccaagacagggctctccgcgcgcctctccaacgggtcattctccgcgcctagcttgacaaacagtcgcggctcagtgcatacagtgagtttcttactgcagatcggcctgacaagggagtccgtgaccatcgaggcacaggaactgagtctttccgcagtaaaggacctagtttgttctatcgtttatcaaaagtttccagagtgcggcttctttgggatgtatgacaagatactgttattcagacatgacatgaattccgagaacatacttcagctgattacatcagccgacgagattcacgaaggagatctggtggaagtcgtgctatctgctctcgctaccgtagaggatttccagatccggccacatactctgtacgttcatagttacaaagcacccaccttttgcgactactgcggcgagatgctttggggattagtgcggcagggcttgaagtgtgaggggtgcggcctgaattatcacaaacggtgcgccttcaaaataccaaataattgctcaggggtacgaaaaagacgtctgtcaaatgtttctttgccaggaccgggactttctgtgcctaggcccctccagccagagtatgtcgccctgccctcagaggagtcccatgtgcaccaggagccttctaaacgaattccctcctggagcggtcgccctatatggatggagaaaatggttatgtgcagggtcaaagtcccccataccttcgccgtgcatagctacacaaggcccactatctgtcagtactgtaagcggctcctgaagggactgttcagacaaggtatgcagtgtaaagactgtaaattcaactgccacaaaagatgcgctagcaaagtcccccgggactgtctcggcgaggtaacgttcaacggtgaaccttcatctctgggcactgacactgacataccgatggatatcgacaataacgatattaattcagatagctcccggggcttagacgataccgaagaaccatctcctcccgaggataagatgttctttctggatccttccgacctggacgtcgagagagacgaggaggcggtgaaaaccatctctccctccacttcgaacaacatccccctcatgagagtggtacagtctatcaaacataccaaaaggaagtcctcaaccatggttaaggaggggtggatggtgcattacacgtcgagagataacctgcggaaacggcactattggcggttagacagcaagtgcctgactttgttccagaatgaaagtggatccaaatactataaggaaattccgctatcagagatcctgagaatctcgtctcctagagactttaccaatatcagtcaggggagtaatccccactgcttcgagatcattactgataccatggtgtacttcgtaggagaaaataacggcgattcgtcccataacccggtgctggccgccaccggagtgggattggacgttgcgcaatcttgggagaaggccattcggcaggcactcatgccagttactcctcaggcctccgtgtgtacgtcccccggtcagggcaaggaccataaggacttatccacctccatctctgttagtaactgccaaatccaggaaaacgtggacatttctactgtgtatcagatcttcgccgacgaggttctgggatccggccagtttggcattgtgtacggcggaaaacatcgcaaaacaggcagggatgttgcgatcaaggtgatagataagatgcgtttccccaccaaacaggaaagccagttacgtaacgaggtcgcaattctccagaacctgcaccaccctggaattgtgaatctggagtgcatgtttgagacccccgagcgagtcttcgtggtgatggaaaagctccatggtgatatgctcgagatgatcttgtcatctgagaaatcacgtctccctgaacggatcactaaattcatggtcactcagattttggtagcccttcggaatctgcactttaaaaacatcgtgcactgcgaccttaagcctgagaacgtgctgctagcaagcgcagagccatttccacaggttaagctgtgtgacttcggattcgctaggattattggggagaagtcttttcgacgctcagtggttggcacaccggcttacctggcccccgaggtgctgcgctcgaaggggtacaatcggagcttggatatgtggtcggtgggtgtcatcatttacgtctcattgtctggaacctttcccttcaatgaagatgaggatatcaatgaccagatccagaatgccgcatttatgtatcccccaaatccgtggcgggagattagtggagaggcaatcgatctgattaacaatctcctccaggtcaagatgcggaagaggtacagcgttgataagagtctttctcacccttggttgcaggattatcaaacgtggctcgatctcagggagtttgagacgcgaatcggggagcgctacattacacacgagagtgatgatgcccgatgggaaattcatgcatatacacacaatcttgtttacccgaaacactttattatggccccaaaccccgacgacatggaggaagatccctag

SEQ ID NO: 278801 - DNA, 2673 bp, Artificial Sequence
  derived and/or modified sequence
atgagcgccaacaacagcccccccagcgcccagaagagcgtgctgcctacagctattcctgctgttttacctgcagccagcccttgcagctcccccaaaaccggactgtccgctcggctcagcaacggttcatttagtgcgccttcactcaccaattctcgcggaagcgtgcatactgtttcatttctgttacagattggcctcactcgcgagtccgttactatcgaggcacaggaactgtcactgagcgcggttaaagacttggtttgctctatcgtttaccagaagtttccggaatgcgggtttttcggcatgtacgacaaaatcctgctctttcggcatgatatgaattccgaaaatatcctgcagctgattacctccgcagatgagattcacgagggagatttagtggaagtagtcttgagcgcactggccacagtggaggacttccaaatccggccacacacattgtatgttcattcctataaagcacctacattttgcgactactgcggtgaaatgctgtggggattggtgagacaggggttgaaatgtgaggggtgcggccttaactatcacaaaagatgcgccttcaaaatcccgaacaactgctctggggtccgcaagcggcgtctctcaaacgtcagtctgcccggtcctggactgtcagtccctagacccctacagcccgagtacgttgcactgccttcagaagaaagtcacgtgcatcaggagccatcaaagagaattcctagttggtcgggtcggccaatctggatggaaaagatggtgatgtgcagggtaaaagtcccccacacttttgctgtccacagctacactcgccccacaatctgtcagtactgcaaacggctgttgaaagggcttttcaggcagggaatgcaatgtaaggattgcaaatttaattgtcacaaaagatgcgccagtaaggtgcctagagattgccttggggaggttactttcaatggcgagcctagctcccttgggacagatactgatatccccatggatatcgataacaatgacatcaatagtgattccagccgaggtctcgatgacactgaggaacccagccctcccgaggacaaaatgttctttttggatcccagtgatcttgacgtcgagcgggacgaggaggccgttaagacaattagtccaagtacatccaataatatcccacttatgagagttgtacaatctataaagcacactaaaagaaaatcgtcaacaatggtgaaggaggggtggatggtccactacacatctagagacaatctgcgtaaacgccactactggcgcttggattctaagtgtttaaccctgtttcagaatgagtccgggtctaaatattacaaggaaattccgctgagcgagatcctcagaatttctagtccacgggactttactaacatctctcaaggctcaaatccacactgtttcgaaatcatcaccgatactatggtctactttgtgggggagaacaatggagactcctcacacaacccagtgctcgccgcaacaggcgtcgggttggacgtcgctcagagctgggaaaaggcaatacgacaggccttgatgcccgtaactcctcaagcaagtgtgtgtacctctcccggccaaggtaaggatcacaaggatctgagcacctccatttctgtaagcaactgccagattcaggagaacgttgatatctccaccgtttaccagatttttgctgacgaagtcctggggtcaggccagttcgggatagtctacggcggtaaacaccgcaaaacaggccgggatgtggctataaaggtgattgacaagatgaggtttcccacaaaacaggagtcgcagcttagaaatgaagtcgccatactccagaacctacaccatcctggtattgtcaacttagagtgtatgtttgaaactcctgaacgagtgttcgtggtgatggaaaaactgcatggcgacatgttagaaatgatcctgtcttctgagaaatctagactccctgaaaggatcaccaaattcatggttacacagatcctggtggcactgcgtaatttgcacttcaaaaatatagttcattgcgacctgaagcctgaaaacgtgcttctagcttctgctgaacccttcccccaggtaaagctgtgtgactttggcttcgccaggattattggtgaaaagtcctttaggcggtccgtggtaggcaccccagcttacctggcccctgaggtgttacgttcaaagggctacaaccggagcctggacatgtggagtgtgggagtcattatttacgtttctctgagcgggacatttccttttaatgaggatgaagacattaatgaccaaattcagaatgcagcatttatgtatccccctaatccgtggcgggagatatcgggcgaagcaatcgatctgatcaacaatctgctacaggttaagatgcgtaagcgctatagtgtggataagagtctctcacacccgtggctgcaggactaccaaacatggctcgacctccgtgagttcgagaccagaatcggggaacgttacatcacccatgagagcgatgatgcaaggtgggagatacacgcttatacacataatttggtctatcccaaacacttcatcatggctcctaaccccgatgatatggaggaggacccctag

SEQ ID NO: 278802 - DNA, 2673 bp, Artificial Sequence
  derived and/or modified sequence
atgtccgcaaataactcacccccttcagcccagaagagtgtgctcccaacagccatacccgcagtgctcccagcggcttccccctgctccagtccaaaaacaggactgagcgcccgactttctaacggatccttctctgcacccagtctgactaattcaagagggagtgtccacactgtatctttcctgcttcagatcgggctcacacgagagagtgtcaccatcgaggcccaagagctgtctctttcggctgtgaaggacctcgtctgcagcattgtgtatcagaaatttcccgagtgcggtttcttcggaatgtacgacaagattttgctatttcgccatgacatgaacagtgaaaacatcctgcaactgataacctctgctgatgaaatccacgaaggagacctcgttgaggtggtgctttcagccctggctaccgtagaagactttcaaatccggccacataccctgtacgtccacagctataaagcacccacattttgcgattattgcggggagatgttgtggggtctagtacgacagggactgaaatgcgaagggtgcggccttaattaccataaacggtgtgcattcaaaattccaaataactgcagcggcgtacgcaaacgtcgcctttccaacgtgtccctgcccggacccggtctttcagtccccaggccattgcagcctgaatacgtggccttaccaagcgaagagtctcacgtacaccaggaacccagcaaaaggatcccttcgtggagcgggcgacccatttggatggaaaaaatggtgatgtgccgcgttaaggtccctcataccttcgccgtgcacagctacacacggcctacgatctgccagtactgtaagagactcctcaagggactcttccggcaggggatgcaatgcaaagactgtaagtttaattgtcataagcgttgcgcttctaaggttccccgtgactgcctcggagaagtcactttcaacggcgagccctctagcctggggactgacacagatatcccgatggacatagataacaacgatataaacagtgacagctcacgtggccttgacgataccgaggaacccagcccccctgaagataagatgttctttctggacccctccgatctggacgttgagcgcgacgaggaggctgtaaaaacgatcagtccttccacctctaacaatattcctttgatgagagtggtgcagtctataaagcacacaaaacgaaagtcttccacaatggtgaaagagggctggatggtgcattacacatcgcgggataatctcaggaaacggcactattggcggttggacagcaagtgtttgaccctcttccaaaatgagagcggcagcaaatattacaaggagatccccttgagcgagatactgcggatctcctcccctagagatttcacgaacatttctcaagggtcaaacccccattgtttcgagatcataactgacactatggtgtatttcgtcggggagaataatggcgactcgtcgcataatcccgtccttgcagccaccggggtcggcctggacgtggctcaatcttgggagaaggctatccgtcaggccctcatgccagtaacgcctcaggccagcgtctgcacaagtccgggtcagggaaaagatcacaaggacctcagcacgtctatatcagttagcaactgccaaatccaggaaaatgtcgatatttccactgtatatcagatcttcgccgatgaggtactcggaagcggccaatttggcatcgtctatggcggtaagcaccggaagactggtagagacgtggctatcaaagttatcgacaaaatgagattccccacaaaacaggagtcacagctcagaaacgaagtggctattttacagaatttgcatcaccccggaatcgtgaatcttgaatgtatgtttgagacgcccgagcgcgtctttgtggttatggagaaactacatggagatatgttggaaatgatcttaagctctgaaaagagcagactgcctgagcgtatcaccaaatttatggtgactcaaattttggtggctctcagaaacttgcacttcaaaaatatagttcattgtgatttgaagcctgaaaatgtgcttctggccagcgccgagccgtttccccaggtgaaactctgcgattttggctttgctagaataatcggagaaaaatcattcaggagatctgtcgttggtactcccgcttacctggcacccgaggttctgcgttctaaggggtataatagatctctcgacatgtggagtgtcggcgtgataatctacgtatctctcagtgggacattcccgttcaacgaggatgaggatatcaatgaccagattcagaatgccgctttcatgtacccgcctaacccatggagggaaatctcaggagaagctattgacctcatcaacaatctgcttcaggtgaagatgaggaagaggtactccgtggacaagtcgctatcccatccctggctccaggactatcaaacctggctggatctgcgcgaattcgaaacgagaataggtgagaggtatatcacgcatgagtctgacgatgctaggtgggagatccacgcttacactcataacctggtttatcccaaacacttcattatggcccctaaccctgacgatatggaggaggatccttag

SEQ ID NO: 278803 - protein, 511 aa, Artificial Sequence
  derived and/or modified sequence
MAWSQNNAKFAVCTVDRVVLLYDEHGERRDKFSTKPADMKYGRKSYMVKGMAFSPDSTKIAIGQTDNIIYVYKIGEDWGDKKVICNKFIQTSAVTCLQWPAEYIIVFGLAEGKVRLANTKTNKSSTIYGTESYVVSLTTNCSGKGILSGHADGTIVRYFFDDEGSGESQGKLVNHPCPPYALAWATNSIVAAGCDRKIVAYGKEGHMLQTFDYSRDPQEREFTTAVSSPGGQSVVLGSYDRLRVFNWIPRRSIWEEAKPKEITNLYTITALAWKRDGSRLCVGTLCGGVEQFDCCLRRSIYKNKFELTYVGPSQVIVKNLSSGTRVVLKSHYGYEVEEVKILGKERYLVAHTSETLLLGDLNTNRLSEIAWQGSGGNEKYFFENENVCMIFNAGELTLVEYGNNDTLGSVRTEFMNPHLISVRINERCQRGTEDNKKLAYLIDIKTIAIVDLIGGYNIGTVSHESRVDWLELNETGHKLLFRDRKLRVRRATKALGIGWPTEGVRQAATRD

SEQ ID NO: 278804 - protein, 535 aa, Artificial Sequence
  derived and/or modified sequence
MSEGESQTVLSSGSDPKVESSSSAPGLTSVSPPVTSTTSAASPEEEEESEDESEILEESPCGRWQKRREEVNQRNVPGIDSAYLAMDTEEGVEVVWNEVQFSERKNYKLQEEKVRAVFDNLIQLEHLNIVKFHKYWADIKENKARVIFITEYMSSGSLKQFLKKTKKNHKTMNEKAWKRWCTQILSALSYLHSCDPPIIHGNLTCDTIFIQHNGLIKIGSVAPDTINNHVKTCREEQKNLHFFAPEYGEVTNVTTAVDIYSFGMCALEMAVLEIQGNGESSYVPQEAISSAIQLLEDPLQREFIQKCLQSEPARRPTARELLFHPALFEVPSLKLLAAHCIVGHQHMIPENALEEITKNMDTSAVLAEIPAGPGREPVQTLYSQSPALELDKFLEDVRNGIYPLTAFGLPRPQQPQQEEVTSPVVPPSVKTPTPEPAEVETRKVVLMQCNIESVEEGVKHHLTLLLKLEDKLNRHLSCDLMPNENIPELAAELVQLGFISEADQSRLTSLLEETLNKFNFARNSTLNSAAVTVSS

SEQ ID NO: 278805 - protein, 82 aa, Artificial Sequence
  derived and/or modified sequence
MSEGESQTVLSSGSDPKVESSSSAPGLTSVSPPVTSTTSAASPEEEEESEDESEILEESPCGRWQKRREEVNQRNVPGIDSA

SEQ ID NO: 278806 - protein, 155 aa, Artificial Sequence
  derived and/or modified sequence
MSEGESQTVLSSGSDPKVESSSSAPGLTSVSPPVTSTTSAASPEEEEESEDESEILEESPCGRWQKRREEVNQRNVPGIDSAYLAMDTEEGVEVVWNEVQFSERKNYKLQEEKVRAVFDNLIQLEHLNIVKFHKYWADIKENKARVIFITEYMSS

SEQ ID NO: 278807 - protein, 515 aa, Artificial Sequence [sequence omitted]

SEQ ID NO: 278808 - DNA, 1608 bp, Artificial Sequence
  derived and/or modified sequence
atgagcgagggcgagagccagaccgtgctgagcagcggcagcgaccccaaggtggagagcagcagcagcgcccccggcctgaccagcgtgagcccccccgtgaccagcaccaccagcgccgccagccccgaggaggaggaggagagcgaggacgagagcgagatcctggaggagagcccctgcggcagatggcagaagagaagagaggaggtgaaccagagaaacgtgcccggcatcgacagcgcctacctggccatggacaccgaggagggcgtggaggtggtgtggaacgaggtgcagttcagcgagagaaagaactacaagctgcaggaggagaaggtgagagccgtgttcgacaacctgatccagctggagcacctgaacatcgtgaagttccacaagtactgggccgacatcaaggagaacaaggccagagtgatcttcatcaccgagtacatgagcagcggcagcctgaagcagttcctgaagaagaccaagaagaaccacaagaccatgaacgagaaggcctggaagagatggtgcacccagatcctgagcgccctgagctacctgcacagctgcgacccccccatcatccacggcaacctgacctgcgacaccatcttcatccagcacaacggcctgatcaagatcggcagcgtggcccccgacaccatcaacaaccacgtgaagacctgcagagaggagcagaagaacctgcacttcttcgcccccgagtacggcgaggtgaccaacgtgaccaccgccgtggacatctacagcttcggcatgtgcgccctggagatggccgtgctggagatccagggcaacggcgagagcagctacgtgccccaggaggccatcagcagcgccatccagctgctggaggaccccctgcagagagagttcatccagaagtgcctgcagagcgagcccgccagaagacccaccgccagagagctgctgttccaccccgccctgttcgaggtgcccagcctgaagctgctggccgcccactgcatcgtgggccaccagcacatgatccccgagaacgccctggaggagatcaccaagaacatggacaccagcgccgtgctggccgagatccccgccggccccggcagagagcccgtgcagaccctgtacagccagagccccgccctggagctggacaagttcctggaggacgtgagaaacggcatctaccccctgaccgccttcggcctgcccagaccccagcagccccagcaggaggaggtgaccagccccgtggtgccccccagcgtgaagacccccacccccgagcccgccgaggtggagaccagaaaggtggtgctgatgcagtgcaacatcgagagcgtggaggagggcgtgaagcaccacctgaccctgctgctgaagctggaggacaagctgaacagacacctgagctgcgacctgatgcccaacgagaacatccccgagctggccgccgagctggtgcagctgggcttcatcagcgaggccgaccagagcagactgaccagcctgctggaggagaccctgaacaagttcaacttcgccagaaacagcaccctgaacagcgccgccgtgaccgtgagcagctag

SEQ ID NO: 278809 - DNA, 1548 bp, Artificial Sequence
  derived and/or modified sequence
atgagcgagggcgagagccagaccagcgtgagcccccccgtgaccagcaccaccagcgccgccagccccgaggaggaggaggagagcgaggacgagagcgagatcctggaggagagcccctgcggcagatggcagaagagaagagaggaggtgaaccagagaaacgtgcccggcatcgacagcgcctacctggccatggacaccgaggagggcgtggaggtggtgtggaacgaggtgcagttcagcgagagaaagaactacaagctgcaggaggagaaggtgagagccgtgttcgacaacctgatccagctggagcacctgaacatcgtgaagttccacaagtactgggccgacatcaaggagaacaaggccagagtgatcttcatcaccgagtacatgagcagcggcagcctgaagcagttcctgaagaagaccaagaagaaccacaagaccatgaacgagaaggcctggaagagatggtgcacccagatcctgagcgccctgagctacctgcacagctgcgacccccccatcatccacggcaacctgacctgcgacaccatcttcatccagcacaacggcctgatcaagatcggcagcgtggcccccgacaccatcaacaaccacgtgaagacctgcagagaggagcagaagaacctgcacttcttcgcccccgagtacggcgaggtgaccaacgtgaccaccgccgtggacatctacagcttcggcatgtgcgccctggagatggccgtgctggagatccagggcaacggcgagagcagctacgtgccccaggaggccatcagcagcgccatccagctgctggaggaccccctgcagagagagttcatccagaagtgcctgcagagcgagcccgccagaagacccaccgccagagagctgctgttccaccccgccctgttcgaggtgcccagcctgaagctgctggccgcccactgcatcgtgggccaccagcacatgatccccgagaacgccctggaggagatcaccaagaacatggacaccagcgccgtgctggccgagatccccgccggccccggcagagagcccgtgcagaccctgtacagccagagccccgccctggagctggacaagttcctggaggacgtgagaaacggcatctaccccctgaccgccttcggcctgcccagaccccagcagccccagcaggaggaggtgaccagccccgtggtgccccccagcgtgaagacccccacccccgagcccgccgaggtggagaccagaaaggtggtgctgatgcagtgcaacatcgagagcgtggaggagggcgtgaagcaccacctgaccctgctgctgaagctggaggacaagctgaacagacacctgagctgcgacctgatgcccaacgagaacatccccgagctggccgccgagctggtgcagctgggcttcatcagcgaggccgaccagagcagactgaccagcctgctggaggagaccctgaacaagttcaacttcgccagaaacagcaccctgaacagcgccgccgtgaccgtgagcagctag

SEQ ID NO: 278810 - DNA, 1608 bp, Artificial Sequence
  derived and/or modified sequence
atgtcagaaggagagtcccagacggtgctatcttccggctctgaccccaaggtggagtccagctcatccgcccctggacttactagcgttagcccaccggtgacctccactacttcggccgccagtccagaggaagaagaggaatccgaggacgagtccgaaattctagaggaatccccatgtgggagatggcagaagcgcagagaagaagtgaaccaacggaacgtgccaggtatcgactcggcttacctagctatggatactgaggaaggcgtggaggttgtgtggaacgaagtccagtttagcgagaggaagaattataagttgcaagaggagaaggtgagagctgtcttcgacaacttaatacagctggagcaccttaatatcgtcaagtttcataagtattgggctgacataaaagagaacaaggccagagtgatattcatcacagaatacatgtcttcaggttccctgaaacagtttcttaagaagaccaagaagaaccataagaccatgaatgagaaagcatggaagcgatggtgcacacaaatcctctcggccctctcatacctccattcctgcgatccaccgatcattcacggtaatctaacttgtgacaccatttttatccagcacaatggcctgatcaaaattggatcagtggctcccgacaccatcaacaatcatgtgaaaacatgtagagaagaacagaagaatctgcacttctttgccccggagtacggagaggtcacaaatgtgaccaccgcagtcgatatttatagtttcggcatgtgtgccttggaaatggccgtcctggaaattcagggaaatggggagagcagctatgtgccacaagaagcgattagctccgcgatacagctgctggaggaccccttgcaaagggagttcatccagaagtgccttcagtctgagcctgcaagacgcccaaccgcccgtgaactactcttccacccagccctttttgaggtccctagcctaaaactgctggccgctcactgcattgttggtcaccaacatatgatccctgaaaacgcactggaagaaatcaccaaaaacatggacacatcggcagttctggcagaaatcccagcggggcctgggagggagcctgtgcagacactgtattcccagtcccctgcgctcgaacttgacaaattcctcgaggacgtcagaaacgggatctacccactgacagcctttggactcccccgccctcagcagccacaacaggaagaggtgacatccccagtggtcccacccagcgtgaagacacccacccccgaacccgccgaggttgaaacccgcaaagtcgtactgatgcagtgcaacatagagagtgttgaagagggcgtgaaacaccatctgacactgctgctaaagctcgaggacaaactgaatcgccatctgtcttgcgatctcatgccaaatgaaaacattccagaactcgccgcggagctggtccagctgggctttatctcggaggctgaccaatcacggcttacctctctgcttgaagaaactctcaacaaattcaactttgcccggaattcaaccctgaattctgctgcagtgactgtgtcctcttag

SEQ ID NO: 278811 - DNA, 1548 bp, Artificial Sequence
  derived and/or modified sequence
atgtcagaaggcgagtcgcagacatcagtgagccctcccgtcacttccaccaccagcgccgccagccctgaagaagaggaagaatctgaagatgagtcggagattctggaagaatccccttgcggcaggtggcagaagcgacgagaagaggtaaaccagagaaacgtcccagggattgactccgcctacctggcaatggataccgaagagggggttgaagttgtctggaatgaggtccaattctcagagagaaaaaactacaagctccaggaagagaaggtgcgagctgtgtttgataatctgattcagcttgagcacctgaatattgtcaagtttcataagtactgggccgatatcaaggagaacaaggcgcgggtcatcttcatcacagaatatatgtcaagcggctctctgaaacaattcctgaagaaaacgaaaaagaaccacaaaaccatgaacgaaaaggcgtggaaaaggtggtgcacacaaatcctgagcgctttgagctacctgcactcttgtgatccccctatcatccacggaaatcttacctgtgatactattttcattcagcataacgggctaataaagattgggtctgttgccccagatacaatcaacaatcatgtgaaaacttgcagagaggaacaaaagaacctgcactttttcgcgccagaatacggtgaggttaccaacgtgacgactgccgtggacatctactcatttggaatgtgcgccctggaaatggccgtattagagatacagggcaacggagaaagctcgtacgttcctcaggaggctatatcgtctgccatccaactgttggaggacccactgcagcgggaattcattcagaagtgtctgcagagcgaacctgcacggcggcctacagcgagagagttactgtttcacccagccttgttcgaggttccatccttgaaattgctggctgcacactgtatcgtaggccatcagcacatgatccccgaaaacgctttggaggaaattactaagaatatggacactagcgctgtcctagccgagatccccgctggccccggccgtgaaccagttcaaaccctgtactcccaatcaccagccctggaactcgacaagttcctggaagacgtccgaaatggtatctatccgctgaccgcgtttggtctacccagaccacagcagccccagcaggaggaggttacaagccctgttgtgcctccaagtgttaagaccccaaccccagaaccggctgaggtggagacacgcaaggttgtcctgatgcagtgtaacattgaaagcgtggaagaaggagtgaagcaccacttgaccctgttgttgaagctcgaggacaagttgaatcgacaccttagttgcgacttgatgcctaatgagaatatccctgagctggcagccgagctcgttcaattaggtttcatctccgaagccgaccagagtagactgacaagcttgctggaggaaaccctgaataaatttaactttgcccgcaatagtactttgaatagtgccgccgtgactgtatcaagctag

SEQ ID NO: 278812 - DNA, 1608 bp, Artificial Sequence
  derived and/or modified sequence
atgtctgagggggagagccagacagtgctgagcagcggcagtgaccccaaggtggagagcagcagcagcgcccctggcctgacctctgtgagcccccctgtgaccagcaccaccagcgctgccagccctgaggaggaggaggagagtgaagatgaaagtgagatcctggaggagagcccctgtggccgctggcagaagagaagagaggaggtgaaccagagaaatgtgcccggcattgattctgcctacctggccatggacacagaggagggcgtggaggtggtgtggaatgaggtgcagttcagcgagaggaagaactacaagctgcaggaggagaaggtgcgggctgtgtttgacaacctgatccagctggagcacctgaacatcgtgaagttccacaagtactgggccgacatcaaggagaacaaggcccgggtcatcttcatcacagagtacatgagcagcggcagcctgaagcagttcctgaagaagaccaagaagaaccacaagaccatgaatgagaaggcctggaagcgctggtgcacccagatcctgagcgccctgagctacctgcacagctgtgacccccccatcatccacggcaacctgacctgtgacaccatcttcatccagcacaacggcctcatcaagattggctctgtggccccagacaccatcaacaaccacgtgaagacctgccgggaggagcagaagaacctgcacttctttgccccagaatatggagaggtgaccaacgtgaccacagctgtggacatctacagctttggcatgtgtgccctggagatggctgtgctggagatccagggcaatggagagagcagctatgtgccccaggaggccatcagcagcgccatccagctgctggaggaccccctgcagcgggagttcatccagaagtgcctgcagagcgagcccgcccggcggcccacagcccgggagctgctcttccacccagccctgtttgaggtgcccagcctgaagctgctggccgcccactgcatcgtgggccaccagcacatgatcccagaaaatgccctggaggagatcaccaagaacatggacaccagcgctgtgctggccgagatcccagctggccctggccgggagcctgtgcagaccctgtacagccagagccctgccctggagctggacaagttcctggaggatgtgagaaatggcatctaccccctgacagccttcggcctgccccggccccagcagccccagcaggaggaggtgaccagccctgtggtgccccccagcgtgaagacccccaccccagagcctgctgaggtggagaccaggaaggtggtgctgatgcagtgcaacattgaatctgtggaggagggcgtgaagcaccacctgaccctgctgctgaagctggaggacaagctgaacagacacctgagctgtgacctgatgcccaatgaaaacatccctgagctggccgctgagctggtgcagctgggcttcatcagcgaggccgaccagagccggctgaccagcctgctggaggagaccctgaacaagttcaactttgccaggaacagcaccctgaacagcgctgctgtgacagtgagcagctag

SEQ ID NO: 278813 - DNA, 2163 bp, Artificial Sequence
  derived and/or modified sequence
gcggagcgcagctgtgagggagtcgctgtgatccggggccccggaacccgagctggagctgaagcgcaggctgcggggcgcggagtcgggaggcctgagtgttccttccagcatgtcggagggggagtcccagacagtacttagcagtggctcagacccaaaggtagaatcctcatcttcagctcctggcctgacatcagtgtcacctcctgtgacctccacaacctcagctgcttccccagaggaagaagaagaaagtgaagatgagtctgagattttggaagagtcgccctgtgggcgctggcagaagaggcgagaagaggtgaatcaacggaatgtaccaggtattgacagtgcatacctggccatggatacagaggaaggtgtagaggttgtgtggaatgaggtacagttctctgaacgcaagaactacaagctgcaggaggaaaaggttcgtgctgtgtttgataatctgattcaattggagcatcttaacattgttaagtttcacaaatattgggctgacattaaagagaacaaggccagggtcatttttatcacagaatacatgtcatctgggagtctgaagcaatttctgaagaagaccaaaaagaaccacaagacgatgaatgaaaaggcatggaagcgttggtgcacacaaatcctctctgccctaagctacctgcactcctgtgacccccccatcatccatgggaacctgacctgtgacaccatcttcatccagcacaacggactcatcaagattggctctgtggctcctgacactatcaacaatcatgtgaagacttgtcgagaagagcagaagaatctacacttctttgcaccagagtatggagaagtcactaatgtgacaacagcagtggacatctactcctttggcatgtgtgcactggagatggcagtgctggagattcagggcaatggagagtcctcatatgtgccacaggaagccatcagcagtgccatccagcttctagaagacccattacagagggagttcattcaaaagtgcctgcagtctgagcctgctcgcagaccaacagccagagaacttctgttccacccagcattgtttgaagtgccctcgctcaaactccttgcggcccactgcattgtgggacaccaacacatgatcccagagaacgctctagaggagatcaccaaaaacatggatactagtgccgtactggctgaaatccctgcaggaccaggaagagaaccagttcagactttgtactctcagtcaccagctctggaattagataaattccttgaagatgtcaggaatgggatctatcctctgacagcctttgggctgcctcggccccagcagccacagcaggaggaggtgacatcacctgtcgtgcccccctctgtcaagactccgacacctgaaccagctgaggtggagactcgcaaggtggtgctgatgcagtgcaacattgagtcggtggaggagggagtcaaacaccacctgacacttctgctgaagttggaggacaaactgaaccggcacctgagctgtgacctgatgccaaatgagaatatccccgagttggcggctgagctggtgcagctgggcttcattagtgaggctgaccagagccggttgacttctctgctagaagagaccttgaacaagttcaattttgccaggaacagtaccctcaactcagccgctgtcaccgtctcctcttagagctcactcgggccaggccctgatctgcgctgtggctgtccctggacgtgctgcagccctcctgtcccttccccccagtcagtattaccctgtgaagccccttccctcctttattattcaggagggctgggggggctccctggttctgagcatcatcctttcccctcccctctcttcctcccctctgcactttgtttacttgttttgcacagacgtgggcctgggccttctcagcagccgccttctagttgggggctagtcgctgatctgccggctcccgcccagcctgtgtggaaaggaggcccacgggcactaggggagccgaattctacaatcccgctggggcggccggggcgggagagaaaggtggtgctgcagtggtggccctggggggccattcgattcgcctcagttgctgctgtaataaaagtctactttttgct

SEQ ID NO: 278814 - DNA, 1548 bp, Artificial Sequence
  derived and/or modified sequence
atgtctgagggggagagccagacctctgtgagcccccctgtgaccagcaccaccagcgctgccagccctgaggaggaggaggagagtgaagatgaaagtgagatcctggaggagagcccctgtggccgctggcagaagagaagagaggaggtgaaccagagaaatgtgcccggcattgattctgcctacctggccatggacacagaggagggcgtggaggtggtgtggaatgaggtgcagttcagcgagaggaagaactacaagctgcaggaggagaaggtgcgggctgtgtttgacaacctgatccagctggagcacctgaacatcgtgaagttccacaagtactgggccgacatcaaggagaacaaggcccgggtcatcttcatcacagagtacatgagcagcggcagcctgaagcagttcctgaagaagaccaagaagaaccacaagaccatgaatgagaaggcctggaagcgctggtgcacccagatcctgagcgccctgagctacctgcacagctgtgacccccccatcatccacggcaacctgacctgtgacaccatcttcatccagcacaacggcctcatcaagattggctctgtggccccagacaccatcaacaaccacgtgaagacctgccgggaggagcagaagaacctgcacttctttgccccagaatatggagaggtgaccaacgtgaccacagctgtggacatctacagctttggcatgtgtgccctggagatggctgtgctggagatccagggcaatggagagagcagctatgtgccccaggaggccatcagcagcgccatccagctgctggaggaccccctgcagcgggagttcatccagaagtgcctgcagagcgagcccgcccggcggcccacagcccgggagctgctcttccacccagccctgtttgaggtgcccagcctgaagctgctggccgcccactgcatcgtgggccaccagcacatgatcccagaaaatgccctggaggagatcaccaagaacatggacaccagcgctgtgctggccgagatcccagctggccctggccgggagcctgtgcagaccctgtacagccagagccctgccctggagctggacaagttcctggaggatgtgagaaatggcatctaccccctgacagccttcggcctgccccggccccagcagccccagcaggaggaggtgaccagccctgtggtgccccccagcgtgaagacccccaccccagagcctgctgaggtggagaccaggaaggtggtgctgatgcagtgcaacattgaatctgtggaggagggcgtgaagcaccacctgaccctgctgctgaagctggaggacaagctgaacagacacctgagctgtgacctgatgcccaatgaaaacatccctgagctggccgctgagctggtgcagctgggcttcatcagcgaggccgaccagagccggctgaccagcctgctggaggagaccctgaacaagttcaactttgccaggaacagcaccctgaacagcgctgctgtgacagtgagcagctag

SEQ ID NO: 278815 - DNA, 2887 bp, Artificial Sequence
  derived and/or modified sequence
atcatacacgtctaagggcagagtgaacttccatcctgaaggctccgcgcttagttttcgcagattaatagctcaccaagaatttatcatcttttctttccactaactcgaaaccaatctaaattctttccaaacatcttctcaacgtagtctcctttgatgaaatttactgtttcggattctagacttggctcttaccaacttaactttcggttaatagcttaatacctctgattcaggtttttgcatttgtcaactaccattgaatgataatttcaatgagttcgttcttatgaggatcaaatgaaataacatctgtgaaaacctcttacaaagtttaagcaaatagtgctaagcaatcaccaagcgttaactactaattttcagtgttaggcattagaactgtcatggcgccttcaagaagaggtaggaggccctctctgcgtccagcagaaccatctggggcacctggaccgggcggtggggtggacagagagacgagccccagctgggaccgaaaacatcgacccctccgagaggtctcggccggaccggcgcaaggggaggagagcgggtggaagcccaccccagcgaacgcccgagggccgggccccgcccacccagaacgtcacccaatggaaacctgccggcggtgcggcaccgcccatcgttggtccgggcgccgcgagggcggggcccgcagttcggttgcgctgcggagcgcagctgtgagggagtcgctgtgatccggggccccggaacccgagctggagctgaagcgcaggctgcggggcgcggagtcgggagtgcaggcctgagtgttccttccagcatgtcggagggggagtcccagacagtacttagcagtggctcagacccaaaggtagaatcctcatcttcagctcctggcctgacatcagtgtcacctcctgtgacctccacaacctcagctgcttccccagaggaagaagaagaaagtgaagatgagtctgagattttggaagagtcgccctgtgggcgctggcagaagaggcgagaagaggtgaatcaacggaatgtaccaggtattgacagtgcatacctggccatggatacagaggaaggtgtagaggttgtgtggaatgaggtacagttctctgaacgcaagaactacaagctgcaggaggaaaaggttcgtgctgtgtttgataatctgattcaattggagcatcttaacattgttaagtttcacaaatattgggctgacattaaagagaacaaggccagggtcatttttatcacagaatacatgtcatctgggagtctgaagcaatttctgaagaagaccaaaaagaaccacaagacgatgaatgaaaaggcatggaagcgttggtgcacacaaatcctctctgccctaagctacctgcactcctgtgacccccccatcatccatgggaacctgacctgtgacaccatcttcatccagcacaacggactcatcaagattggctctgtggctcctgacactatcaacaatcatgtgaagacttgtcgagaagagcagaagaatctacacttctttgcaccagagtatggagaagtcactaatgtgacaacagcagtggacatctactcctttggcatgtgtgcactggagatggcagtgctggagattcagggcaatggagagtcctcatatgtgccacaggaagccatcagcagtgccatccagcttctagaagacccattacagagggagttcattcaaaagtgcctgcagtctgagcctgctcgcagaccaacagccagagaacttctgttccacccagcattgtttgaagtgccctcgctcaaactccttgcggcccactgcattgtgggacaccaacacatgatcccagagaacgctctagaggagatcaccaaaaacatggatactagtgccgtactggctgaaatccctgcaggaccaggaagagaaccagttcagactttgtactctcagtcaccagctctggaattagataaattccttgaagatgtcaggaatgggatctatcctctgacagcctttgggctgcctcggccccagcagccacagcaggaggaggtgacatcacctgtcgtgcccccctctgtcaagactccgacacctgaaccagctgaggtggagactcgcaaggtggtgctgatgcagtgcaacattgagtcggtggaggagggagtcaaacaccacctgacacttctgctgaagttggaggacaaactgaaccggcacctgagctgtgacctgatgccaaatgagaatatccccgagttggcggctgagctggtgcagctgggcttcattagtgaggctgaccagagccggttgacttctctgctagaagagaccttgaacaagttcaattttgccaggaacagtaccctcaactcagccgctgtcaccgtctcctcttagagctcactcgggccaggccctgatctgcgctgtggctgtccctggacgtgctgcagccctcctgtcccttccccccagtcagtattaccctgtgaagccccttccctcctttattattcaggagggctgggggggctccctggttctgagcatcatcctttcccctcccctctcttcctcccctctgcactttgtttacttgttttgcacagacgtgggcctgggccttctcagcagccgccttctagttgggggctagtcgctgatctgccggctcccgcccagcctgtgtggaaaggaggcccacgggcactaggggagccgaattctacaatcccgctggggcggccggggcgggagagaaaggtggtgctgcagtggtggccctggggggccattcgattcgcctcagttgctgctgtaataaaagtctactttttgctaaaa

SEQ ID NO: 278816 - DNA, 1608 bp, Artificial Sequence
  derived and/or modified sequence
atgagcgagggcgagagccagaccgtgctgagcagcggcagcgacccaaaagtggagagctcctcatccgcccctggcttgaccagcgtgtccccccccgtcacatccactacctctgctgcctcacccgaggaggaggaggagtctgaagatgagtcggagattttagaagagtccccctgtggcagatggcaaaagcggagagaggaggtgaatcaacggaacgtcccaggcatagattctgcctacttggcgatggacaccgaagagggagtagaagtggtttggaatgaagtgcagttttccgagcggaagaactacaaacttcaagaggagaaggtgagagctgtgtttgataacctaattcaactggagcacctgaacattgttaaattccataagtattgggctgacattaaagaaaacaaggccagggttatcttcataacagagtacatgagcagcgggtctctgaagcagttcttgaagaaaaccaaaaaaaaccataaaactatgaatgaaaaagcttggaagcggtggtgtacgcagatcctgtcagccctgtcctaccttcactcatgtgatcccccaattatccatggtaatctgacctgtgatacaatattcattcaacataacgggctcattaagatcgggagcgttgcccccgacacaatcaataatcacgtaaagacctgccgtgaggagcagaagaacctccacttcttcgcacccgaatacggcgaggtgaccaacgtgacaacggcggtggacatctattcctttggcatgtgtgcactggaaatggctgtgctcgaaatccaggggaatggcgagtcttcttacgtgccacaggaggcaatttcctctgcgattcaacttctcgaggaccctctgcagagggaattcattcagaagtgtctgcagagcgaaccagctcggagaccaaccgctagggagctgctattccatcccgccctgtttgaggttccctctttgaagctccttgcagctcactgtattgttgggcatcagcacatgatacctgaaaacgcccttgaggaaatcaccaagaatatggatactagtgctgtcctcgctgaaatcccggctggtcctgggagggaacctgtacagacactgtactctcaatctcctgctctggagctagataaatttttagaggatgtccggaatggcatctacccgctgacagcatttggccttccccgcccccagcagccacagcaggaagaagtgaccagccccgtggtgcctccttccgttaagacaccaacccctgagcctgccgaggttgaaaccaggaaggtcgtgctgatgcagtgtaacatcgagagcgtagaagaaggcgtgaagcatcatttgacgctgctcctgaaacttgaggataagttaaacagacacctgtcatgcgaccttatgcctaatgagaacatccctgagctggccgctgaactggtccagctgggattcattagtgaagcggatcagtctcggttgacctccctccttgaggaaacactcaacaaatttaacttcgcacgcaacagtaccttgaactcagcagccgtcaccgtgagcagctag

SEQ ID NO: 278817 - DNA, 1548 bp, Artificial Sequence
  derived and/or modified sequence
atgagcgagggcgagagccagaccagcgtgagcccccccgtgacctcgaccacatccgccgcttccccggaggaggaagaagagtctgaggatgagtccgaaatactggaggaaagcccttgcggcaggtggcagaaacggcgggaggaagttaatcaaaggaatgttcctggaattgactcggcatatcttgcgatggatactgaggaaggcgttgaagtcgtgtggaacgaggtgcagttcagcgaacggaaaaattataaattacaggaggagaaagtgagggccgtctttgacaatctcatccagctggagcacctgaacattgtaaagttccataagtactgggccgatattaaggaaaataaggctcgagtcattttcatcacagagtacatgagttctggtagccttaagcagttccttaaaaagacaaagaagaaccataagaccatgaacgagaaggcatggaaaagatggtgcacgcagattctctccgctctgagttacctccattcatgtgacccacctattatccatgggaacttgacctgcgacacgatattcatacagcacaacggactgatcaaaatcggcagcgtcgctcctgatactatcaataaccatgtgaaaacctgccgggaggaacagaaaaacttacacttttttgcacctgaatacggggaggttacaaacgtgaccaccgccgtggacatctattctttcggcatgtgtgcgctggagatggctgtgcttgagattcagggcaacggggagagctcttacgtacctcaggaagctatctcaagcgctatccagcttctggaggatccacttcagcgggaatttatccagaagtgcttgcagtcagaacctgctcgaagaccgacggcacgtgaactgctgttccatccagccctatttgaagtgccctcactaaagttgctggcagcccattgcatcgttggccaccagcacatgataccggagaatgctctggaagagattacaaagaatatggacacctctgctgtcctggcagagatacctgccggcccaggccgggaaccggttcaaaccctgtactcccagagccccgcgctagagttggacaagtttcttgaggacgttaggaatggcatctatcctcttacagcgtttggcctacctcgccctcaacaaccacagcaggaagaggtcactagccccgttgtgcccccctccgtgaaaactcccacaccagagccagccgaagtcgagactagaaaggtcgtgctgatgcagtgtaatattgagagcgtggaggagggcgtcaaacatcaccttacgctcctattaaaactggaggataagctgaaccggcatctctcctgtgacttaatgcccaacgaaaacattcctgaactggctgcagaattggtgcagctgggattcatttccgaggccgaccagtcccgactgacatcactcctggaagagacgctgaataagtttaattttgcacgcaattcaaccctgaactcagctgcagtcactgtgagttcctag

SEQ ID NO: 278818 - DNA, 1874 bp, Artificial Sequence
  derived and/or modified sequence
atcgttggtccgggcgccgcgagggcggggcccgcagttcggttgcgctgcggagcgcagctgtgagggagtcgccagtgcaggcctgagtgttccttccagcatgtcggagggggagtcccagacatcagtgtcacctcctgtgacctccacaacctcagctgcttccccagaggaagaagaagaaagtgaagatgagtctgagattttggaagagtcgccctgtgggcgctggcagaagaggcgagaagaggtgaatcaacggaatgtaccaggtattgacagtgcatacctggccatggatacagaggaaggtgtagaggttgtgtggaatgaggtacagttctctgaacgcaagaactacaagctgcaggaggaaaaggttcgtgctgtgtttgataatctgattcaattggagcatcttaacattgttaagtttcacaaatattgggctgacattaaagagaacaaggccagggtcatttttatcacagaatacatgtcatctgggagtctgaagcaatttctgaagaagaccaaaaagaaccacaagacgatgaatgaaaaggcatggaagcgttggtgcacacaaatcctctctgccctaagctacctgcactcctgtgacccccccatcatccatgggaacctgacctgtgacaccatcttcatccagcacaacggactcatcaagattggctctgtggctcctgacactatcaacaatcatgtgaagacttgtcgagaagagcagaagaatctacacttctttgcaccagagtatggagaagtcactaatgtgacaacagcagtggacatctactcctttggcatgtgtgcactggagatggcagtgctggagattcagggcaatggagagtcctcatatgtgccacaggaagccatcagcagtgccatccagcttctagaagacccattacagagggagttcattcaaaagtgcctgcagtctgagcctgctcgcagaccaacagccagagaacttctgttccacccagcattgtttgaagtgccctcgctcaaactccttgcggcccactgcattgtgggacaccaacacatgatcccagagaacgctctagaggagatcaccaaaaacatggatactagtgccgtactggctgaaatccctgcaggaccaggaagagaaccagttcagactttgtactctcagtcaccagctctggaattagataaattccttgaagatgtcaggaatgggatctatcctctgacagcctttgggctgcctcggccccagcagccacagcaggaggaggtgacatcacctgtcgtgcccccctctgtcaagactccgacacctgaaccagctgaggtggagactcgcaaggtggtgctgatgcagtgcaacattgagtcggtggaggagggagtcaaacaccacctgacacttctgctgaagttggaggacaaactgaaccggcacctgagctgtgacctgatgccaaatgagaatatccccgagttggcggctgagctggtgcagctgggcttcattagtgaggctgaccagagccggttgacttctctgctagaagagaccttgaacaagttcaattttgccaggaacagtaccctcaactcagccgctgtcaccgtctcctcttagagctcactcgggccaggccctgatctgcgctgtggctgtccctggacgtgctgcagccctcctgtcccttccccccagtcagtattaccctgtgaagccccttccctcctttattattcaggagggctgggggggctccctggttctgagcatcatcctttcccctcccctctcttcctcccctctgcactttgtttacttgttttgcacagacgtgggcctg

SEQ ID NO: 278819 - DNA, 1608 bp, Artificial Sequence
  derived and/or modified sequence
atgagtgaaggggagtcccaaacagtgctgagtagcggtagcgatccaaaggtggagtccagcagctctgcccctggtttgacctccgtgtctcctccggtgacatctacaacctcagccgcatcacctgaagaagaagaagaaagcgaagacgagagtgaaatactggaagaatcaccctgcgggagatggcaaaagcgacgcgaggaggtgaatcagagaaatgtccccggaatcgactcggcatacttagcgatggacaccgaggaaggcgttgaggtggtatggaacgaggttcagttctctgaaaggaaaaattacaagctgcaggaagaaaaggtcagagccgtcttcgacaacctcattcagctcgaacaccttaatatagtgaagtttcacaagtactgggccgatattaaggaaaacaaggcaagggttatcttcataacagaatacatgagtagcgggagcctaaaacagttcctcaagaaaaccaagaagaatcacaagaccatgaacgagaaggcatggaaacggtggtgtacccagatactgtcagccctctcttacctgcacagttgcgaccctcccatcattcacggcaatctgacatgcgatactattttcatccagcacaacggcctgataaaaataggatctgtggctccggataccatcaacaatcacgtgaagacttgcagagaagagcagaaaaacctgcatttttttgcacccgagtatggcgaagtgactaacgtcaccaccgccgtcgatatttacagttttgggatgtgcgccctggagatggctgtgctggagatccagggcaacggggaatcttcctatgttccccaggaggcaatcagtagcgcaattcaactcttggaagatccgctccaacgagaatttatacagaaatgcctccagtccgaaccagctcgccgtcccaccgctagggaacttctgtttcatcctgctctgtttgaggttccaagtctgaagctattggccgcacactgcatagtggggcatcagcatatgatcccagaaaacgccctggaggagatcaccaagaatatggacaccagtgccgtactcgctgagattccagcaggcccagggagagaaccggtgcaaacgctatatagtcagtcccccgcactcgagctcgacaaattcctggaggacgtgcgaaacggcatctaccctctcactgccttcggacttccaagacctcagcagccgcagcaggaagaagtaacctcacctgtagttcctccctccgtgaagactcccaccccagagcctgccgaggtcgaaacgagaaaagtcgtactgatgcagtgcaatatcgagagtgtcgaagagggtgttaaacaccatttgactttactgctcaaactggaggacaaacttaacaggcacttatcctgcgacctgatgcctaatgaaaatatcccggaacttgccgcagagttggtacagctgggattcattagtgaggcagaccaatcgcgcctgacctcactgctggaggagacactcaataaatttaactttgcacgcaattctacacttaacagtgcagcagttacagtctcctcgtag

SEQ ID NO: 278820 - DNA, 1548 bp, Artificial Sequence
  derived and/or modified sequence
atgtccgaaggggagtcccaaacctccgtgtctcccccagttacttcaactacatcagccgcttcccccgaggaagaggaggagagcgaggacgagagtgaaatactcgaagagtctccttgcggtcggtggcaaaaacgacgagaggaagtgaaccagcggaacgtccccggtattgatagtgcatacctcgccatggataccgaggagggagtggaggtggtatggaatgaggtgcagttcagcgaaaggaagaactacaaactccaggaggagaaagtgcgagctgtcttcgataatctgatccaactcgagcacctgaacatcgtcaagtttcataagtattgggcggacatcaaggaaaacaaggctagggtgatatttataaccgagtatatgagcagcggttccctgaaacaattccttaaaaagactaagaaaaaccataaaacgatgaacgaaaaggcttggaagcgctggtgtacccagattttgtctgcactcagttacctgcatagctgtgacccaccaattattcatgggaatctcacatgtgacaccatattcatacaacacaatggactcataaagatcggaagtgttgctcccgacacaataaataaccatgtgaagacttgtagggaagaacaaaaaaacctccattttttcgctcctgagtacggtgaggtcactaatgtgacgaccgccgtagacatctactccttcggaatgtgtgccctggagatggccgtgctcgaaattcaagggaatggggaatccagctacgtgccacaagaggcgatcagttccgccatccagctgttggaggaccccttgcagagggagtttattcagaagtgcttgcaatctgagccggctagacgcccaactgctagggaactcttgtttcacccagccttgtttgaagtacccagtctgaagctgctggcggctcactgcatcgtgggccaccagcacatgatcccagaaaatgccctcgaagagattactaagaacatggacacctcagcggtgctggccgagatcccggcagggccagggagggaacctgtccagacactgtactcccagtctcctgccctggaactagataagtttctcgaggatgttagaaatggaatctatccactcaccgcgttcggcctcccacgaccccagcagcctcagcaggaagaggtaacctctcccgtggtccccccttccgtgaaaaccccaacaccagaaccagccgaagtggagactcgcaaggtagtgctcatgcagtgtaacattgagtccgtagaggaaggggtcaagcaccatttgacgctgctgttaaaactggaggacaagttgaacagacacctctcctgcgacctgatgccaaatgaaaacatccccgagctggcagcagaactggtacagctgggcttcatctccgaagcagaccagtcaagactgacatctctgctggaagagacactcaacaagtttaatttcgctcggaactccacactcaattcagccgctgtcacggtcagttcatag

SEQ ID NO: 278821 - DNA, 1608 bp, Artificial Sequence
  derived and/or modified sequence
atgagcgagggagagtctcaaaccgtcctgtcaagcggttcagatccaaaggtggaatcatcatcatctgcccccggattgacgagcgttagtccccctgtgacaagcacgacaagcgccgctagtccagaggaagaagaggagtccgaggatgagagcgagatcctggaagaaagcccttgcggtcgatggcagaagcgaagagaagaagtaaaccagagaaatgtaccaggaattgatagcgcatacctcgccatggatacggaagagggagtcgaggtcgtgtggaatgaagtacagttctctgagaggaagaattataaactgcaagaggaaaaggtccgcgccgtttttgataatctaattcagctggagcacttgaatatagtcaaatttcataaatattgggccgacattaaagagaacaaggcacgggtcatcttcatcacagagtacatgtctagcggctcactgaaacaattcctgaagaagaccaaaaaaaaccacaagactatgaacgaaaaagcctggaagcgttggtgcactcaaatcttgtccgctttgtcctacttgcactcttgtgaccctcccatcattcatggcaatctgacttgcgacaccatctttatacaacacaacggactgattaagattggaagcgtcgccccagatactattaataatcatgtgaaaacatgtcgggaagagcagaagaatctccacttttttgcacctgagtacggagaagttaccaatgtgactactgcggtcgatatctactcatttggtatgtgcgctcttgagatggcggttctagagatccagggcaatggagagtcttcatatgtgccgcaggaggcaatttcctctgcaatccagctgctggaggaccctttgcagcgggagttcatacagaagtgtttgcagtctgagccagctcggcgccccactgcccgcgaattactgttccatccggctctcttcgaggttccttcactcaagctgttggctgcacattgtattgtaggacaccagcacatgatccctgagaatgcactggaagaaatcaccaaaaatatggacacttccgccgtgttggcagagattcctgccggcccaggcagagagcctgtgcagacactctacagtcaatcccctgctctggagctggacaaatttctggaagacgttagaaacggcatttaccctttaaccgcctttggactacccagacctcagcagccgcagcaggaagaggtgacctcacccgtcgtccccccgtcagttaaaacacctactcctgagcctgctgaggtcgaaaccagaaaggtggtgctaatgcagtgcaatattgagagtgtggaggagggggttaagcaccacctgaccctgctacttaaactggaggataaactgaataggcacctgagttgcgatctgatgcccaacgaaaatattcccgagctggcggcggaactcgtccagctagggtttatttccgaggcagaccaaagtcgattaacatctctcttagaggagacattaaacaaattcaatttcgcccgcaacagcacactgaactccgccgcagtcacggtttcctcgtag

SEQ ID NO: 278822 - DNA, 1608 bp, Artificial Sequence
  derived and/or modified sequence
atgagcgagggcgagagccagaccgtgctgagcagcggcagcgaccctaaggtggaatcctctagcagtgccccagggctgacatccgttagccctcctgtgacgtccaccacaagtgcagcttccccggaagaagaggaggagtctgaagacgagagcgagattctcgaagaatcgccatgtgggagatggcagaagcggcgcgaagaagtgaaccagcggaatgttcctggcattgactctgcgtatttagctatggatactgaagagggggtcgaagtggtgtggaacgaagtccagttctcagaacgcaagaattacaaactccaagaagagaaggtgagagcagtgttcgacaacctgatccagctggaacatctcaacatcgtcaagttccacaagtactgggccgatattaaggagaacaaagcacgggtgatttttatcacagaatacatgagcagcggatccctcaagcagtttttaaaaaaaacaaaaaaaaatcacaagaccatgaacgaaaaggcctggaaacgctggtgcactcagatcctttccgcactatcttacttgcactcctgcgaccccccaatcatccatggtaacctcacctgtgacaccatttttatccagcacaatgggctgattaaaattggcagtgtcgcccctgacactattaacaaccacgtcaagacctgtcgcgaagagcagaaaaatctgcatttctttgcaccagaatatggcgaagtaactaatgtaactaccgcagtggatatttatagtttcggcatgtgcgctctcgaaatggcagtcctggaaatccaaggtaatggggagtcaagctatgttcctcaggaggccatttcatcggccattcagttgcttgaagacccattacagagggaattcatccaaaagtgtttgcaatcggagcctgcccggagaccaaccgctagggaacttctgtttcaccccgcacttttcgaagttccctcccttaagctgctcgccgctcattgtatcgtgggacatcaacacatgatccctgagaacgccttggaggagatcacaaaaaatatggatacttctgcggtgctggctgagatccctgctggtcccgggagagagcccgtgcaaacactttattcccaatctcccgcgcttgagttggacaagttcctcgaagatgtacggaatgggatctaccctttgactgcgtttggtctcccaagaccccagcagcctcaacaggaggaagtaacttccccggtggtccctccttctgtcaagacacccaccccagaacccgccgaggttgaaactagaaaggtcgtcctgatgcagtgcaacatcgagtccgtggaagagggcgtgaaacatcacctgacactcctcctgaagctggaggacaagttgaaccggcacttgtcgtgcgacctcatgcccaatgagaatatccctgaactcgctgctgaattggtccaattggggtttatcagcgaggccgaccagtctagacttacctcattgctggaagaaactttaaacaaattcaattttgcccgcaatagcaccttaaattccgctgccgttacagtcagtagctag

SEQ ID NO: 278823 - DNA, 1608 bp, Artificial Sequence
  derived and/or modified sequence
atgtctgagggagagtctcagaccgtattgagtagtggatccgaccccaaggttgaatcatctagctctgctcccggactcaccagtgtctcccctccagtgactagcactacgtccgccgctagccccgaggaggaggaggagtccgaggatgagtccgaaattctcgaggagagtccttgcgggcgttggcagaagcgacgggaggaggtcaatcagcgaaacgtccctggtattgactccgcatatctggctatggatactgaggagggtgtagaggtggtgtggaatgaagtgcaattctccgaaagaaaaaactataaactccaagaagagaaggtaagggcagtctttgataatctcatacaactggagcacttgaacattgtcaagttccacaagtattgggccgatatcaaggagaataaggcaagggtgatcttcatcaccgagtacatgtctagcgggtccctgaaacaatttctcaaaaagaccaagaaaaatcacaagacaatgaacgagaaagcttggaaacgctggtgtactcagattttgtctgccctgtcctacctgcacagttgcgaccctccaataatacacgggaatctcacctgcgacaccatattcatccagcataatgggctgattaagattggcagtgtagccccagacaccattaacaatcacgttaagacttgtagggaggagcaaaaaaatcttcacttttttgcaccagagtacggagaagttacaaatgtaaccactgcagtagatatttactccttcggcatgtgtgccctcgagatggccgtgttagagatccagggaaatggcgaaagctcttacgtcccacaggaagccatcagtagcgctattcagctcctcgaagatcccctccaacgcgaattcattcagaagtgtctgcagtcagaacccgctagaaggccaacggctcgagagctgctcttccaccctgcactttttgaagttccaagtctcaagctgctcgccgcacattgtattgtcggtcaccagcatatgattcccgagaacgccctggaagagatcaccaagaatatggacacctctgcggttctcgcagagattcccgcaggaccagggagggaaccagtacaaacattgtactcacaaagcccagccctcgaattggacaaatttctggaggatgtgagaaacgggatctaccccctgactgcctttggactcccaagacctcagcagccgcagcaggaagaggttactagtcccgtggtgccgccttccgtgaagacccccacgccagagcccgcagaagtggagacaagaaaggtggtattaatgcagtgtaacatagagagcgtggaggaaggcgtgaaacatcatctgacactgctcctcaaactggaggacaaattaaatcgacatctctcttgcgatcttatgcctaatgaaaacattcctgagttggctgcggagctcgtacagctcgggttcatatcggaggctgatcagtcgagactcacatccctgcttgaagagacacttaacaaatttaatttcgctcgtaactctaccctcaatagcgccgctgtgacagtgtctagttag

SEQ ID NO: 278824 - DNA, 816 bp, Artificial Sequence
  derived and/or modified sequence
atgttccaatccctgggcgagcgtataaacactctcgtgaggtatcttctgcacagagctaagaagggcctagggatgcgccgggcagatgtctccatggctaatatggtgttgatcgggttcttttcttgcatttcaactctgtgcatcggcgcggcagcattcagccattatgaacactggacctttttccaggcctattattattgctttatcaccctgactaccataggcttcggtgattacgtggcacttcagaaggatcaggccctgcaaacccagcctcaatatgtagcattcagttttgtttacatactgacaggactaacagtcatcggggccttcctcaacttagtcgttctgagattcatgactatgaatgccgaggatgaaaagcgtgatgccgagcacagagccctcttaaccaggaacggacaggccggcggtggcggcggtggtgggagtgcccacacaaccgatacggcttcatccaccgccgcggctgggggtggtggatttcgaaatgtttacgctgaggtcttgcatttccagtcaatgtgttcatgtctctggtataaaagtagggaaaaactccagtactctatccctatgataatcccaagggacctctccacttcggacacttgtgtggaacagagtcatagctcacccgggggggggggcagatacagtgacaccccctcgaggcgatgcttgtgctcgggcgcgcccagatccgcaatttcatcagtgtcaaccgggctccactctctgtcaaccttcagagggttgatgaagcgacgttcaagcgtctag

SEQ ID NO: 278825 - DNA, 816 bp, Artificial Sequence
  derived and/or modified sequence
atgttccagagcctgggggagcgcatcaacaccctggtgcgctacctgctgcaccgggccaagaagggcctgggcatgagaagagcagatgtgtccatggccaacatggtgctgattggcttcttcagctgcatcagcaccctgtgcatcggggctgctgccttcagccactatgagcactggaccttcttccaggcctactactactgcttcatcaccctgaccaccatcggctttggagactatgtggccctgcagaaggaccaggccctgcagacccagccccagtatgtggccttctcctttgtgtacatcctgaccggcctgaccgtcatcggggccttcctgaacctggtggtgctgcgcttcatgaccatgaatgcagaagatgagaagagagatgctgagcaccgggccctgctgaccagaaatggccaggccggcggcggcggcggcggcggcagcgcccacaccacagacacagccagcagcacagctgctgctgggggcggcggcttcagaaatgtgtatgcagaggtgctgcacttccagagcatgtgcagctgcctgtggtacaagagccgggagaagctgcagtacagcatccccatgatcatcccccgggacctgagcaccagtgacacctgtgtggagcagagccacagcagccctgggggcggcggccgctacagcgacacccccagccgccgctgcctgtgcagcggggcccccaggtctgccatcagctctgtgtccacaggcctgcacagcctgagcaccttccggggcctgatgaagagaagaagctctgtgtag

SEQ ID NO: 278826 - DNA, 816 bp, Artificial Sequence
  derived and/or modified sequence
atgttccagagcctgggcgagcggatcaacaccctggtgcggtacttgcttcaccgcgctaagaagggtttgggaatgcgtagagccgatgtgagcatggctaatatggtccttattggttttttttcatgtatctctactctctgtattggcgcagctgctttttcacattatgaacactggacatttttccaggcttactactattgttttatcactttaaccacaatcggttttggggactatgtggccctgcagaaagaccaagcgttacaaacccagccgcagtacgtagccttcagtttcgtgtacattcttactggcctgacagttattggcgccttccttaatcttgtggttttaagatttatgaccatgaatgctgaggacgaaaaacgggacgctgagcacagggccctactgacacggaatggccaagcgggagggggaggcggcggaggatccgcacatactaccgacacagcaagttctaccgctgctgcgggcggcggcgggtttcggaacgtctacgcggaggtcctgcacttccaaagcatgtgttcgtgcctgtggtacaagtctcgggagaagcttcagtattcaattcctatgataatcccgcgggacctgtccacttctgacacctgtgttgaacagtcacactccagtccaggcggcggcggacgatattcagatactccaagcaggcgctgcctctgttctggagctccgcgcagcgccatctcctccgtctcgaccggattacacagcttgtctacctttcgcgggctgatgaagagacgaagttcagtctag

SEQ ID NO: 278827 - DNA, 816 bp, Artificial Sequence
  derived and/or modified sequence
atgtttcagagcctgggcgagcgtatcaacactctggtgaggtacctgctccaccgggcaaaaaagggactgggtatgcgtcgcgcagatgtttctatggctaatatggtgctgattgggtttttctcatgtatttccacactgtgcataggtgcagctgccttttctcactacgaacactggaccttttttcaggcctactactattgtttcataacattaacaacaatagggttcggcgactatgttgcactgcagaaggatcaggcgctacagactcagccgcaatacgtggcgttctcttttgtgtacatcctgaccggtctgacagtcatcggcgcattcctcaacctcgtggttctgagattcatgacaatgaacgctgaggatgagaagagggacgccgagcacagggccctcttgaccagaaacgggcaggccggtggtgggggagggggaggcagtgctcatactacagacacagcctcttccaccgcggcagctgggggaggcggattccggaacgtttacgcagaagtgctccattttcagagcatgtgcagttgtctgtggtataaaagcagggaaaaactccaatacagtataccaatgataatcccacgcgatctttcaacgagtgacacatgcgtggagcagtctcatagctcccccggaggcggtggaaggtatagcgataccccatctcggaggtgcctttgttcgggggcacccagatctgcaatctcgtcggtaagtactggacttcactccctctcaaccttccggggtttgatgaagcgtcgttctagtgtgtag

SEQ ID NO: 278828 - DNA, 816 bp, Artificial Sequence
  derived and/or modified sequence
atgttccagagcctgggcgagagaatcaacaccctggtgagatacctgctgcacagagccaagaagggcctgggcatgagaagagccgacgtgagcatggccaacatggtgctgatcggcttcttcagctgcatcagcaccctgtgcatcggcgccgccgccttcagccactacgagcactggaccttcttccaggcctactactactgcttcatcaccctgaccaccatcggcttcggcgactacgtggccctgcagaaggaccaggccctgcagacccagccccagtacgtggccttcagcttcgtgtacatcctgaccggcctgaccgtgatcggcgccttcctgaacctggtggtgctgagattcatgaccatgaacgccgaggacgagaagagagacgccgagcacagagccctgctgaccagaaacggccaggccggcggcggcggcggcggcggcagcgcccacaccaccgacaccgccagcagcaccgccgccgccggcggcggcggcttcagaaacgtgtacgccgaggtgctgcacttccagagcatgtgcagctgcctgtggtacaagagcagagagaagctgcagtacagcatccccatgatcatccccagagacctgagcaccagcgacacctgcgtggagcagagccacagcagccccggcggcggcggcagatacagcgacacccccagcagaagatgcctgtgcagcggcgcccccagaagcgccatcagcagcgtgagcaccggcctgcacagcctgagcaccttcagaggcctgatgaagagaagaagcagcgtgtag

SEQ ID NO: 278829 - DNA, 1921 bp, Artificial Sequence
  derived and/or modified sequence
ggccgcactcagaggccgtccaagacactggcaagccgcagaagcccagttcgccggccatgaagcagcggttctcggcgctgcagctgctgaagctgctgctgctgctgcagccgccgctgccacgagcgctgcgcgaggcgctctgccctgagccctgcaactgcgtgcccgacggcgccctgcgctgccccggccccacggccggtctcactcgactatcacttgcctacctccctgtcaaagtgatcccatctcaagctttcagaggacttaatgaggtcataaaaattgaaatctctcagattgattccctggaaaggatagaagctaatgcctttgacaacctcctcaatttgtctgaaatactgatccagaacaccaaaaatctgagatacattgagcccggagcatttataaatcttccccgattaaaatacttgagcatctgtaacacaggcatcagaaagtttccagatgttacgaaggtcttctcctctgaatcaaatttcattctggaaatttgtgataacttacacataaccaccataccaggaaatgcttttcaagggatgaataatgaatctgtaacactcaaactatatggaaatggatttgaagaagtacaaagtcatgcattcaatgggacgacactgacttcactggagctaaaggaaaacgtacatctggagaagatgcacaatggagccttccgtggggccacagggccgaaaaccttggatatttcttccaccaaattgcaggccctgccgagctatggcctagagtccattcagaggctaattgccacgtcatcctattctctaaaaaaattgccatcaagagaaacatttgtcaatctcctggaggccacgttgacttaccccagccactgctgtgcttttagaaacttgccaacaaaagaacagaatttttcacattccatttctgaaaacttttccaaacaatgtgaaagcacagtaaggaaagtgaataacaaaacactacttttgcatggggctctatctgctgctcatagcctcagttgattcccaaaccaagggccagtactataaccatgccatagactggcagacagggagtgggtgcagcactgctggctttttcactgtattcgcaagtgaactttctgtctacaccctcaccgtcatcactctagaaagatggcacaccatcacctatgctattcacctggaccaaaagctgcgattaagacatgccattctgattatgcttggaggatggctcttttcttctctaattgctatgttgccccttgtcggtgtcagcaattacatgaaggtcagtatttgcttccccatggatgtggaaaccactctctcacaagtctatatattaaccatcctgattctcaatgtggtggccttcttcataatttgtgcttgctacattaaaatttattttgcagttcgaaacccagaattaatggctaccaataaagatacaaagattgctaagaaaatggcaatcctcatcttcaccgatttcacctgcatggcacctatctctttttttgccatctcagctgccttcaaagtacctcttatcacagtaaccaactctaaagttttactggttcttttttatcccatcaattcttgtgccaatccatttctgtatgcaatattcactaagacattccaaagagatttctttcttttgctgagcaaatttggctgctgtaaacgtcgggctgaactttatagaaggaaagatttttcagcttacacctccaactgcaaaaatggcttcactggatcaaataagccttctcaatccaccttgaagttgtccacattgcactgtcaaggtacagctctcctagacaagactcgctacacagagtgttaactgttacatcagtaactgcattattgaa

SEQ ID NO: 278830 - DNA, 1860 bp, Artificial Sequence
  derived and/or modified sequence
atgtgctcttgtcataaaggctatacaagaactcctgatcataaacactgtcgggacattgatgagtgccagcagggtaacctgtgcgtgaacggtcagtgtaagaacacagaaggaagctttcgctgtacctgtggacaggggtatcagctgtctgccgctaaagatcagtgcgaagatatagatgaatgccaacatcggcatctgtgtgcccatgggcaatgccgtaatacagaagggagctttcagtgtgtctgtgatcagggatatcgggcctcaggactcggcgaccactgcgaagacatcaacgagtgcctggaggataagtcggtctgtcaacgtggagattgtatcaacaccgccggctcctacgattgtacatgcccggacggatttcaattggacgacaacaagacgtgccaagacatcaatgagtgcgaacaccccgggctgtgcggaccacagggggaatgcctgaatacagaaggctccttccactgcgtatgtcagcagggcttctccatatccgccgatgggcggacttgtgaggatgtgaacgagtgcgagctgctgagtggcgtgtgcggagaagccttttgcgagaatgtggaggggtctttcctgtgtgtttgtgcggatgagaatcaggaatactcgccaatgaccggccagtgccgctcacggactagcactgatctcgatgtggacgtcgaccagccaaaggaggagaagaaggagtgttactataaccttaacgacgcctcactgtgcgataacgttttggcacccaacgttaccaagcaagaatgctgttgtacttcaggagtgggctggggtgataactgcgagatctttccttgccctgttctcggtactgctgaatttacagagatgtgtcctaaagggaagggcttcgttcccgctggcgaatcttctagtgaagcaggaggagagaactataaagatgctgacgaatgccttttgttcgggcaggagatatgtaagaacggattttgtctgaatacgcgacctggatacgagtgttattgtaagcagggaacttactacgaccccgtcaaactgcagtgtttcgatatggatgaatgccaggatccctcctcctgcattgacggacagtgcgtgaacactgagggctcttacaattgcttctgtacccacccaatggtgttggacgcttcagagaaacgctgcatccggccagccgaaagtaacgagcaaattgaggagaccgatgtctatcaagacctatgttgggagcacctgagcgatgagtacgtttgctcccgccccttagtcgggaagcagacaacgtatactgaatgctgttgtctgtatggagaagcttgggggatgcagtgtgccctgtgtcctcttaaagattccgacgattacgcgcagctgtgcaatatccctgtgacgggccgccgccagccatatggtagagacgctctggtcgactttagcgagcagtatacacctgaggccgacccctattttattcaggatcgcttcttgaattcctttgaggagctgcaggcagaagagtgcggaatccttaatggctgtgagaacggcaggtgcgtgagggttcaggaaggatatacgtgtgattgcttcgacgggtaccacctggatacagctaagatgacttgcgttgacgtgaacgagtgcgatgaactgaataataggatgagtctgtgtaaaaacgctaagtgtatcaacacagatgggagctacaaatgtttgtgcctcccggggtacgtcccctcggataagcccaactattgtacccctcttaacactgctctgaaccttgagaaggactccgaccttgagtag

SEQ ID NO: 278831 - DNA, 2211 bp, Artificial Sequence
  derived and/or modified sequence
attttgtgaaagcaacgcagagcacctaggcagtgccatttccttggctcttctcagtatgtgcagggaacacacccgtgtgcacactcacagatacgtgtttgccacattttagtacaactccgtttctgcattccactatgtggacgagtgcctggaaccaaacgtctgcgcaaatggtgattgttccaaccttgaaggctcctacatgtgttcatgccacaaaggctatacccggactccggaccacaagcactgtagagatattgatgaatgtcagcaagggaatctatgtgtaaacgggcagtgcaaaaataccgagggctccttcaggtgcacctgtggacaggggtaccagctgtcggcagctaaagaccagtgtgaagacattgatgaatgccagcaccgtcatctctgtgctcatgggcagtgcaggaacactgagggctcttttcaatgtgtgtgtgaccagggttacagagcatctgggcttggagaccactgtgaagatatcaatgaatgcttggaggacaagagtgtttgccagagaggagactgcattaatactgcagggtcctatgattgtacttgtccggatggatttcagctagatgacaataaaacatgtcaagatattaatgaatgtgaacatccagggctctgtggtccgcaaggggagtgcctaaacacagagggttctttccattgtgtctgccagcagggtttctcaatctctgcagatggccgtacgtgtgaagatgtgaatgaatgtgaactgctcagtggggtgtgtggtgaagccttctgtgaaaacgtggaagggtccttcctgtgcgtgtgtgctgatgaaaaccaagagtacagccccatgactgggcagtgccgctcccggacctccacagatttagatgtagatgtagatcaacccaaagaagaaaagaaagaatgctactataatctcaatgacgccagtctctgtgataatgtgttggcccccaatgtcacgaaacaagaatgctgctgtacatcaggcgtgggatggggagataactgcgaaatcttcccctgcccggtcttgggaactgctgagttcactgaaatgtgtcccaaagggaaaggttttgtgcctgctggagaatcatcttctgaagctggtggtgagaactataaagatgcagatgaatgcctactttttggacaagaaatctgcaaaaatggtttctgtttgaacactcggcctgggtatgaatgctactgtaagcaagggacgtactatgatcctgtgaaactgcagtgctttgatatggatgaatgtcaagaccccagtagttgtattgatggccagtgtgttaatacagagggctcttacaactgcttctgtactcaccccatggtcctggatgcgtcagaaaaaagatgtatacgaccggctgagtcaaacgaacaaatagaagaaactgatgtctaccaagatttgtgctgggaacatctgagtgatgaatacgtgtgtagccggcctcttgtgggcaagcagacaacgtacactgagtgctgctgtctgtatggagaggcctggggcatgcagtgtgccctctgccccctgaaggattcagatgactatgctcagctgtgtaacatccccgtgacgggacgccggcagccatatggacgggacgccttggttgacttcagtgaacagtatactccagaagccgatccctacttcatccaagaccgttttctaaatagctttgaggagttacaggctgaggaatgcggcatcctcaatggatgtgaaaatggtcgctgtgtgagggtccaggaaggttacacctgcgattgctttgatgggtatcacttggatacggccaagatgacctgtgtcgatgtaaatgaatgcgatgagttgaacaaccggatgtctctctgcaagaatgccaagtgcattaacaccgatggttcctacaagtgtttgtgtctgccaggctacgtgccttctgacaagccaaactactgcactccgttgaataccgccttgaatttagagaaagacagtgacctggagtgaaacagaatctacataacctaagcccatatactctgcactgtgtaaaggaaaagggagaaatgtattatacttgagacattgcacctaccccggaaggctggaaatacagaaacagcatggaattgcaagtcctctgaagacaa

SEQ ID NO: 278832 - DNA, 1860 bp, Artificial Sequence
  derived and/or modified sequence
atgtgcagctgccacaagggctacaccaggaccccagaccacaagcactgccgggacattgatgagtgccagcagggcaacctgtgtgtgaatggccagtgcaagaacacagagggcagcttccgctgcacctgtggccagggctaccagctgtctgctgccaaggaccagtgtgaagatattgatgagtgccagcaccgccacctgtgtgcccacggccagtgcaggaacacagagggcagcttccagtgtgtgtgtgaccagggctaccgggccagcggcctgggggaccactgtgaggacatcaatgaatgtctggaggacaagtctgtgtgccagagaggagactgcatcaacacagctggcagctatgactgcacctgcccagatggcttccagctggatgacaacaagacctgccaggacatcaatgaatgtgagcaccctggcctgtgtggcccccagggagaatgtctgaacacagagggcagcttccactgtgtgtgccagcagggcttcagcatctctgcagatggccgcacctgtgaagatgtgaatgaatgtgagctgctgagcggcgtgtgtggggaggccttctgtgaaaatgtggagggcagcttcctgtgtgtgtgtgctgatgagaaccaggagtacagccccatgacaggccagtgccgcagcaggaccagcacagacctggatgtggatgtggaccagcccaaggaggagaagaaggagtgctactacaacctgaatgatgccagcctgtgtgacaacgtgctggcccccaacgtgaccaagcaggagtgctgctgcaccagcggcgtgggctggggagacaactgtgagatcttcccctgccctgtgctgggcacagctgagttcacagagatgtgccccaagggcaaaggatttgtgcctgctggggagagcagcagcgaggccggcggggagaactacaaggatgctgatgaatgtctgctgtttggccaggagatctgcaagaatggcttctgcctgaacacccggcccggctatgagtgctactgcaagcagggcacctactatgaccctgtgaagctgcagtgctttgacatggatgagtgccaggaccccagcagctgcattgatggccagtgtgtgaacacagagggcagctacaactgcttctgcacccaccccatggtgctggatgccagcgagaagcgctgcatccggcctgctgagagcaatgagcagatcgaggagacagatgtgtaccaggacctgtgctgggagcacctgagtgatgaatatgtgtgcagccggcccctggtgggcaagcagaccacctacacagagtgctgctgcctgtatggagaggcctggggcatgcagtgtgccctgtgccccctgaaggacagtgatgattatgcccagctgtgcaacatccctgtgacaggccggcggcagccctacggcagagatgccctggtggacttcagcgagcagtacaccccagaggccgacccctacttcatccaggaccgcttcctgaacagctttgaggagctgcaggccgaggagtgtggcatcctgaatggctgtgaaaatggccgctgtgtgcgggtgcaggagggctacacctgtgactgctttgatggctaccacctggacacagccaagatgacctgtgtggatgtgaatgaatgtgatgagctgaacaacaggatgagcctgtgcaagaatgccaagtgcatcaacacagatggcagctacaagtgcctgtgcctgcccggctacgtgcccagcgacaagcccaactactgcacccccctgaacacagccctgaacctggagaaggacagcgacctggagtag

SEQ ID NO: 278833 - DNA, 1860 bp, Artificial Sequence
  derived and/or modified sequence
atgtgcagctgccacaagggctacacccggacccccgaccacaagcactgtagggacattgatgaatgccaacaagggaacctgtgcgtgaacggacaatgcaagaatacggagggttcttttcgctgcacctgcggtcagggttaccaactatccgctgcgaaggaccaatgcgaggatatcgatgaatgccagcaccgacatctgtgtgcgcatggacagtgccggaacacagaaggcagtttccagtgtgtttgtgaccaggggtacagagcttcagggctgggagaccactgtgaggacattaatgagtgtctggaagacaaatccgtatgccagcgaggagattgtatcaacaccgcgggatcctacgattgcacttgtcccgatggattccagcttgacgataacaaaacgtgtcaggacatcaacgagtgcgagcatcccggcctctgtggcccccagggggagtgtttgaatacggagggttctttccattgcgtttgtcagcagggattcagtatatcagcggacggcaggacttgtgaagatgtcaatgagtgcgagctcttgtcaggagtgtgcggggaggctttttgtgaaaacgttgagggctcattcctgtgtgtctgcgccgacgagaatcaagaatacagccctatgaccggtcagtgtcgatcacgcacttctacagacctagacgtggacgtggatcagccaaaagaagagaaaaaagaatgctactataatttgaatgatgcaagcttgtgtgacaacgtgttggcacctaacgtgaccaagcaggaatgttgttgcacatctggggttggctggggagataactgcgagattttcccctgccccgtgttaggtaccgctgagtttacggagatgtgccccaagggcaaaggatttgtccccgcaggagaaagctcatcagaggccgggggtgaaaactacaaggatgctgatgaatgcttactctttggacaggagatctgcaagaatgggttctgcctcaatactcgacctgggtatgagtgttattgcaaacagggaacctactacgatcctgttaagctccagtgctttgacatggatgaatgccaagaccctagctcctgtatcgatggacagtgcgtcaatactgagggcagctacaactgcttttgcacacaccccatggtcctggacgcatctgagaagagatgcatccggcccgccgaatcaaacgagcagatcgaggaaactgatgtgtaccaggatttatgttgggaacacctgtcagatgagtacgtgtgtagtcgtcctcttgtcgggaaacaaacgacctacacagagtgttgttgtctgtatggggaggcttggggcatgcaatgcgcactctgccccctgaaagactctgatgattacgctcagctctgcaatataccagttactggaagacgacagccttatggacgtgatgccttagtcgacttcagcgagcagtacacccctgaggcagacccttatttcatacaggataggttcctgaatagcttcgaagagttgcaagccgaagaatgtggaatccttaatggatgcgagaatggcagatgcgtccgtgtccaggagggctacacctgtgattgcttcgatgggtaccatctcgacacggcgaagatgacatgcgtggacgtgaacgaatgtgatgagctcaacaatcgaatgtccctatgtaaaaatgccaaatgtatcaacacagatggaagctacaaatgcttatgcctgcctggctacgtgccctcggataaaccgaactactgcaccccactaaatactgccctcaatctggagaaggatagtgacctcgagtag

SEQ ID NO: 278834 - DNA, 1860 bp, Artificial Sequence
  derived and/or modified sequence
atgtgcagctgccacaaaggatatactcgcaccccagatcataagcattgtagagatatcgacgagtgtcagcaaggaaatctctgtgtgaatgggcaatgcaagaatacagaaggaagctttcgctgcacctgtggccaagggtatcagctgagtgccgcaaaggaccagtgcgaggacatagacgagtgtcagcaccgacatctctgtgcacacggacagtgcaggaatacagaaggtagttttcagtgcgtttgcgaccaaggataccgcgctagcggcctgggggatcactgcgaggacatcaatgaatgcctggaggacaagagtgtctgtcaaagaggtgactgcataaacaccgccggttcttacgactgcacttgtcctgacggattccagctcgatgacaataaaacctgtcaggacattaatgaatgtgagcaccctggactctgtggccctcagggcgagtgcctgaacaccgaaggtagctttcattgtgtgtgccagcaaggcttttccatcagcgcggatggaagaacctgcgaagacgtgaacgagtgtgagctcctaagcggtgtgtgcggtgaggccttttgcgaaaacgtcgaaggatctttcctgtgcgtttgcgcagatgagaatcaggagtattcacccatgacgggacagtgcaggagcaggactagtaccgatttagatgtggacgtggatcagcctaaagaggaaaaaaaggaatgttattataatctgaacgacgctagcctttgtgacaatgtactcgcgccaaacgtgacaaagcaggagtgctgttgcacctccggggtcgggtggggcgataactgtgaaattttcccctgccccgtactgggaaccgccgaattcacagaaatgtgccctaaaggcaaaggattcgtgcccgctggcgagagcagttccgaggctgggggagagaattacaaagacgctgacgagtgcctactttttggacaggaaatctgcaaaaacggcttttgtctgaatacgcgtccaggctatgagtgctattgcaaacaaggcacctactacgatccagtaaagctgcaatgcttcgacatggacgaatgccaggacccgagcagttgtatcgatgggcaatgcgttaacaccgaagggagttacaactgtttctgtacacatcctatggtgttggacgctagcgagaagcgctgtattagacctgccgaaagcaacgaacagatagaagagacagacgtttatcaggacctgtgttgggaacatctgtcagacgagtacgtgtgttctaggcccctagtagggaagcaaacgacgtatactgaatgttgctgcctgtacggagaagcctggggaatgcagtgtgctttgtgtccacttaaagattctgacgactacgcccagctctgcaatatccctgtgacggggagacgccagccctatggtcgagatgccctggtggacttctcagaacagtacactccggaagccgacccctacttcattcaggatcgcttcctgaactcttttgaggaattgcaggcggaagagtgcggtatcttgaacgggtgcgaaaatgggagatgtgtgagagtacaagaggggtacacttgcgattgcttcgacggctaccacctagataccgccaagatgacctgtgtggatgttaacgagtgtgatgagctcaacaaccgcatgtccctatgtaaaaatgctaagtgtattaataccgacggcagctataaatgcctgtgcctgcctggttacgtgccttccgacaagccgaactattgtacacccttgaacacagcgttaaatctggaaaaggactcagacctggaatag

SEQ ID NO: 278835 - DNA, 1860 bp, Artificial Sequence
  derived and/or modified sequence
atgtgcagctgccacaagggctacaccagaacccccgaccacaagcactgcagagacatcgacgagtgccagcagggcaacctgtgcgtgaacggccagtgcaagaacaccgagggcagcttcagatgcacctgcggccagggctaccagctgagcgccgccaaggaccagtgcgaggacatcgacgagtgccagcacagacacctgtgcgcccacggccagtgcagaaacaccgagggcagcttccagtgcgtgtgcgaccagggctacagagccagcggcctgggcgaccactgcgaggacatcaacgagtgcctggaggacaagagcgtgtgccagagaggcgactgcatcaacaccgccggcagctacgactgcacctgccccgacggcttccagctggacgacaacaagacctgccaggacatcaacgagtgcgagcaccccggcctgtgcggcccccagggcgagtgcctgaacaccgagggcagcttccactgcgtgtgccagcagggcttcagcatcagcgccgacggcagaacctgcgaggacgtgaacgagtgcgagctgctgagcggcgtgtgcggcgaggccttctgcgagaacgtggagggcagcttcctgtgcgtgtgcgccgacgagaaccaggagtacagccccatgaccggccagtgcagaagcagaaccagcaccgacctggacgtggacgtggaccagcccaaggaggagaagaaggagtgctactacaacctgaacgacgccagcctgtgcgacaacgtgctggcccccaacgtgaccaagcaggagtgctgctgcaccagcggcgtgggctggggcgacaactgcgagatcttcccctgccccgtgctgggcaccgccgagttcaccgagatgtgccccaagggcaagggcttcgtgcccgccggcgagagcagcagcgaggccggcggcgagaactacaaggacgccgacgagtgcctgctgttcggccaggagatctgcaagaacggcttctgcctgaacaccagacccggctacgagtgctactgcaagcagggcacctactacgaccccgtgaagctgcagtgcttcgacatggacgagtgccaggaccccagcagctgcatcgacggccagtgcgtgaacaccgagggcagctacaactgcttctgcacccaccccatggtgctggacgccagcgagaagagatgcatcagacccgccgagagcaacgagcagatcgaggagaccgacgtgtaccaggacctgtgctgggagcacctgagcgacgagtacgtgtgcagcagacccctggtgggcaagcagaccacctacaccgagtgctgctgcctgtacggcgaggcctggggcatgcagtgcgccctgtgccccctgaaggacagcgacgactacgcccagctgtgcaacatccccgtgaccggcagaagacagccctacggcagagacgccctggtggacttcagcgagcagtacacccccgaggccgacccctacttcatccaggacagattcctgaacagcttcgaggagctgcaggccgaggagtgcggcatcctgaacggctgcgagaacggcagatgcgtgagagtgcaggagggctacacctgcgactgcttcgacggctaccacctggacaccgccaagatgacctgcgtggacgtgaacgagtgcgacgagctgaacaacagaatgagcctgtgcaagaacgccaagtgcatcaacaccgacggcagctacaagtgcctgtgcctgcccggctacgtgcccagcgacaagcccaactactgcacccccctgaacaccgccctgaacctggagaaggacagcgacctggagtag

SEQ ID NO: 278836 - protein, 463 aa, Artificial Sequence
  derived and/or modified sequence
MQYDDLPHYGGMDGVGIPSTMYGDPHAARSMQPVHHLNHGPPLHSHQYPHTAHTNAMAPSMGSSVNDALKRDKDAIYGHPLFPLLALIFEKCELATCTPREPGVAGGDVCSSESFNEDIAVFAKQIRAEKPLFSSNPELDNLMIQAIQVLRFHLLELEKVHELCDNFCHRYISCLKGKMPIDLVIDDREGGSKSDSEDITRSANLTDQPSWNRDHDDTASTRSGGTPGPSSGGHTSHSGDNSSEQGDGLDNSVASPSTGDDDDPDKDKKRHKKRGIFPKVATNIMRAWLFQHLTHPYPSEEQKKQLAQDTGLTILQVNNWFINARRRIVQPMIDQSNRAVSQGTPYNPDGQPMGGFVMDGQQHMGIRAPGLQSMPGEYVARGGPMGVSMGQPSYTQPQMPPHPAQLRHGPPMHTYIPGHPHHPTVMMHGGPPHPGMPMSASSPTVLNTGDPTMSGQVMDIHAQ

SEQ ID NO: 278837 - protein, 465 aa, Artificial Sequence
  derived and/or modified sequence
MAQRYDDLPHYGGMDGVGIPSTMYGDPHAARSMQPVHHLNHGPPLHSHQYPHTAHTNAMAPSMGSSVNDALKRDKDAIYGHPLFPLLALIFEKCELATCTPREPGVAGGDVCSSESFNEDIAVFAKQIRAEKPLFSSNPELDNLMIQAIQVLRFHLLELEKVHELCDNFCHRYISCLKGKMPIDLVIDDREGGSKSDSEDITRSANLTDQPSWNRDHDDTASTRSGGTPGPSSGGHTSHSGDNSSEQGDGLDNSVASPSTGDDDDPDKDKKRHKKRGIFPKVATNIMRAWLFQHLTHPYPSEEQKKQLAQDTGLTILQVNNWFINARRRIVQPMIDQSNRAVSQGTPYNPDGQPMGGFVMDGQQHMGIRAPGLQSMPGEYVARGGPMGVSMGQPSYTQPQMPPHPAQLRHGPPMHTYIPGHPHHPTVMMHGGPPHPGMPMSASSPTVLNTGDPTMSGQVMDIHAQ

SEQ ID NO: 278838 - protein, 370 aa, Artificial Sequence
  derived and/or modified sequence
MAQRYDDLPHYGGMDGVGIPSTMYGDPHAARSMQPVHHLNHGPPLHSHQYPHTAHTNAMAPSMGSSVNDALKRDKDAIYGHPLFPLLALIFEKCELATCTPREPGVAGGDVCSSESFNEDIAVFAKQIRAEKPLFSSNPELDNLMIQAIQVLRFHLLELEKVHELCDNFCHRYISCLKGKMPIDLVIDDREGGSKSDSEDITRSANLTDQPSWNRDHDDTASTRSGGTPGPSSGGHTSHSGDNSSEQGDGLDNSVASPSTGDDDDPDKDKKRHKKRGIFPKVATNIMRAWLFQHLTHPYPSEEQKKQLAQDTGLTILQVNNWFINARRRIVQPMIDQSNRAGKSPIVTVFKSRKRKPSSSHSPGGPLPGK

SEQ ID NO: 278839 - DNA, 3198 bp, Artificial Sequence
  derived and/or modified sequence
atttgaggtgttctgaccagaagaagacagagcggatgatcattcattcaccacgttgacaacctcgcctgtgattgacagctggagtggcagaaagccatgagatttggtagttgggtctgaggggcgctcttttttttccttttctttctttctttctttttttttttttaaactgatttttgggggagagaagatctgcttttttttgcccccgctgctgtcttggaaacggagcgcttttatgctcagtgactcgggcgctttgcttcaggtcccgtagaccgaagatctgggaccagtagctcacgttgctggagacgttaagggatttttcgtcgtgcttttttttttttttttttttttttccgggggagtttgaatatttgtttcttttcacactggccttaaagaggatatattagaagttgaagtaggaagggagccagagaggccgatggcgcaaaggtacgacgatctaccccattacgggggcatggatggagtaggcatcccctccacgatgtatggggacccgcatgcagccaggtccatgcagccggtccaccacctgaaccacgggcctcctctgcactcgcatcagtacccgcacacagctcataccaacgccatggcccccagcatgggctcctctgtcaatgacgctttaaagagagataaagatgccatttatggacaccccctcttccctctcttagcactgatttttgagaaatgtgaattagctacttgtaccccccgcgagccgggggtggcgggcggggacgtctgctcgtcagagtcattcaatgaagatatagccgtgttcgccaaacagattcgcgcagaaaaacctctattttcttctaatccagaactggataacttgatgattcaagccatacaagtattaaggtttcatctattggaattagagaaggtacacgaattatgtgacaatttctgccaccggtatattagctgtttgaaagggaaaatgcctatcgatttggtgatagacgatagagaaggaggatcaaaatcagacagtgaagatataacaagatcagcaaatctaactgaccagccctcttggaacagagatcatgatgacacggcatctactcgttcaggaggaaccccaggcccttccagcggtggccacacgtcacacagtggggacaacagcagtgagcaaggtgatggcttggacaacagtgtagcttcccccagcacaggtgacgatgatgaccctgataaggacaaaaagcgtcacaaaaagcgtggcatctttcccaaagtagccacaaatatcatgagggcgtggctgttccagcatctaacacacccttacccttctgaagaacagaaaaagcagttggcacaagacacgggactcaccatccttcaagtgaacaattggtttattaatgcccggagaagaatagtgcagcccatgatagaccagtccaaccgagcagtaagtcaaggaacaccttataatcctgatggacagcccatgggaggtttcgtaatggacggtcagcaacatatgggaattagagcaccaggacctatgagtggaatgggcatgaatatgggcatggaggggcagtggcactacatgtaaccttcatctagttaaccaatcgcaaagcaagggggaaggctgcaaagtatgccaggggagtatgtagcccggggtggtccaatgggtgtgagtatgggacagccaagttatacccaaccccagatgcccccccatcctgctcagctgcgtcatgggccccccatgcatacgtacattcctggacaccctcaccacccaacagtgatgatgcatggaggaccgccccaccctggaatgccaatgtcagcatcaagccccacagttcttaatacaggagacccaacaatgagtggacaagtcatggacattcatgctcagtagcttaagggaatatgcattgtctgcaatggtgactgatttcaaatcatgttttttctgcaatgactgtggagttccattcttggcatctactctggaccaaggagcatccctaattcttcatagggacctttaaaaagcaggaaataccaactgaagtcaatttgggggacatgctaaataactatataagacattaagagaacaaagagtgaaatattgtaaatgctattatactgttatccatattacgttgtttcttatagattttttaaaaaaaatgtgaaatttttccacactatgtgtgttgtttccatagctcttcacttcctccagaagcctccttacattaaaaagccttacagttatcctgcaagggacaggaaggtctgatttgcaggatttttagagcattaaaataactatcaggcagaagaatctttcttctcgcctaggatttcagccatgcgcgcgctctctctctttctctctcttttcctctctctccctctttctagcctggggcttgaatttgcatgtctaattcatttactcaccatatttgaattggcctgaacagatgtaaatcgggaaggatgggaaaaactgcagtcatcaacaatgattaatcagctgttgcaggcagtgtcttaaggagactggtaggaggaggcatggaaaccaaaaggccgtgtgtttagaagcctaattgtcacatcaagcatcattgtccccatgcaacaaccaccaccttatacatcacttcctgttttaagcagctctaaaacatagactgaagatttatttttaatatgttgactttatttctgagcaaagcatcggtcatgtgtgtattttttcatagtcccaccttggagcatttatgtagacattgtaaataaattttgtgcaaaaaggactggaaaaatgaactgtattattgcaatttttttttgtaaaagtagcagtttggtatgagttggcatgcatacaagatttactaagtgggataagctaattatactttttgttgtggataaacaaatgcttgttgatagcctttttctatcaagaaaccaaggagctaattattaataacaatcattgcacactgagtcttagcgtttctgatggaaacagtttggattgtataataacgccaagcccagttgtagtcgtttgagtgcagtaatgaaatctgaatctaaaataaaaacaagattatttttgtcaaaaaaaaaaaaaaaaaa

SEQ ID NO: 278840 - DNA, 1392 bp, Artificial Sequence
  derived and/or modified sequence
atgcaatacgatgacctgccacattatgggggtatggacggagtcggaatcccttctaccatgtacggcgatccccacgccgcaaggagtatgcagccagtgcatcatctgaaccatggcccaccccttcacagccatcagtaccctcacacggcccacacgaacgctatggcccccagcatgggctcaagcgtcaacgacgccctgaagagagacaaagatgcaatttatgggcatccattgtttcccctgttagccttaatttttgagaaatgcgagttagcgacctgcacccctcgcgaaccaggggtggccggaggtgacgtctgcagctccgagtccttcaatgaagatatcgcggtgtttgccaagcagatacgggccgaaaagcctctgttttcatccaacccggagttggacaacctcatgattcaggccatccaggttttacgattccatttgctcgagctagagaaagtgcacgaactgtgcgacaatttctgccatcgttacatttcatgtctcaaaggcaaaatgccgatcgatttagttatcgatgatcgtgagggcggatctaaatctgacagcgaggacatcacgcgctcagccaacctcacggaccaaccctcctggaacagggaccacgacgatacggcctccactcgtagcggcggtactcctgggcccagttccggcggccacacatcccacagtggcgacaatagttccgagcagggcgacggattagataacagtgtcgcctcaccttctacaggggacgatgacgatcctgacaaagacaaaaaacgtcacaaaaaacgcggtatcttcccaaaggtggcgaccaacattatgcgggcctggctgtttcagcaccttacacacccgtaccctagtgaggagcagaagaagcaactggcgcaagataccggactgacaatcctgcaggtaaacaattggtttattaacgcgcgccgaaggattgttcagcctatgattgatcaaagtaaccgggccgtctcacagggtacaccgtataatcctgacggacagcctatggggggctttgtgatggacggacagcagcacatggggattagagctccaggacttcagtctatgccgggggaatacgtggcccggggtggcccaatgggcgtcagcatgggccaaccaagttacacccagccccaaatgccaccccaccccgctcaactgcgccacggccctcctatgcacacctatattccaggccacccccatcatcctacagtaatgatgcacgggggcccaccacaccctggcatgcctatgagcgcttcttctccaactgtactaaacaccggcgatcccacaatgtccggacaggtcatggacatccacgcccagtag

SEQ ID NO: 278841 - DNA, 1398 bp, Artificial Sequence
  derived and/or modified sequence
atggcgcagcgctacgacgatctgccacactatggggggatggacggagtgggcatcccttcaactatgtacggtgatccccacgcagctaggtccatgcagccagttcatcatctcaaccatggccctcctcttcattcccaccagtaccctcacacagcccacacaaatgctatggccccatccatgggctcaagcgtgaatgatgccttgaaacgagacaaggacgctatctacggacaccccctgtttcctctgttggccctcatcttcgaaaagtgcgagctcgctacatgcaccccccgcgagccgggagtagcaggtggagatgtttgcagttcagaaagtttcaacgaggacatcgccgtgttcgctaaacagattcgggcagagaagcctctgttctccagcaatcctgagctggataacctgatgattcaggctatccaggtcctgaggttccacctcctggagttggaaaaagtccacgagttatgtgacaatttctgccataggtatataagctgtcttaagggaaaaatgcctatcgacttggtaatcgatgacagggaaggtggcagcaagtccgattcagaagacattactcggagtgcaaaccttacagatcagccatcttggaaccgtgaccacgacgatactgcatcgacccgcagcggcggaacaccaggtccatcctcaggaggccatactagtcattcaggggataacagctctgaacagggcgacggattagataactccgtcgcgagcccttctaccggggacgatgatgatcctgataaagacaaaaagcggcataagaagcgcggcatttttcccaaggtcgcaactaatattatgcgagcttggctattccagcatctcacacacccgtacccttccgaggagcaaaagaagcagttggcgcaagatactggattaaccatcttgcaggtaaataactggttcattaacgctcgccgacggattgtgcagcctatgattgatcagtcgaacagagcagtctctcaaggaacgccctataaccctgacggtcagccaatgggaggtttcgtgatggacggacagcagcatatgggcattagggcacctggcctccagtcaatgccgggggagtatgtggcccggggcgggcccatgggcgtttccatggggcagccgtcctatactcagccgcagatgccgccccaccctgcacaactccggcacggaccccctatgcacacctatatccctggtcatccccaccatccaaccgtgatgatgcatgggggacctccgcaccccgggatgcctatgagcgcttccagtcctactgtgcttaataccggtgatcccaccatgtctgggcaagttatggacatacatgcccagtag

SEQ ID NO: 278842 - DNA, 1392 bp, Artificial Sequence
  derived and/or modified sequence
atgcagtatgatgacctgccccactatggaggcatggatggagtgggcatccccagcaccatgtacggggacccccatgctgcccgctccatgcagcctgtgcaccacctgaaccacggcccccccctgcacagccaccagtacccccacacagcccacaccaatgccatggcccccagcatgggcagctctgtgaatgatgccctgaagagggacaaggatgccatctacggccaccccctcttccccctgctggccctgatctttgagaagtgtgagctggccacctgcaccccccgggagcccggggtggccggaggagatgtgtgcagcagcgagagcttcaatgaagatattgctgtgtttgccaagcagatccgggcagagaagcccctcttcagcagcaaccctgagctggacaacctgatgatccaggccatccaggtgctgcgcttccacctgctggagctggagaaggtgcatgagctgtgtgacaacttctgccaccgctacatcagctgcctgaagggcaagatgcccatcgacctggtgattgatgaccgggagggcggcagcaagagtgacagcgaggacatcaccaggtctgccaacctgacagaccagcccagctggaacagagaccatgatgacacagccagcaccaggtctgggggcaccccaggccccagcagcggcggccacaccagccacagcggggacaacagcagcgagcagggagatggcctggacaacagcgtggccagccccagcactggagatgatgatgatcctgacaaggacaagaagaggcacaagaagaggggcatcttccccaaggtggccaccaacatcatgagggcctggctgttccagcacctgacccacccctaccccagcgaggagcagaagaagcagctggcccaggacaccggcctgaccatcctgcaggtgaacaactggttcatcaatgcccggcggcgcatcgtgcagcccatgattgaccagagcaacagagctgtgtcccagggcaccccctacaacccagatggccagcccatgggcggctttgtgatggatggccagcagcacatgggcatccgggcccctggcctgcagagcatgcctggagaatatgtggcccggggcggccccatgggcgtgtccatgggccagcccagctacacccagccccagatgccaccccacccagcccagctgcggcacggcccccccatgcacacctacatccctggccacccccaccaccccaccgtgatgatgcacggcggccccccccaccctggcatgcccatgtctgccagcagccccaccgtgctgaacacaggagaccccaccatgagcggccaggtgatggacatccacgcccagtag

SEQ ID NO: 278843 - DNA, 1398 bp, Artificial Sequence
  derived and/or modified sequence
atggcccagagatatgatgacctgccccactatggaggcatggatggagtgggcatccccagcaccatgtacggggacccccatgctgcccgctccatgcagcctgtgcaccacctgaaccacggcccccccctgcacagccaccagtacccccacacagcccacaccaatgccatggcccccagcatgggcagctctgtgaatgatgccctgaagagggacaaggatgccatctacggccaccccctcttccccctgctggccctgatctttgagaagtgtgagctggccacctgcaccccccgggagcccggggtggccggaggagatgtgtgcagcagcgagagcttcaatgaagatattgctgtgtttgccaagcagatccgggcagagaagcccctcttcagcagcaaccctgagctggacaacctgatgatccaggccatccaggtgctgcgcttccacctgctggagctggagaaggtgcatgagctgtgtgacaacttctgccaccgctacatcagctgcctgaagggcaagatgcccatcgacctggtgattgatgaccgggagggcggcagcaagagtgacagcgaggacatcaccaggtctgccaacctgacagaccagcccagctggaacagagaccatgatgacacagccagcaccaggtctgggggcaccccaggccccagcagcggcggccacaccagccacagcggggacaacagcagcgagcagggagatggcctggacaacagcgtggccagccccagcactggagatgatgatgatcctgacaaggacaagaagaggcacaagaagaggggcatcttccccaaggtggccaccaacatcatgagggcctggctgttccagcacctgacccacccctaccccagcgaggagcagaagaagcagctggcccaggacaccggcctgaccatcctgcaggtgaacaactggttcatcaatgcccggcggcgcatcgtgcagcccatgattgaccagagcaacagagctgtgtcccagggcaccccctacaacccagatggccagcccatgggcggctttgtgatggatggccagcagcacatgggcatccgggcccctggcctgcagagcatgcctggagaatatgtggcccggggcggccccatgggcgtgtccatgggccagcccagctacacccagccccagatgccaccccacccagcccagctgcggcacggcccccccatgcacacctacatccctggccacccccaccaccccaccgtgatgatgcacggcggccccccccaccctggcatgcccatgtctgccagcagccccaccgtgctgaacacaggagaccccaccatgagcggccaggtgatggacatccacgcccagtag

SEQ ID NO: 278844 - DNA, 3147 bp, Artificial Sequence
  derived and/or modified sequence
atttgaggtgttctgaccagaagaagacagagcggatgatcattcattcaccacgttgacaacctcgcctgtgattgacagctggagtggcagaaagccatgagatttggtagttgggtctgaggggcgctcttttttttccttttctttctttctttctttttttttttttaaactgatttttgggggagagaagatctgcttttttttgcccccgctgctgtcttggaaacggagcgcttttatgctcagtgactcgggcgctttgcttcaggtcccgtagaccgaagatctgggaccagtagctcacgttgctggagacgttaagggatttttcgtcgtgcttttttttttttttttttttttttccgggggagtttgaatatttgtttcttttcacactggccttaaagaggatatattagaagttgaagtaggaagggagccagagaggccgatggcgcaaaggtacgacgatctaccccattacgggggcatggatggagtaggcatcccctccacgatgtatggggacccgcatgcagccaggtccatgcagccggtccaccacctgaaccacgggcctcctctgcactcgcatcagtacccgcacacagctcataccaacgccatggcccccagcatgggctcctctgtcaatgacgctttaaagagagataaagatgccatttatggacaccccctcttccctctcttagcactgatttttgagaaatgtgaattagctacttgtaccccccgcgagccgggggtggcgggcggggacgtctgctcgtcagagtcattcaatgaagatatagccgtgttcgccaaacagattcgcgcagaaaaacctctattttcttctaatccagaactggataacttgatgattcaagccatacaagtattaaggtttcatctattggaattagagaaggtacacgaattatgtgacaatttctgccaccggtatattagctgtttgaaagggaaaatgcctatcgatttggtgatagacgatagagaaggaggatcaaaatcagacagtgaagatataacaagatcagcaaatctaactgaccagccctcttggaacagagatcatgatgacacggcatctactcgttcaggaggaaccccaggcccttccagcggtggccacacgtcacacagtggggacaacagcagtgagcaaggtgatggcttggacaacagtgtagcttcccccagcacaggtgacgatgatgaccctgataaggacaaaaagcgtcacaaaaagcgtggcatctttcccaaagtagccacaaatatcatgagggcgtggctgttccagcatctaacacacccttacccttctgaagaacagaaaaagcagttggcacaagacacgggactcaccatccttcaagtgaacaattggtttattaatgcccggagaagaatagtgcagcccatgatagaccagtccaaccgagcagtaagtcaaggaacaccttataatcctgatggacagcccatgggaggtttcgtaatggacggtcagcaacatatgggaattagagcaccaggacctatgagtggaatgggcatgaatatgggcatggaggggcagtggcactacatgtaaccttcatctagttaaccaatcgcaaagcaagggggaaggctgcaaagtatgccaggggagtatgtagcccggggtggtccaatgggtgtgagtatgggacagccaagttatacccaaccccagatgcccccccatcctgctcagctgcgtcatgggccccccatgcatacgtacattcctggacaccctcaccacccaacagtgatgatgcatggaggaccgccccaccctggaatgccaatgtcagcatcaagccccacagttcttaatacaggagacccaacaatgagtggacaagtcatggacattcatgctcagtagcttaagggaatatgcattgtctgcaatggtgactgatttcaaatcatgttttttctgcaatgactgtggagttccattcttggcatctactctggaccaaggagcatccctaattcttcatagggacctttaaaaagcaggaaataccaactgaagtcaatttgggggacatgctaaataactatataagacattaagagaacaaagagtgaaatattgtaaatgctattatactgttatccatattacgttgtttcttatagattttttaaaaaaaatgtgaaatttttccacactatgtgtgttgtttccatagctcttcacttcctccagaagcctccttacattaaaaagccttacagttatcctgcaagggacaggaaggtctgatttgcaggatttttagagcattaaaataactatcaggcagaagaatctttcttctcgcctaggatttcagccatgcgcgcgctctctctctttctctctcttttcctctctctccctctttctagcctggggcttgaatttgcatgtctaattcatttactcaccatatttgaattggcctgaacagatgtaaatcgggaaggatgggaaaaactgcagtcatcaacaatgattaatcagctgttgcaggcagtgtcttaaggagactggtaggaggaggcatggaaaccaaaaggccgtgtgtttagaagcctaattgtcacatcaagcatcattgtccccatgcaacaaccaccaccttatacatcacttcctgttttaagcagctctaaaacatagactgaagatttatttttaatatgttgactttatttctgagcaaagcatcggtcatgtgtgtattttttcatagtcccaccttggagcatttatgtagacattgtaaataaattttgtgcaaaaaggactggaaaaatgaactgtattattgcaatttttttttgtaaaagtagcagtttggtatgagttggcatgcatacaagatttactaagtgggataagctaattatactttttgttgtggataaacaaatgcttgttgatagcctttttctatcaagaaaccaaggagctaattattaataacaatcattgcacactgagtcttagcgtttctgatggaaacagtttggattgtataataacgccaagcccagttgtagtcgtttgagtgcagtaatgaaatc

SEQ ID NO: 278845 - DNA, 2659 bp, Artificial Sequence
  derived and/or modified sequence
gagacatgcccgtttcaccttctaccctcgggagaatgcttctctttctctctttctttcttctttccttcttgccaaaggagcctgaatttctaaactagttgatagggacacaagttagggcaagatcattcatcccagacgagtctcgctgagaattctgtattttttacttaaagctttaattttaaaataagaaaaactcagctttatagatgcaaggccaccgaattccgggtggaaggacccagctgtattgaccttatataagctcggtgccttgccgttctcccatttgcccgcctggcctcctgaaccttctttctctcctgtttgtcatgcagtacgacgatctaccccattacgggggcatggatggagtaggcatcccctccacgatgtatggggacccgcatgcagccaggtccatgcagccggtccaccacctgaaccacgggcctcctctgcactcgcatcagtacccgcacacagctcataccaacgccatggcccccagcatgggctcctctgtcaatgacgctttaaagagagataaagatgccatttatggacaccccctcttccctctcttagcactgatttttgagaaatgtgaattagctacttgtaccccccgcgagccgggggtggcgggcggggacgtctgctcgtcagagtcattcaatgaagatatagccgtgttcgccaaacagattcgcgcagaaaaacctctattttcttctaatccagaactggataacttgatgattcaagccatacaagtattaaggtttcatctattggaattagagaaggtacacgaattatgtgacaatttctgccaccggtatattagctgtttgaaagggaaaatgcctatcgatttggtgatagacgatagagaaggaggatcaaaatcagacagtgaagatataacaagatcagcaaatctaactgaccagccctcttggaacagagatcatgatgacacggcatctactcgttcaggaggaaccccaggcccttccagcggtggccacacgtcacacagtggggacaacagcagtgagcaaggtgatggcttggacaacagtgtagcttcccccagcacaggtgacgatgatgaccctgataaggacaaaaagcgtcacaaaaagcgtggcatctttcccaaagtagccacaaatatcatgagggcgtggctgttccagcatctaacacacccttacccttctgaagaacagaaaaagcagttggcacaagacacgggactcaccatccttcaagtgaacaattggtttattaatgcccggagaagaatagtgcagcccatgatagaccagtccaaccgagcagtaagtcaaggaacaccttataatcctgatggacagcccatgggaggtttcgtaatggacggtcagcaacatatgggaattagagcaccagggctgcaaagtatgccaggggagtatgtagcccggggtggtccaatgggtgtgagtatgggacagccaagttatacccaaccccagatgcccccccatcctgctcagctgcgtcatgggccccccatgcatacgtacattcctggacaccctcaccacccaacagtgatgatgcatggaggaccgccccaccctggaatgccaatgtcagcatcaagccccacagttcttaatacaggagacccaacaatgagtggacaagtcatggacattcatgctcagtagcttaagggaatatgcattgtctgcaatggtgactgatttcaaatcatgttttttctgcaatgactgtggagttccattcttggcatctactctggaccaaggagcatccctaattcttcatagggacctttaaaaagcaggaaataccaactgaagtcaatttgggggacatgctaaataactatataagacattaagagaacaaagagtgaaatattgtaaatgctattatactgttatccatattacgttgtttcttatagattttttaaaaaaaatgtgaaatttttccacactatgtgtgttgtttccatagctcttcacttcctccagaagcctccttacattaaaaagccttacagttatcctgcaagggacaggaaggtctgatttgcaggatttttagagcattaaaataactatcaggcagaagaatctttcttctcgcctaggatttcagccatgcgcgcgctctctctctttctctctcttttcctctctctccctctttctagcctggggcttgaatttgcatgtctaattcatttactcaccatatttgaattggcctgaacagatgtaaatcgggaaggatgggaaaaactgcagtcatcaacaatgattaatcagctgttgcaggcagtgtcttaaggagactggtaggaggaggcatggaaaccaaaaggccgtgtgtttagaagcctaattgtcacatcaagcatcattgtccccatgcaacaaccaccaccttatacatcacttcctgttttaagcagctctaaaacatagactgaagatttatttttaatatgttgactttatttctgagcaaagcatcggtcatgtgtgtattttttcatagtcccaccttggagcatttatgtagacattgtaaataaattttgtgcaaaaaggactggaaaaatgaa

SEQ ID NO: 278846 - DNA, 3084 bp, Artificial Sequence
  derived and/or modified sequence
atttgaggtgttctgaccagaagaagacagagcggatgatcattcattcaccacgttgacaacctcgcctgtgattgacagctggagtggcagaaagccatgagatttggtagttgggtctgaggggcgctcttttttttccttttctttctttctttctttttttttttttaaactgatttttgggggagagaagatctgcttttttttgcccccgctgctgtcttggaaacggagcgcttttatgctcagtgactcgggcgctttgcttcaggtcccgtagaccgaagatctgggaccagtagctcacgttgctggagacgttaagggatttttcgtcgtgcttttttttttttttttttttttttccgggggagtttgaatatttgtttcttttcacactggccttaaagaggatatattagaagttgaagtaggaagggagccagagaggccgatggcgcaaaggtacgacgatctaccccattacgggggcatggatggagtaggcatcccctccacgatgtatggggacccgcatgcagccaggtccatgcagccggtccaccacctgaaccacgggcctcctctgcactcgcatcagtacccgcacacagctcataccaacgccatggcccccagcatgggctcctctgtcaatgacgctttaaagagagataaagatgccatttatggacaccccctcttccctctcttagcactgatttttgagaaatgtgaattagctacttgtaccccccgcgagccgggggtggcgggcggggacgtctgctcgtcagagtcattcaatgaagatatagccgtgttcgccaaacagattcgcgcagaaaaacctctattttcttctaatccagaactggataacttgatgattcaagccatacaagtattaaggtttcatctattggaattagagaaggtacacgaattatgtgacaatttctgccaccggtatattagctgtttgaaagggaaaatgcctatcgatttggtgatagacgatagagaaggaggatcaaaatcagacagtgaagatataacaagatcagcaaatctaactgaccagccctcttggaacagagatcatgatgacacggcatctactcgttcaggaggaaccccaggcccttccagcggtggccacacgtcacacagtggggacaacagcagtgagcaaggtgatggcttggacaacagtgtagcttcccccagcacaggtgacgatgatgaccctgataaggacaaaaagcgtcacaaaaagcgtggcatctttcccaaagtagccacaaatatcatgagggcgtggctgttccagcatctaacacacccttacccttctgaagaacagaaaaagcagttggcacaagacacgggactcaccatccttcaagtgaacaattggtttattaatgcccggagaagaatagtgcagcccatgatagaccagtccaaccgagcagtaagtcaaggaacaccttataatcctgatggacagcccatgggaggtttcgtaatggacggtcagcaacatatgggaattagagcaccagggctgcaaagtatgccaggggagtatgtagcccggggtggtccaatgggtgtgagtatgggacagccaagttatacccaaccccagatgcccccccatcctgctcagctgcgtcatgggccccccatgcatacgtacattcctggacaccctcaccacccaacagtgatgatgcatggaggaccgccccaccctggaatgccaatgtcagcatcaagccccacagttcttaatacaggagacccaacaatgagtggacaagtcatggacattcatgctcagtagcttaagggaatatgcattgtctgcaatggtgactgatttcaaatcatgttttttctgcaatgactgtggagttccattcttggcatctactctggaccaaggagcatccctaattcttcatagggacctttaaaaagcaggaaataccaactgaagtcaatttgggggacatgctaaataactatataagacattaagagaacaaagagtgaaatattgtaaatgctattatactgttatccatattacgttgtttcttatagattttttaaaaaaaatgtgaaatttttccacactatgtgtgttgtttccatagctcttcacttcctccagaagcctccttacattaaaaagccttacagttatcctgcaagggacaggaaggtctgatttgcaggatttttagagcattaaaataactatcaggcagaagaatctttcttctcgcctaggatttcagccatgcgcgcgctctctctctttctctctcttttcctctctctccctctttctagcctggggcttgaatttgcatgtctaattcatttactcaccatatttgaattggcctgaacagatgtaaatcgggaaggatgggaaaaactgcagtcatcaacaatgattaatcagctgttgcaggcagtgtcttaaggagactggtaggaggaggcatggaaaccaaaaggccgtgtgtttagaagcctaattgtcacatcaagcatcattgtccccatgcaacaaccaccaccttatacatcacttcctgttttaagcagctctaaaacatagactgaagatttatttttaatatgttgactttatttctgagcaaagcatcggtcatgtgtgtattttttcatagtcccaccttggagcatttatgtagacattgtaaataaattttgtgcaaaaaggactggaaaaatgaactgtattattgcaatttttttttgtaaaagtagcagtttggtatgagttggcatgcatacaagatttactaagtgggataagctaattatactttttgttgtggataaacaaatgcttgttgatagcctttttctatcaagaaaccaaggagctaattattaataacaatcattgcacactgagtcttagcgtttctgatggaaacagtttggattgtataataacgccaagcccagttgtagtcgtttgagtgcagtaatgaaatctgaatctaaaataaaaacaagattatttttgtc

SEQ ID NO: 278847 - DNA, 1392 bp, Artificial Sequence
  derived and/or modified sequence
atgcagtacgacgacctgccccactacggcggcatggacggcgtgggcatccctagtaccatgtacggggatccacacgccgctagatctatgcagcctgtgcatcacttaaaccacggtccccccctgcacagtcatcagtatcctcacactgcccacaccaatgccatggcgccgagtatgggaagttcagtcaacgatgcacttaagcgggataaggatgcgatctatgggcatcccctgtttcccctgttggcgctaatcttcgagaagtgcgaactcgccacatgtactccccgggagcctggggtggctggtggtgacgtatgctcctcagaatcattcaatgaggatattgccgtgtttgctaagcagattcgcgctgaaaaacctctgttctcttctaatcccgaacttgataatcttatgattcaggcaatccaggtactgagatttcatctcctggagctggaaaaagtgcacgagctgtgcgacaatttttgtcatcgttatatctcatgtcttaaggggaagatgcccatagacctggttatcgacgacagggaaggcggctcaaagagcgacagcgaggatattaccagatccgccaatctgaccgaccagccctcctggaatagggatcacgacgataccgcttcaactcgatcagggggaactcccggccctagctctggcggccatacatctcactcgggggataacagctctgaacaaggagacggtctggacaactcagtcgccagtccgagcacaggagatgatgatgatccagacaaggacaaaaagagacacaaaaagcgggggatattccctaaagtggccacaaatattatgagagcttggctttttcagcacctgactcacccctatccctcagaagagcagaaaaagcaactggctcaggacacagggttaaccattctacaggtcaataattggttcatcaatgcacggcggcgcatcgtacagcccatgatcgaccagtctaatagggcagtgagccagggaactccatacaaccctgacggccaaccaatgggcggctttgtgatggatgggcagcaacacatgggcatccgagcgcccggcctccaatccatgcccggcgagtatgtagcccgcggggggcccatgggagttagcatgggccagccctcttacacacaacctcaaatgcctccccacccggcccagcttcgacacggaccacccatgcacacttatatccctggacaccctcatcacccgacagtgatgatgcatggcggacccccacacccgggcatgcctatgtccgcgagctccccaactgttctgaacactggcgatcctacaatgagcggacaggtgatggatatccacgcccagtag

SEQ ID NO: 278848 - DNA, 1398 bp, Artificial Sequence
  derived and/or modified sequence
atggcccagcggtacgacgacctgccccactacggcggcatggacggcgtggggattccatctacaatgtacggcgaccctcatgcagccaggtctatgcagccagttcaccatcttaatcacggcccaccactgcattctcaccaataccctcataccgcccataccaatgccatggctccaagcatgggctccagcgttaacgatgccctgaaacgggacaaggacgctatctatggccaccccctgttccctctgctcgcactgattttcgagaaatgcgaattggctacttgcacacctagggagccaggggtcgctgggggtgacgtctgttcttctgagagctttaatgaagacatcgccgtgtttgcgaaacagatccgagctgaaaaacctttgttttcctccaatccggaacttgataatcttatgatccaggctatacaggtcctgcgttttcacctattggaactcgagaaggtacatgagctttgtgataatttttgccacaggtacattagttgcctgaagggaaaaatgcccattgatctggtgatcgacgacagagaaggtggttccaaatcggatagtgaggatatcacccggtccgccaacctaaccgatcagcctagctggaatagagatcacgacgacaccgcctcaacaagatcaggaggcacacctgggccttcttcagggggccacaccagccacagcggcgataatagctccgagcaaggagatggattggacaattccgtggccagcccttcgaccggcgacgatgatgatcccgacaaagataaaaagcgccacaaaaagcgtgggatttttcctaaagtggccactaacatcatgcgcgcttggctgtttcaacacctgacacatccttatccatccgaagaacagaaaaagcaactagcccaggacaccggcttaaccattctgcaggtgaataattggttcattaacgcccgcagaagaattgtgcagccaatgattgaccaaagcaatcgagcggtcagccaggggacaccatataatccggatggccaacccatgggcggattcgtgatggacggacagcaacacatgggaattcgggcccccggacttcagtccatgcccggggaatatgtggcccgcgggggcccaatgggcgtatctatgggacagccgtcttacacccaaccacaaatgcctccacatcccgcacaactaagacatggccctcccatgcatacctacatccccggccatcctcaccaccctaccgtgatgatgcacggcgggcctccacaccctggaatgccaatgtctgcatccagccccacggttctcaatactggcgaccccacgatgtcaggacaggtgatggacatacacgctcagtag

SEQ ID NO: 278849 - DNA, 1392 bp, Artificial Sequence
  derived and/or modified sequence
atgcagtacgatgacctgccccattatggcggaatggatggtgtgggaatcccaagtaccatgtacggtgatcctcatgcggctcgttccatgcaacccgtgcaccacctcaaccacggacctcctctgcacagtcaccagtacccccatactgcccatactaacgccatggccccttcaatgggctcttctgttaatgacgcattgaaaagggacaaagatgccatttacggacaccccctgttcccgctcctggctttgatttttgagaaatgcgagctcgctacatgtacaccacgtgaaccgggtgtggcagggggagatgtatgttcgagcgagagttttaacgaggatatcgctgtgtttgccaaacaaattcgcgctgagaagcccttattctctagcaaccccgagctcgataacctaatgatacaggccatccaggtgctgagattccacttactggagctggagaaggtgcatgagctgtgcgataacttttgccacagatacatcagctgtctgaaaggcaagatgcctatcgatctggtgatcgacgacagggaaggaggcagtaagtccgattcagaggacatcacacgatccgccaatcttacagaccagcctagttggaaccgggatcatgatgatacagcaagcaccagatccggaggcactcccggaccttcgtccggtggtcacacctctcactccggtgacaattcatccgaacagggtgacgggctggataactcagtcgcctcgccatctactggcgatgacgacgaccctgacaaggacaagaaacgccataagaaaagaggaattttccccaaggtagcgactaatattatgagggcgtggttatttcagcatttaacgcacccttaccccagcgaagagcaaaaaaaacagctggcccaagacacaggtctcaccatattgcaagtcaataactggtttataaacgcccgtcgcagaattgtgcagcctatgattgatcagtctaatcgggcagtcagccagggcacgccttacaatccagacggacaaccgatgggcggttttgtgatggacgggcagcagcacatgggaatcagggcccctggtttgcagtctatgcctggcgaatatgtggctcgaggtggtcctatgggcgtgagtatgggtcagccatcatacacacagcctcagatgcctccccaccctgcccagctcaggcacggaccaccgatgcacacgtatatcccagggcatccgcaccatcctaccgtcatgatgcacggagggccacctcaccctggcatgccgatgtctgcctccagtccaaccgttctgaataccggcgatccgacaatgagcggccaggtaatggatatccatgcacagtag

SEQ ID NO: 278850 - DNA, 1398 bp, Artificial Sequence
  derived and/or modified sequence
atggcccagcggtatgatgacttaccgcactatggtggaatggatggtgttggcattccatcgacgatgtacggggacccgcatgctgcacgctctatgcagcctgtgcaccacctgaaccacggcccaccattacacagtcaccagtatccccatactgcacataccaatgctatggccccttccatggggtcctccgttaatgacgctctgaaaagagacaaagacgcaatctatggccatcctctgtttcccttgttggctttaatcttcgaaaagtgtgaactggccacctgcacaccacgcgaaccaggcgtggcgggaggagacgtgtgcagcagcgaaagcttcaacgaggacattgctgttttcgccaagcagatcagagctgaaaagccattattttcgagcaaccctgagttagataacttgatgatacaggccattcaggtactgaggtttcacctcctcgaactggaaaaggtgcatgagctgtgcgacaatttttgtcacaggtacattagctgtcttaaagggaaaatgcccatagatctcgttatagacgaccgagagggcggttccaaatctgacagcgaggacataactcggtccgcaaatctcactgatcagccatcctggaaccgagatcatgatgacaccgctagcactcggtccgggggaactcctgggccaagttctggcggacacaccagccacagtggcgataatagttccgagcagggtgatgggctggacaactccgtcgcatcaccctccactggcgatgacgacgacccagacaaagacaaaaaaagacataaaaaacggggtatcttcccgaaggtcgcaacgaatatcatgagggcgtggctgtttcagcacctgacccacccttatccaagcgaagaacagaagaagcagttggcccaggacactggactgaccatactacaggtgaataactggttcatcaacgctcgacgcaggatcgtgcagcctatgatcgaccaaagcaatagagctgttagtcaggggaccccctacaatccagatggacaacccatggggggttttgtgatggacggacaacaacacatgggaattagggctcccggactccagtcaatgccaggagagtacgttgcccgtggcggtccgatgggcgtgagcatgggtcagccctcatacacccagccccaaatgcctccccaccctgcacagctgcgacacggaccgcctatgcatacttatattcctggacaccctcatcaccctacagtaatgatgcacggcggacctccccatcccggtatgcccatgtcagccagtagccccacagtgctgaacacaggggaccccacaatgtctggccaagtgatggatattcatgctcagtag

SEQ ID NO: 278851 - DNA, 1392 bp, Artificial Sequence
  derived and/or modified sequence
atgcagtacgacgacctgccccactacggcggcatggacggcgtgggcatccccagcaccatgtacggcgacccccacgccgccagaagcatgcagcccgtgcaccacctgaaccacggcccccccctgcacagccaccagtacccccacaccgcccacaccaacgccatggcccccagcatgggcagcagcgtgaacgacgccctgaagagagacaaggacgccatctacggccaccccctgttccccctgctggccctgatcttcgagaagtgcgagctggccacctgcacccccagagagcccggcgtggccggcggcgacgtgtgcagcagcgagagcttcaacgaggacatcgccgtgttcgccaagcagatcagagccgagaagcccctgttcagcagcaaccccgagctggacaacctgatgatccaggccatccaggtgctgagattccacctgctggagctggagaaggtgcacgagctgtgcgacaacttctgccacagatacatcagctgcctgaagggcaagatgcccatcgacctggtgatcgacgacagagagggcggcagcaagagcgacagcgaggacatcaccagaagcgccaacctgaccgaccagcccagctggaacagagaccacgacgacaccgccagcaccagaagcggcggcacccccggccccagcagcggcggccacaccagccacagcggcgacaacagcagcgagcagggcgacggcctggacaacagcgtggccagccccagcaccggcgacgacgacgaccccgacaaggacaagaagagacacaagaagagaggcatcttccccaaggtggccaccaacatcatgagagcctggctgttccagcacctgacccacccctaccccagcgaggagcagaagaagcagctggcccaggacaccggcctgaccatcctgcaggtgaacaactggttcatcaacgccagaagaagaatcgtgcagcccatgatcgaccagagcaacagagccgtgagccagggcaccccctacaaccccgacggccagcccatgggcggcttcgtgatggacggccagcagcacatgggcatcagagcccccggcctgcagagcatgcccggcgagtacgtggccagaggcggccccatgggcgtgagcatgggccagcccagctacacccagccccagatgcccccccaccccgcccagctgagacacggcccccccatgcacacctacatccccggccacccccaccaccccaccgtgatgatgcacggcggccccccccaccccggcatgcccatgagcgccagcagccccaccgtgctgaacaccggcgaccccaccatgagcggccaggtgatggacatccacgcccagtag

SEQ ID NO: 278852 - DNA, 1398 bp, Artificial Sequence
  derived and/or modified sequence
atggcccagagatacgacgacctgccccactacggcggcatggacggcgtgggcatccccagcaccatgtacggcgacccccacgccgccagaagcatgcagcccgtgcaccacctgaaccacggcccccccctgcacagccaccagtacccccacaccgcccacaccaacgccatggcccccagcatgggcagcagcgtgaacgacgccctgaagagagacaaggacgccatctacggccaccccctgttccccctgctggccctgatcttcgagaagtgcgagctggccacctgcacccccagagagcccggcgtggccggcggcgacgtgtgcagcagcgagagcttcaacgaggacatcgccgtgttcgccaagcagatcagagccgagaagcccctgttcagcagcaaccccgagctggacaacctgatgatccaggccatccaggtgctgagattccacctgctggagctggagaaggtgcacgagctgtgcgacaacttctgccacagatacatcagctgcctgaagggcaagatgcccatcgacctggtgatcgacgacagagagggcggcagcaagagcgacagcgaggacatcaccagaagcgccaacctgaccgaccagcccagctggaacagagaccacgacgacaccgccagcaccagaagcggcggcacccccggccccagcagcggcggccacaccagccacagcggcgacaacagcagcgagcagggcgacggcctggacaacagcgtggccagccccagcaccggcgacgacgacgaccccgacaaggacaagaagagacacaagaagagaggcatcttccccaaggtggccaccaacatcatgagagcctggctgttccagcacctgacccacccctaccccagcgaggagcagaagaagcagctggcccaggacaccggcctgaccatcctgcaggtgaacaactggttcatcaacgccagaagaagaatcgtgcagcccatgatcgaccagagcaacagagccgtgagccagggcaccccctacaaccccgacggccagcccatgggcggcttcgtgatggacggccagcagcacatgggcatcagagcccccggcctgcagagcatgcccggcgagtacgtggccagaggcggccccatgggcgtgagcatgggccagcccagctacacccagccccagatgcccccccaccccgcccagctgagacacggcccccccatgcacacctacatccccggccacccccaccaccccaccgtgatgatgcacggcggccccccccaccccggcatgcccatgagcgccagcagccccaccgtgctgaacaccggcgaccccaccatgagcggccaggtgatggacatccacgcccagtag

SEQ ID NO: 278853 - protein, 253 aa, Artificial Sequence
  derived and/or modified sequence
MIQAIQVLRFHLLELEKVHELCDNFCHRYISCLKGKMPIDLVIDDREGGSKSDSEDITRSANLTDQPSWNRDHDDTASTRSGGTPGPSSGGHTSHSGDNSSEQGDGLDNSVASPSTGDDDDPDKDKKRHKKRGIFPKVATNIMRAWLFQHLTHPYPSEEQKKQLAQDTGLTILQVNNWFINARRRIVQPMIDQSNRAVSQGTPYNPDGQPMGGFVMDGQQHMGIRAPGPMSGMGMNMGPPCIRTFLDTLTTQQ

SEQ ID NO: 278854 - protein, 220 aa, Artificial Sequence
  derived and/or modified sequence
MQPVHHLNHGPPLHSHQYPHTAHTNAMAPSMGSSVNDALKRDKDAIYGHPLFPLLALIFEKCELATCTPREPGVAGGDVCSSESFNEDIAVFAKQIRAEKPLFSSNPELDNLMIQAIQVLRFHLLELEKVHELCDNFCHRYISCLKGKMPIDLVIDDREGGSKSDSEDITRSANLTDQPSWNRDHDDTASTRSGGTPGPSSGGHTSHSGDNSSEQAPLPF

SEQ ID NO: 278855 - DNA, 579 bp, Artificial Sequence
  derived and/or modified sequence
acagatcatagcggaatcagaatttccagcaaggaaaatcttttcatggtgaattaagtggtggatgaagaaaaatggtgatgaaaaaagccctcttggaacagagatcatgatgacacggcatctactcgttcaggaggaaccccaggcccttccagcggtggccacacgtcacacagtggggacaacagcagtgagcaagcacccttacccttctgaagaacagaaaaagcagttggcacaagacacgggactcaccatccttcaagtgaacaattggtttattaatgcccggagaagaatagtgcagcccatgatagaccagtccaaccgagcagtaagtcaaggaacaccttataatcctgatggacagcccatgggaggtttcgtaatggacggtcagcaacatatgggaattagagcaccaggacctatgagtggaatgggcatgaatatgggcatggaggggcagtggcactacatgtaaccttcatctagttaaccaatcgcaaagcaagggggaaggctgcaaagtatgccaggggagtatgtagcccggggtggtccaatgggtgtgag

SEQ ID NO: 278856 - DNA, 1913 bp, Artificial Sequence
  derived and/or modified sequence
gttgacagtcggccccacggccatggacgtcctttccccaagttagctgagcgcctgccaccgagatcccccgagcctgggcttcgcgcggccgcctaggaggaacccgcaggaaccagccctccccaactctccgcccggcgcctttctcctccaccggatcctggatgtgcagtggaggggacgagggcttgtcgggtgggaaacttaattcaaaatggctgctggaaacgcttgggttttattcgtagcaaatgttgccaatttctccggccagatacgctaaaccgatcctcagataccgtccatggctcagggcctccgacttcagggctccaggaggaaggggagacaccccctcttccctctcttagcactgatttttgagaaatgtgaattagctacttgtaccccccgcgagccgggggtggcgggcggggacgtctgctcgtcagagtcattcaatgaagatatagccgtgttcgccaaacagattcgcgcagaaaaacctctattttcttctaatccagaactggataacttgatgattcaagccatacaagtattaaggtttcatctattggaattagagaaggtacacgaattatgtgacaatttctgccaccggtatattagctgtttgaaagggaaaatgcctatcgatttggtgatagacgatagagaaggaggatcaaaatcagacagtgaagatataacaagatcagcaaatctaactgaccagccctcttggaacagagatcatgatgacacggcatctactcgttcaggaggaaccccaggcccttccagcggtggccacacgtcacacagtggggacaacagcagtgagcaaggtgatggcttggacaacagtgtagcttcccccagcacaggtgacgatgatgaccctgataaggacaaaaagcgtcacaaaaagcgtggcatctttcccaaagtagccacaaatatcatgagggcgtggctgttccagcatctaacacacccttacccttctgaagaacagaaaaagcagttggcacaagacacgggactcaccatccttcaagtgaacaattggtttattaatgcccggagaagaatagtgcagcccatgatagaccagtccaaccgagcagtaagtcaaggaacaccttataatcctgatggacagcccatgggaggtttcgtaatggacggtcagcaacatatgggaattagagcaccaggacctatgagtggaatgggcatgaatatgggcatggaggggcagtggcactacatgtaaccttcatctagttaaccaatcgcaaagcaagggggaaggctgcaaagtatgccaggggagtatgtagcccggggtggtccaatgggtgtgagtatgggacagccaagttatacccaaccccagatgcccccccatcctgctcagctgcgtcatgggccccccatgcatacgtacattcctggacaccctcaccacccaacagtgatgatgcatggaggaccgccccaccctggaatgccaatgtcagcatcaagccccacagttcttaatacaggagacccaacaatgagtggacaagtcatggacattcatgctcagtagcttaagggaatatgcattgtctgcaatggtgactgatttcaaatcatgttttttctgcaatgactgtggagttccattcttggcatctactctggaccaaggagcatccctaattcttcatagggacctttaaaaagcaggaaataccaactgaagtcaatttgggggacatgctaaataactatataagacattaagagaacaaagagtgaaatattgtaaatgctattatactgttatccatattacgttgtttcttatagattttttaaaaaaaatgtgaaatttttccacactatgtgtgttg

SEQ ID NO: 278857 - protein, 140 aa, Artificial Sequence
  derived and/or modified sequence
MKKNGDEKSPLGTEIMMTRHLLVQEEPQALPAVATRHTVGTTAVSKHPYPSEEQKKQLAQDTGLTILQVNNWFINARRRIVQPMIDQSNRAVSQGTPYNPDGQPMGGFVMDGQQHMGIRAPGPMSGMGMNMGMEGQWHYM

SEQ ID NO: 278858 - protein, 179 aa, Artificial Sequence
  derived and/or modified sequence
MKSLLTFYKCGSELLPAAVWSAGGSPSLFSDLKSKKGKKFSRDHIEVTISNCGVNGNAKGDGLDNSVASPSTGDDDDPDKDKKRHKKRGIFPKVATNIMRAWLFQHLTHPYPSEEQKKQLAQDTGLTILQVNNWFINARRRIVQPMIDQSNRAVSQGTPYNPDGQPMGGFVMDGQQHMG

SEQ ID NO: 278859 - protein, 325 aa, Artificial Sequence
  derived and/or modified sequence
MAQGLRLQGSRRKGRHPLFPLLALIFEKCELATCTPREPGVAGGDVCSSESFNEDIAVFAKQIRAEKPLFSSNPELDNLMIQAIQVLRFHLLELEKVHELCDNFCHRYISCLKGKMPIDLVIDDREGGSKSDSEDITRSANLTDQPSWNRDHDDTASTRSGGTPGPSSGGHTSHSGDNSSEQGDGLDNSVASPSTGDDDDPDKDKKRHKKRGIFPKVATNIMRAWLFQHLTHPYPSEEQKKQLAQDTGLTILQVNNWFINARRRIVQPMIDQSNRAVSQGTPYNPDGQPMGGFVMDGQQHMGIRAPGPMSGMGMNMGMEGQWHYM

SEQ ID NO: 278860 - DNA, 762 bp, Artificial Sequence
  derived and/or modified sequence
atgattcaggcgattcaagtgctgcggttccatctgctggagctcgagaaagtacatgagctgtgtgataacttctgccataggtatatttcatgcttaaaaggcaagatgccgatagacttggtgatagacgaccgcgagggaggcagcaaatctgacagtgaggatatcaccagatccgcaaatctgacggaccagccctcgtggaatcgggaccatgacgacaccgcctccacccgctctggtggcactcccgggcctagctccggaggccacacaagccactctggcgataatagttctgagcagggcgacggtttggacaattctgtagcatctccgagcacgggcgacgatgacgaccctgataaagataagaagcgccataaaaaacgcgggatttttcctaaagtcgcaacaaatataatgcgcgcatggctgttccagcatctgacccacccatatccatctgaggaacaaaaaaaacaactggcccaggataccggtctgactatactgcaggtgaataattggttcataaacgcccgccgccgtattgttcaacctatgattgatcaatctaatagagccgttagtcaaggaacaccttataaccctgacgggcagcctatgggaggattcgtcatggacggccaacagcacatgggtattagagcacccggtcccatgagtggaatgggtatgaatatggggccgccgtgtatacgaactttcctggatacattaactactcaacaatag

SEQ ID NO: 278861 - DNA, 423 bp, Artificial Sequence
  derived and/or modified sequence
atgaaaaaaaatggggacgaaaaatcccctttgggtacggagattatgatgacacgccatcttctggttcaagaagagccccaagcgctccccgctgtggcgacacggcataccgttgggaccacggctgtcagcaagcatccttacccaagtgaggaacagaagaagcagttggcccaagataccggactcaccatccttcaagttaataattggttcattaatgccaggaggagaattgtccagcctatgatcgatcagagcaatagggccgtgagccagggtaccccctataatcccgatggacagccaatgggaggatttgtcatggatggccagcagcatatgggaatcagagcgcctggcccaatgtccggaatgggaatgaatatgggcatggagggacaatggcactatatgtag

SEQ ID NO: 278862 - DNA, 540 bp, Artificial Sequence
  derived and/or modified sequence
atgaaaagcctactcaccttttacaagtgcgggtctgaactgttgcctgcagccgtgtggtccgccgggggctcaccatccttgtttagcgacctcaaatccaagaagggaaagaagtttagcagggaccatattgaggtgacaattagcaactgcggtgtgaatgggaatgcaaaaggggacggcttggacaacagcgtggcctcacccagcacaggcgatgacgacgatcctgacaaggacaagaagcgccacaaaaagagagggatctttcccaaggtagccacaaacattatgcgggcttggctctttcaacatctaactcacccatatccctcagaggagcagaaaaaacagcttgcacaggataccggactcactattctacaagtaaataactggttcattaacgcccgcaggcggatcgtccagcccatgattgatcaaagtaatcgagccgtgtctcagggcacgccctataatccagacggccaaccaatgggcggctttgttatggacgggcaacagcatatggggtag

SEQ ID NO: 278863 - DNA, 978 bp, Artificial Sequence
  derived and/or modified sequence
atggcccaggggctgcgtctgcaaggctcccgccgcaaagggcgacacccgctctttccactgctggcactgatcttcgaaaagtgcgagctcgctacatgtactccccgcgaaccgggcgtggccgggggcgatgtttgctccagtgaaagctttaatgaggacatagctgttttcgctaaacagatcagggctgaaaagccgctatttagcagcaacccagagctggacaacctcatgatccaggcgatccaggtgctgaggtttcatctactcgaactcgagaaggtgcacgagttgtgcgacaacttttgccatcgatacatcagctgcctgaagggcaagatgcctattgatctggtgatcgacgatcgagaaggcggaagtaagtccgactcggaggatatcacacgtagcgcaaatcttaccgaccaaccctcctggaatagagaccacgacgacacagcaagtactcggagcggcgggacccccggaccctcatcaggagggcatacttcacactcgggggacaactcaagtgaacaaggcgatggcctggacaatagcgtggcgtctccatccaccggggacgatgacgatcctgataaagacaaaaagcgccacaaaaaaagaggaatcttccccaaggtggccacaaatatcatgcgcgcttggttattccaacacttgacacatccataccccagcgaagagcaaaagaaacagcttgcacaggacactggcctgacaatcttacaggtgaacaactggttcattaatgcaagacgccgtatcgtgcagcctatgattgatcaatctaacagggccgtatcccagggcaccccctacaatccggacggccagccaatggggggcttcgtaatggacggtcagcagcacatgggcatcagggcccctggtcctatgtctggcatgggtatgaacatggggatggagggccaatggcactatatgtag

SEQ ID NO: 278864 - DNA, 762 bp, Artificial Sequence
  derived and/or modified sequence
atgatccaggccatccaggtgctgcgcttccacctgctggagctggagaaggtgcatgagctgtgtgacaacttctgccaccgctacatcagctgcctgaagggcaagatgcccatcgacctggtgattgatgaccgggagggcggcagcaagagtgacagcgaggacatcaccaggtctgccaacctgacagaccagcccagctggaacagagaccatgatgacacagccagcaccaggtctgggggcaccccaggccccagcagcggcggccacaccagccacagcggggacaacagcagcgagcagggagatggcctggacaacagcgtggccagccccagcactggagatgatgatgatcctgacaaggacaagaagaggcacaagaagaggggcatcttccccaaggtggccaccaacatcatgagggcctggctgttccagcacctgacccacccctaccccagcgaggagcagaagaagcagctggcccaggacaccggcctgaccatcctgcaggtgaacaactggttcatcaatgcccggcggcgcatcgtgcagcccatgattgaccagagcaacagagctgtgtcccagggcaccccctacaacccagatggccagcccatgggcggctttgtgatggatggccagcagcacatgggcatccgggcccctggccccatgagcggcatgggcatgaacatgggccccccctgcatccgcaccttcctggacaccctgaccacccagcagtag

SEQ ID NO: 278865 - DNA, 423 bp, Artificial Sequence
  derived and/or modified sequence
atgaagaagaatggagatgagaagagccccctgggcacagagatcatgatgaccaggcacctgctggtgcaggaggagccccaggccctgcctgctgtggccaccaggcacacagtgggcaccacagctgtgtccaagcacccctaccccagcgaggagcagaagaagcagctggcccaggacaccggcctgaccatcctgcaggtgaacaactggttcatcaatgcccggcggcgcatcgtgcagcccatgattgaccagagcaacagagctgtgtcccagggcaccccctacaacccagatggccagcccatgggcggctttgtgatggatggccagcagcacatgggcatccgggcccctggccccatgagcggcatgggcatgaacatgggcatggagggccagtggcactacatgtag

SEQ ID NO: 278866 - DNA, 540 bp, Artificial Sequence
  derived and/or modified sequence
atgaagagcctgctgaccttctacaagtgtggcagcgagctgctgcctgctgctgtgtggagcgctgggggcagccccagcctcttcagtgacctgaagagcaagaagggcaagaagttcagccgggaccacatcgaggtgaccatcagcaactgtggggtgaatggaaatgccaagggagatggcctggacaacagcgtggccagccccagcactggagatgatgatgatcctgacaaggacaagaagaggcacaagaagaggggcatcttccccaaggtggccaccaacatcatgagggcctggctgttccagcacctgacccacccctaccccagcgaggagcagaagaagcagctggcccaggacaccggcctgaccatcctgcaggtgaacaactggttcatcaatgcccggcggcgcatcgtgcagcccatgattgaccagagcaacagagctgtgtcccagggcaccccctacaacccagatggccagcccatgggcggctttgtgatggatggccagcagcacatgggctag

SEQ ID NO: 278867 - DNA, 978 bp, Artificial Sequence
  derived and/or modified sequence
atggcccagggcctgcggctgcagggcagcaggaggaagggccgccaccccctcttccccctgctggccctgatctttgagaagtgtgagctggccacctgcaccccccgggagcccggggtggccggaggagatgtgtgcagcagcgagagcttcaatgaagatattgctgtgtttgccaagcagatccgggcagagaagcccctcttcagcagcaaccctgagctggacaacctgatgatccaggccatccaggtgctgcgcttccacctgctggagctggagaaggtgcatgagctgtgtgacaacttctgccaccgctacatcagctgcctgaagggcaagatgcccatcgacctggtgattgatgaccgggagggcggcagcaagagtgacagcgaggacatcaccaggtctgccaacctgacagaccagcccagctggaacagagaccatgatgacacagccagcaccaggtctgggggcaccccaggccccagcagcggcggccacaccagccacagcggggacaacagcagcgagcagggagatggcctggacaacagcgtggccagccccagcactggagatgatgatgatcctgacaaggacaagaagaggcacaagaagaggggcatcttccccaaggtggccaccaacatcatgagggcctggctgttccagcacctgacccacccctaccccagcgaggagcagaagaagcagctggcccaggacaccggcctgaccatcctgcaggtgaacaactggttcatcaatgccaggagaagaattgtgcagcccatgattgaccagagcaacagagctgtgtcccagggcaccccctacaacccagatggccagcccatgggcggctttgtgatggatggccagcagcacatgggcatccgggcccctggccccatgagcggcatgggcatgaacatgggcatggagggccagtggcactacatgtag

SEQ ID NO: 278868 - DNA, 2373 bp, Artificial Sequence
  derived and/or modified sequence
aagccatgcatgttacctccaacctcagattttctctctgtctgagtgtctgtttgcagataacttaaaatcacccatctgcatccccactcaccctccagaaagcaaacgtggagagctcactctgcagaataaaatcaagaacaccacggttgtagctgctgtggactcggcggtctgagcagcctccccgagagccgtagttgctagtagaaattcgcgcagaaaaacctctattttcttctaatccagaactggataacttgatgattcaagccatacaagtattaaggtttcatctattggaattagagaaggtacacgaattatgtgacaatttctgccaccggtatattagctgtttgaaagggaaaatgcctatcgatttggtgatagacgatagagaaggaggatcaaaatcagacagtgaagatataacaagatcagcaaatctaactgaccagccctcttggaacagagatcatgatgacacggcatctactcgttcaggaggaaccccaggcccttccagcggtggccacacgtcacacagtggggacaacagcagtgagcaaggtgatggcttggacaacagtgtagcttcccccagcacaggtgacgatgatgaccctgataaggacaaaaagcgtcacaaaaagcgtggcatctttcccaaagtagccacaaatatcatgagggcgtggctgttccagcatctaacacacccttacccttctgaagaacagaaaaagcagttggcacaagacacgggactcaccatccttcaagtgaacaattggtttattaatgcccggagaagaatagtgcagcccatgatagaccagtccaaccgagcagtaagtcaaggaacaccttataatcctgatggacagcccatgggaggtttcgtaatggacggtcagcaacatatgggaattagagcaccaggacctatgagtggaatgggcatgaatatgggccccccatgcatacgtacattcctggacaccctcaccacccaacagtgatgatgcatggaggaccgccccaccctggaatgccaatgtcagcatcaagccccacagttcttaatacaggagacccaacaatgagtggacaagtcatggacattcatgctcagtagcttaagggaatatgcattgtctgcaatggtgactgatttcaaatcatgttttttctgcaatgactgtggagttccattcttggcatctactctggaccaaggagcatccctaattcttcatagggacctttaaaaagcaggaaataccaactgaagtcaatttgggggacatgctaaataactatataagacattaagagaacaaagagtgaaatattgtaaatgctattatactgttatccatattacgttgtttcttatagattttttaaaaaaaatgtgaaatttttccacactatgtgtgttgtttccatagctcttcacttcctccagaagcctccttacattaaaaagccttacagttatcctgcaagggacaggaaggtctgatttgcaggatttttagagcattaaaataactatcaggcagaagaatctttcttctcgcctaggatttcagccatgcgcgcgctctctctctttctctctcttttcctctctctccctctttctagcctggggcttgaatttgcatgtctaattcatttactcaccatatttgaattggcctgaacagatgtaaatcgggaaggatgggaaaaactgcagtcatcaacaatgattaatcagctgttgcaggcagtgtcttaaggagactggtaggaggaggcatggaaaccaaaaggccgtgtgtttagaagcctaattgtcacatcaagcatcattgtccccatgcaacaaccaccaccttatacatcacttcctgttttaagcagctctaaaacatagactgaagatttatttttaatatgttgactttatttctgagcaaagcatcggtcatgtgtgtattttttcatagtcccaccttggagcatttatgtagacattgtaaataaattttgtgcaaaaaggactggaaaaatgaactgtattattgcaatttttttttgtaaaagtagcagtttggtatgagttggcatgcatacaagatttactaagtgggataagctaattatactttttgttgtggataaacaaatgcttgttgatagcctttttctatcaagaaaccaaggagctaattattaataacaatcattgcacactgagtcttagcgtttctgatggaaacagtttggattgtataataacgccaagcccagttgtagtcgtttgagtgcagtaatgaaatctgaatctaaaataaaaacaagattatttttgtc

SEQ ID NO: 278869 - DNA, 558 bp, Artificial Sequence
  derived and/or modified sequence
ggagaagtcagctccaggaatgaagtcactgctgacattttacaaatgtggttcagagctgctgcctgctgccgtgtggtcggccggcggttctccaagtttgtttagtgatctcaaaagtaaaaaaggaaagaaattctcgagagaccacattgaggtgactatatcaaattgcggagtgaatggaaatgctaaaggtgatggcttggacaacagtgtagcttcccccagcacaggtgacgatgatgaccctgataaggacaaaaagcgtcacaaaaagcgtggcatctttcccaaagtagccacaaatatcatgagggcgtggctgttccagcatctaacacacccttacccttctgaagaacagaaaaagcagttggcacaagacacgggactcaccatccttcaagtgaacaattggtttattaatgcccggagaagaatagtgcagcccatgatagaccagtccaaccgagcagtaagtcaaggaacaccttataatcctgatggacagcccatgggaggtttcgtaatggacggtcagcaacatatgggaat

SEQ ID NO: 278870 - DNA, 762 bp, Artificial Sequence
  derived and/or modified sequence
atgatccaggccatccaggtgctgcggttccacctgctggagctggaaaaggtgcacgagctgtgcgacaacttttgtcacagatacatatcgtgccttaaaggaaaaatgcccatcgatttagtcatcgacgacagggaaggggggagtaagtccgattctgaggacattaccaggtcggcaaacctgaccgatcagccaagctggaatcgcgatcatgacgacacggcctcaacccgttctggcggcaccccaggaccctccagcggcggacacacaagccactcaggagataactcaagcgagcagggggacggactcgataatagcgtggcctccccgagcactggcgatgatgatgatcccgataaggacaagaagaggcataagaagagaggcatcttcccgaaggtggcaacaaatatcatgcgcgcctggttgttccaacacctgactcacccctatccttctgaggaacagaaaaagcagctggcccaagatactggtctaacaatactgcaggtgaataactggttcataaatgccagaagacgcattgtgcagccgatgattgatcagtcaaatcgggctgtctcacaggggacaccctataatcccgatggccagccgatgggggggtttgtgatggatggccagcagcacatgggcatcagagctccaggccccatgtctggaatgggcatgaatatgggccctccttgcatccggacattcctcgacacgctgactacccagcagtag

SEQ ID NO: 278871 - DNA, 423 bp, Artificial Sequence
  derived and/or modified sequence
atgaagaagaacggcgacgagaagagccccctgggcaccgagatcatgatgacaagacatctgttggtgcaggaggagccccaagctttgcctgctgtggccactaggcacacggttgggaccactgccgtttcaaaacacccttatccttccgaggaacaaaagaagcaactggctcaggacactggactaacgatactgcaagtcaacaactggtttattaacgcaaggaggagaattgtgcagcctatgatagatcagtctaacagggctgttagccaaggtacgccttataatccggacggacagccaatggggggcttcgtgatggatgggcagcagcacatgggaattagagcgcccggaccaatgagtggtatgggcatgaacatgggtatggagggccagtggcattacatgtag

SEQ ID NO: 278872 - DNA, 540 bp, Artificial Sequence
  derived and/or modified sequence
atgaagagcctgctgaccttctacaagtgcggcagcgagctgctgccagctgcagtgtggtccgcaggggggagtccctccctgttcagtgacctgaagagtaagaagggcaagaaattcagccgggatcacatagaggttacaatttccaactgtggcgtaaacggaaacgcgaaaggagacggcctggacaacagcgtagcgtcgccatcgacaggcgacgatgacgatcccgataaagacaaaaagcgtcacaaaaagaggggcatattcccaaaggttgccaccaatatcatgagggcatggctcttccagcacctgacacacccctaccccagtgaagagcagaagaaacagctagctcaggatacgggactgaccatcctgcaggttaacaactggttcatcaatgcccgccgtcggattgtccagccaatgatcgatcagagcaatcgcgcagtgtcccaggggacaccatataaccccgacggacaacccatgggcggattcgtcatggacggccagcagcatatgggctag

SEQ ID NO: 278873 - DNA, 978 bp, Artificial Sequence
  derived and/or modified sequence
atggcccagggcctgcggctgcagggcagccggcggaagggccggcaccctctgtttccgctcctcgctctgattttcgaaaaatgcgagctagcaacctgtaccccaagggagccgggtgtggcagggggagacgtgtgctcctccgaatccttcaacgaggacattgcagtatttgccaaacagatcagagctgaaaaaccactgttttccagcaaccccgagctcgacaatcttatgatacaggctattcaggtcttgcggtttcatctgctagaactagagaaggttcatgaattatgtgacaacttttgccatcggtacatctcttgcctgaaagggaaaatgcccatagatctcgtgatcgacgatagagagggaggttccaagagcgattcagaggatattaccagatctgctaatctgactgatcagcccagctggaatcgggaccacgacgacacagcatccactcgctcgggaggcacaccaggcccatcgagcggcggacatacaagtcactcaggagacaacagtagcgagcagggagatggccttgacaactcagttgcaagcccttccacaggtgatgacgacgatccagataaagacaaaaagaggcacaagaaaagaggcatcttcccaaaagtggcaaccaacatcatgcgcgcctggttgttccagcatttgacccacccgtacccctccgaggagcagaaaaaacaattagctcaggataccggcctgaccatcttgcaggtgaataactggtttatcaacgcccgacgacgtattgttcagcccatgatcgaccagtctaaccgggcagtttcgcaggggaccccatacaacccggatggccagcccatgggtggatttgttatggacggccagcagcacatgggcataagagcgcctgggcccatgagtgggatggggatgaatatgggaatggagggtcaatggcactacatgtag

SEQ ID NO: 278874 - DNA, 762 bp, Artificial Sequence
  derived and/or modified sequence
atgattcaagcgatccaagtgttgagattccatctgctcgaactggagaaagtacacgaactgtgcgacaacttttgccaccgatacatttcctgtctgaaaggaaagatgccgatcgacctggtcattgacgacagggaggggggatctaaatcagactcagaagacattactaggagcgccaatctcacggaccagcccagttggaatcgggaccacgacgatactgcaagtactcggtcaggcggaacacccggaccttcttcgggagggcacacatctcacagtggagacaacagctccgaacagggcgacggattagataatagtgtggcctccccttccactggggacgacgacgatcccgataaagacaaaaagagacacaagaagcgcggaatattccccaaggtggctactaatattatgcgtgcttggctcttccaacacctaactcacccctacccaagtgaggaacagaaaaaacagttggcgcaagacaccggcctcaccatcctccaggttaataattggtttatcaatgcaaggcgccgtatcgtccagcctatgatcgatcagtctaaccgcgcagtatctcaggggaccccttataatcctgatgggcagcctatggggggattcgttatggatgggcagcagcacatggggatacgggcaccgggtccaatgagtggtatgggtatgaatatgggcccaccatgtatcagaacgttcctggataccctgacgacgcaacaatag

SEQ ID NO: 278875 - DNA, 423 bp, Artificial Sequence
  derived and/or modified sequence
atgaagaagaacggtgacgagaagtcacctctggggacagagatcatgatgactaggcacctcttggttcaagaagaacctcaggctcttcctgctgtggccacccggcacaccgtgggtaccacagcggtatctaagcacccttatccatctgaggagcagaagaagcaacttgcccaggacaccggactcaccatccttcaggtgaacaattggttcataaacgctcgacggaggattgtccagcccatgatagaccagtccaatcgggcagtctctcaaggcacaccttataatccagacggtcaaccaatgggaggctttgtgatggacgggcaacagcacatgggcattcgtgcaccaggccctatgagtggcatgggaatgaatatgggtatggaaggccagtggcattacatgtag

SEQ ID NO: 278876 - DNA, 540 bp, Artificial Sequence
  derived and/or modified sequence
atgaagtcactcctgactttctacaagtgtggatccgagctcctccctgcagctgtgtggagtgctggtgggtctccatcactgttcagcgacctgaagtccaagaagggaaagaaattctctagagatcacatcgaagtcaccatcagcaactgcggcgtaaatggcaacgcgaagggcgatggactcgataatagcgtagcatccccttctaccggtgatgacgacgatccggataaagataagaagcggcataaaaagcgtggcattttcccgaaagttgctaccaatattatgcgcgcatggctctttcagcatctcacccacccgtacccctcggaggagcagaagaaacagctagctcaggatacaggattgaccatattgcaggtgaacaactggtttataaacgccagacggaggatcgtgcaaccaatgattgatcagagtaaccgagcggtgagccagggaactccttataatcccgatggacagccgatgggcggtttcgtcatggacggtcagcagcacatggggtag

SEQ ID NO: 278877 - DNA, 978 bp, Artificial Sequence
  derived and/or modified sequence
atggcccaaggactccgtctacaaggtagccgtcggaaaggtagacaccctttatttccactgctggccctgatctttgagaaatgtgaactagccacgtgtactcctagggaaccaggagtggccggtggagatgtatgctctagcgagtccttcaatgaggacatcgccgtcttcgctaaacagatcagagcagagaaacccctattttcatccaacccggagttggacaatttaatgattcaggcaatccaggtgctccgatttcatcttcttgagctcgaaaaagttcacgagttgtgtgacaatttttgtcaccgctacatttcctgtctgaaaggtaagatgccgattgatcttgtaatcgacgaccgagaaggaggatcaaagtccgattccgaggacatcactcggagtgctaacctgaccgaccaaccttcctggaatagggaccatgacgacacagcatctacacgctcggggggaacaccaggaccctcttcagggggtcacacttctcattccggtgacaattcaagcgagcagggcgatggcctcgacaactcagtcgctagcccctctacaggcgacgatgatgaccctgataaggataagaagcgccataaaaagcgtggaatttttccaaaggtggcgaccaacattatgcgcgcatggctgttccagcacctgacacatccctatcctagcgaagagcagaagaagcaactggctcaggataccggtctgactatcctccaagtgaacaactggtttattaatgcccgacgacgcatcgtgcagccgatgattgatcagtctaaccgagcagtttcgcagggaacaccctacaacccggatgggcagccaatgggcggattcgtcatggacgggcagcagcacatgggaatcagagcccctggccctatgtctgggatggggatgaatatgggaatggaggggcagtggcactatatgtag

SEQ ID NO: 278878 - DNA, 762 bp, Artificial Sequence
  derived and/or modified sequence
atgatccaggccatccaggtgctgagattccacctgctggagctggagaaggtgcacgagctgtgcgacaacttctgccacagatacatcagctgcctgaagggcaagatgcccatcgacctggtgatcgacgacagagagggcggcagcaagagcgacagcgaggacatcaccagaagcgccaacctgaccgaccagcccagctggaacagagaccacgacgacaccgccagcaccagaagcggcggcacccccggccccagcagcggcggccacaccagccacagcggcgacaacagcagcgagcagggcgacggcctggacaacagcgtggccagccccagcaccggcgacgacgacgaccccgacaaggacaagaagagacacaagaagagaggcatcttccccaaggtggccaccaacatcatgagagcctggctgttccagcacctgacccacccctaccccagcgaggagcagaagaagcagctggcccaggacaccggcctgaccatcctgcaggtgaacaactggttcatcaacgccagaagaagaatcgtgcagcccatgatcgaccagagcaacagagccgtgagccagggcaccccctacaaccccgacggccagcccatgggcggcttcgtgatggacggccagcagcacatgggcatcagagcccccggccccatgagcggcatgggcatgaacatgggccccccctgcatcagaaccttcctggacaccctgaccacccagcagtag

SEQ ID NO: 278879 - DNA, 423 bp, Artificial Sequence
  derived and/or modified sequence
atgaagaagaacggcgacgagaagagccccctgggcaccgagatcatgatgaccagacacctgctggtgcaggaggagccccaggccctgcccgccgtggccaccagacacaccgtgggcaccaccgccgtgagcaagcacccctaccccagcgaggagcagaagaagcagctggcccaggacaccggcctgaccatcctgcaggtgaacaactggttcatcaacgccagaagaagaatcgtgcagcccatgatcgaccagagcaacagagccgtgagccagggcaccccctacaaccccgacggccagcccatgggcggcttcgtgatggacggccagcagcacatgggcatcagagcccccggccccatgagcggcatgggcatgaacatgggcatggagggccagtggcactacatgtag

SEQ ID NO: 278880 - DNA, 540 bp, Artificial Sequence
  derived and/or modified sequence
atgaagagcctgctgaccttctacaagtgcggcagcgagctgctgcccgccgccgtgtggagcgccggcggcagccccagcctgttcagcgacctgaagagcaagaagggcaagaagttcagcagagaccacatcgaggtgaccatcagcaactgcggcgtgaacggcaacgccaagggcgacggcctggacaacagcgtggccagccccagcaccggcgacgacgacgaccccgacaaggacaagaagagacacaagaagagaggcatcttccccaaggtggccaccaacatcatgagagcctggctgttccagcacctgacccacccctaccccagcgaggagcagaagaagcagctggcccaggacaccggcctgaccatcctgcaggtgaacaactggttcatcaacgccagaagaagaatcgtgcagcccatgatcgaccagagcaacagagccgtgagccagggcaccccctacaaccccgacggccagcccatgggcggcttcgtgatggacggccagcagcacatgggctag

SEQ ID NO: 278881 - DNA, 978 bp, Artificial Sequence
  derived and/or modified sequence
atggcccagggcctgagactgcagggcagcagaagaaagggcagacaccccctgttccccctgctggccctgatcttcgagaagtgcgagctggccacctgcacccccagagagcccggcgtggccggcggcgacgtgtgcagcagcgagagcttcaacgaggacatcgccgtgttcgccaagcagatcagagccgagaagcccctgttcagcagcaaccccgagctggacaacctgatgatccaggccatccaggtgctgagattccacctgctggagctggagaaggtgcacgagctgtgcgacaacttctgccacagatacatcagctgcctgaagggcaagatgcccatcgacctggtgatcgacgacagagagggcggcagcaagagcgacagcgaggacatcaccagaagcgccaacctgaccgaccagcccagctggaacagagaccacgacgacaccgccagcaccagaagcggcggcacccccggccccagcagcggcggccacaccagccacagcggcgacaacagcagcgagcagggcgacggcctggacaacagcgtggccagccccagcaccggcgacgacgacgaccccgacaaggacaagaagagacacaagaagagaggcatcttccccaaggtggccaccaacatcatgagagcctggctgttccagcacctgacccacccctaccccagcgaggagcagaagaagcagctggcccaggacaccggcctgaccatcctgcaggtgaacaactggttcatcaacgccagaagaagaatcgtgcagcccatgatcgaccagagcaacagagccgtgagccagggcaccccctacaaccccgacggccagcccatgggcggcttcgtgatggacggccagcagcacatgggcatcagagcccccggccccatgagcggcatgggcatgaacatgggcatggagggccagtggcactacatgtag

SEQ ID NO: 278882 - protein, 176 aa, Artificial Sequence
  derived and/or modified sequence
MALWRAYQRALAAHPWKVQVLTAGSLMGLGDIISQQLVERRGLQEHQRGRTLTMVSLGCGFVGPVVGGWYKVLDRFIPGTTKVDALKKMLLDQGGFAPCFLGCFLPLVGALNGLSAQDNWAKLQRDYPDALITNYYLWPAVQLANFYLVPLHYRLAVVQCVAVIWNSYLSWKAHRL

SEQ ID NO: 278883 - protein, 170 aa, Artificial Sequence
  derived and/or modified sequence
MALWRAYQRALAAHPWKVQVLTAGSLMGLGDIISQQLVERRGLQEHQRGRTLTMVSLGCGFVGPVVGGWYKVLDRFIPGTTKVDALKKMLLDQGGFAPCFLGCFLPLVGALNGLSAQDNWAKLQRDYPDALITNYYVGRCPMCCCYLELLPVLEGTSALSLPHSIVSTLQ

SEQ ID NO: 278884 - protein, 113 aa, Artificial Sequence
  derived and/or modified sequence
MALWRAYQRALAAHPWKVQVLTAGSLMGLGDIISQQLVERRGLQEHQRGRTLTMVSLGCGFVDYPDALITNYYLWPAVQLANFYLVPLHYRLAVVQCVAVIWNSYLSWKAHRL

SEQ ID NO: 278885 - protein, 191 aa, Artificial Sequence
  derived and/or modified sequence
MALWRAYQRALAAHPWKVQVLTAAHPRRCPDNTCVPCIGSLMGLGDIISQQLVERRGLQEHQRGRTLTMVSLGCGFVGPVVGGWYKVLDRFIPGTTKVDALKKMLLDQGGFAPCFLGCFLPLVGALNGLSAQDNWAKLQRDYPDALITNYYLWPAVQLANFYLVPLHYRLAVVQCVAVIWNSYLSWKAHRL

SEQ ID NO: 278886 - DNA, 531 bp, Artificial Sequence
  derived and/or modified sequence
atggcattgtggcgtgcgtaccagcgagcccttgcagcgcatccttggaaggtgcaggtgctcaccgccggctcactgatgggtctcggggacatcatttctcagcagctggttgaaaggagagggttacaggaacaccagaggggacgtactctcactatggtttcactgggttgtggtttcgtggggcccgtggtggggggctggtacaaagtgcttgatcggttcatccctgggacaacaaaggtggacgcacttaagaaaatgctcctggatcaggggggctttgccccttgtttcctgggatgctttctgcccctcgtgggcgctctgaacgggctgtctgctcaggataactgggctaagctccaacgcgattaccctgatgccctaatcaccaattactacctgtggccagccgtacagctagctaatttttatctggtgcctttacactaccggctcgccgtggtccagtgtgttgccgtcatatggaatagttacctgtcctggaaagctcaccggctttag

SEQ ID NO: 278887 - DNA, 531 bp, Artificial Sequence
  derived and/or modified sequence
atggccctgtggagggcctaccagagggccctggccgcccacccctggaaggtgcaggtgctgacagctggcagcctgatgggcctgggggacatcatcagccagcagctggtggagcggcggggcctgcaggagcaccagaggggccgcaccctgaccatggtgtccctgggctgcggctttgtgggccctgtggtgggcggctggtacaaggtgctggaccgcttcatccctggcaccaccaaggtggatgccctgaagaagatgctgctggaccagggcggctttgccccctgcttcctgggctgcttcctgcccctggtgggcgccctgaatggcctgagcgcccaggacaactgggccaagctgcagagggactacccagatgccctgatcaccaactactacctgtggccagctgtgcagctggccaacttctacctggtgcccctgcactaccgcctggccgtggtgcagtgtgtggccgtcatctggaacagctacctgtcctggaaggcccaccggctgtag

SEQ ID NO: 278888 - DNA, 531 bp, Artificial Sequence
  derived and/or modified sequence
atggccctgtggcgggcctaccagcgggccctggccgcccacccctggaaggtgcaggtcttgactgctggatctttgatgggactgggagacatcatctcccagcagctagtagagagacgtggactccaggagcatcagagagggcgtacccttaccatggtctccctgggatgcggattcgttggtcctgtagtaggtgggtggtataaggttctagaccggtttatccccgggacaacaaaggttgacgctctgaaaaagatgctgttggaccaaggggggtttgcaccttgtttcctcggatgctttctgcctctggtgggggcactcaacggacttagcgctcaggacaactgggccaaacttcagagagattatcctgacgccctcattactaattattatctatggccggcagtgcaactcgccaatttttatcttgtcccactccattataggctggctgtggtgcaatgtgtcgccgtcatctggaatagctatctaagttggaaggcccatcggctctag

SEQ ID NO: 278889 - DNA, 531 bp, Artificial Sequence
  derived and/or modified sequence
atggctctctggagagcttaccagagagccctggccgcacacccttggaaagtgcaggtactgactgcaggtagcctgatggggttaggcgacattatctcccaacagctcgtggaacggcgtgggctgcaggagcaccaaagggggagaaccttaacgatggtgagtctcggctgtggtttcgtgggacccgtcgtgggaggatggtacaaagtcctggacaggtttatcccaggaactacaaaagtcgacgctctgaagaagatgctactggatcaggggggtttcgcgccatgtttcttaggctgctttctccccctggtgggcgcactgaacggcctatctgcccaggataactgggcgaagctgcagagagattaccccgacgctctgattactaattactacttatggcccgcagtccagcttgctaacttctacctcgtccccctacattaccgtctcgctgtggtccagtgcgtcgccgtgatttggaactcttacctgtcctggaaagctcaccggttgtag

SEQ ID NO: 278890 - DNA, 531 bp, Artificial Sequence
  derived and/or modified sequence
atggccctgtggagagcctaccagagagccctggccgcccacccctggaaggtgcaggtgctgaccgccggcagcctgatgggcctgggcgacatcatcagccagcagctggtggagagaagaggcctgcaggagcaccagagaggcagaaccctgaccatggtgagcctgggctgcggcttcgtgggccccgtggtgggcggctggtacaaggtgctggacagattcatccccggcaccaccaaggtggacgccctgaagaagatgctgctggaccagggcggcttcgccccctgcttcctgggctgcttcctgcccctggtgggcgccctgaacggcctgagcgcccaggacaactgggccaagctgcagagagactaccccgacgccctgatcaccaactactacctgtggcccgccgtgcagctggccaacttctacctggtgcccctgcactacagactggccgtggtgcagtgcgtggccgtgatctggaacagctacctgagctggaaggcccacagactgtag

SEQ ID NO: 278891 - DNA, 531 bp, Artificial Sequence
  derived and/or modified sequence
atggcgctctggagagcttatcagcgtgccctggccgcccatccctggaaggtgcaggtgctcacggctggaagtctaatgggtcttggcgacataatcagtcagcagctggtcgagcgacgcgggctccaggagcatcaacgcggacgcaccttgaccatggtgagccttggttgcggattcgtgggccctgtcgtgggcggttggtataaagtgctggatagattcattccaggaaccaccaaagtcgacgctcttaagaaaatgctactggatcaaggagggtttgctccctgctttctggggtgtttcctacccctggttggcgctctcaacggtctgagtgcccaagacaattgggccaagttacagcgcgactatcctgatgcactgattacaaactactatctgtggcctgccgtccagctggctaacttctatctggtgccactccattacaggctggccgtagtccaatgcgtggcagttatctggaattcatacctaagctggaaggcgcatagactgtag

SEQ ID NO: 278892 - DNA, 513 bp, Artificial Sequence
  derived and/or modified sequence
atggccctgtggcgggcctaccagcgcgcactggccgcccacccctggaaggtccaggtccttaccgccggcagcctcatggggctgggcgatattatatctcagcaactggtggagaggaggggactgcaagagcaccagcgcgggcggaccctcactatggtttccctcggttgtggtttcgtcggtcccgtcgtgggggggtggtacaaggtcctcgaccggttcattcccggcacaactaaggtcgacgctttaaagaagatgcttctggaccagggcggcttcgcgccctgcttcctgggttgcttcttaccacttgttggagccctaaacggccttagtgcccaggataattgggccaagctccagcgtgattatccggatgcacttattacaaattattatgtgggcagatgtcctatgtgttgctgctaccttgaattactaccagtgctggagggcacctcagctttgtctctgcctcatagcatcgtttcgacgctgcagtag

SEQ ID NO: 278893 - DNA, 342 bp, Artificial Sequence
  derived and/or modified sequence
atggcgttgtggcgggcttatcaacgggccttggcagcacacccttggaaggtccaagtccttacagccgggtcactgatggggcttggagatatcatttcccagcagctggtagagcgacggggcctgcaggaacaccagagaggcaggaccctgacaatggtgagcttgggatgcgggttcgtcgactaccccgatgctctcattaccaactactacttgtggcctgccgtccagctcgcaaatttctatctggtgccacttcattacagactggctgttgtgcaatgcgtggccgtgatatggaattcttacctgtcctggaaagctcatcgcctgtag

SEQ ID NO: 278894 - DNA, 576 bp, Artificial Sequence
  derived and/or modified sequence
atggccctctggcgggcctaccagcgagccctggctgcccacccgtggaaagtccaggttctgacagcagcccaccctcggagatgcccggataacacttgcgtgccatgtatcggatcacttatgggcctgggtgatatcatttctcaacaactggtggagagacggggactgcaggaacatcagcgtggaagaactttaactatggtttcactgggatgcggattcgtggggcccgtggtcggtggctggtataaagtgctggatcgtttcataccagggactactaaggttgatgcgctcaagaaaatgctgctggaccaggggggctttgcgccatgttttctaggctgtttccttccattggtgggtgcccttaatgggctgagtgcgcaggacaattgggcaaaactccagagggattatcccgatgcccttattactaattattatctgtggccagcagtgcagctcgcaaatttctacctggtcccactgcactaccgccttgcggtggtccagtgcgtggcagtgatatggaattcatacctgtcctggaaagcccatcgtctgtag

SEQ ID NO: 278895 - DNA, 513 bp, Artificial Sequence
  derived and/or modified sequence
atggccctgtggagggcctaccagagggccctggccgcccacccctggaaggtgcaggtgctgacagctggcagcctgatgggcctgggggacatcatcagccagcagctggtggagcggcggggcctgcaggagcaccagaggggccgcaccctgaccatggtgtccctgggctgcggctttgtgggccctgtggtgggcggctggtacaaggtgctggaccgcttcatccctggcaccaccaaggtggatgccctgaagaagatgctgctggaccagggcggctttgccccctgcttcctgggctgcttcctgcccctggtgggcgccctgaatggcctgagcgcccaggacaactgggccaagctgcagagggactacccagatgccctgatcaccaactactacgtgggccgctgccccatgtgctgctgctacctggagctgctgcctgtgctggagggcaccagcgccctgagcctgccccacagcatcgtgtccaccctgcagtag

SEQ ID NO: 278896 - DNA, 342 bp, Artificial Sequence
  derived and/or modified sequence
atggccctgtggagggcctaccagagggccctggccgcccacccctggaaggtgcaggtgctgacagctggcagcctgatgggcctgggggacatcatcagccagcagctggtggagcggcggggcctgcaggagcaccagaggggccgcaccctgaccatggtgtccctgggctgcggctttgtggactacccagatgccctgatcaccaactactacctgtggccagctgtgcagctggccaacttctacctggtgcccctgcactaccgcctggccgtggtgcagtgtgtggccgtcatctggaacagctacctgtcctggaaggcccaccggctgtag

SEQ ID NO: 278897 - DNA, 576 bp, Artificial Sequence
  derived and/or modified sequence
atggccctgtggagggcctaccagagggccctggccgcccacccctggaaggtgcaggtgctgacagctgcccacccccggcgctgcccagacaacacctgtgtgccctgcatcggcagcctgatgggcctgggggacatcatcagccagcagctggtggagcggcggggcctgcaggagcaccagaggggccgcaccctgaccatggtgtccctgggctgcggctttgtgggccctgtggtgggcggctggtacaaggtgctggaccgcttcatccctggcaccaccaaggtggatgccctgaagaagatgctgctggaccagggcggctttgccccctgcttcctgggctgcttcctgcccctggtgggcgccctgaatggcctgagcgcccaggacaactgggccaagctgcagagggactacccagatgccctgatcaccaactactacctgtggccagctgtgcagctggccaacttctacctggtgcccctgcactaccgcctggccgtggtgcagtgtgtggccgtcatctggaacagctacctgtcctggaaggcccaccggctgtag

SEQ ID NO: 278898 - DNA, 998 bp, Artificial Sequence
  derived and/or modified sequence
gagggacggtgggggtgaccccctctcctcttggcttgacaggaagcatggcactctggcgggcataccagcgggccctggccgctcacccgtggaaagtacaggtcctgacagctgggtccctgatgggcctgggtgacattatctcacagcagctggtggagaggcggggtctgcaggaacaccagagaggccggactctgaccatggtgtccctgggctgtggctttgtgggccctgtggtaggaggctggtacaaggttttggatcggttcatccctggcaccaccaaagtggatgcactgaagaagatgttgttggatcaggggggctttgccccgtgttttctaggctgctttctcccactggtaggggcacttaatggactgtcagcccaggacaactgggccaaactacagcgggattatcctgatgcccttatcaccaactactatctatggcctgctgtgcagttagccaacttctacctggtcccccttcattacaggttggccgttgtccaatgtgttgctgttatctggaactcctacctgtcctggaaggcacatcggctctaagcctgcctcactccatcgtttccaccttgcagtgatgcagcttgaccctggaacggtcagacaacctcctcaaagtgggcataccagtttccacggggttgggttgccggtcagagcttaagaggactagcaccctgcaatgcccctcttcactctaaaatgtacactgactgctttagagcccttgataatagtcttattcccaccacatactaggcactccataaatatctgttgaaccttcatgaccttatcaactttacacccatatcccagcaaatgccactcatccccactcttcatagacacatttgttactctaaccctgcctaggcttcttgtagctccagctctttagagactcccggaaccctttatatggtgcctcagtaaatatgttattaaatatgtaatccggaa

SEQ ID NO: 278899 - DNA, 1005 bp, Artificial Sequence
  derived and/or modified sequence
gcggaagttcctaggccagcctgtcacgtgggagggaggctcggcgctcaggaagcatggcactctggcgggcataccagcgggccctggccgctcacccgtggaaagtacaggtcctgacagctgggtccctgatgggcctgggtgacattatctcacagcagctggtggagaggcggggtctgcaggaacaccagagaggccggactctgaccatggtgtccctgggctgtggctttgtgggccctgtggtaggaggctggtacaaggttttggatcggttcatccctggcaccaccaaagtggatgcactgaagaagatgttgttggatcaggggggctttgccccgtgttttctaggctgctttctcccactggtaggggcacttaatggactgtcagcccaggacaactgggccaaactacagcgggattatcctgatgcccttatcaccaactactatctatggcctgctgtgcagttagccaacttctacctggtcccccttcattacaggttggccgttgtccaatgtgttgctgttatctggaactcctacctgtcctggaaggcacatcggctctaagcctgcctcactccatcgtttccaccttgcagtgatgcagcttgaccctggaacggtcagacaacctcctcaaagtgggcataccagtttccacggggttgggttgccggtcagagcttaagaggactagcaccctgcaatgcccctcttcactctaaaatgtacactgactgctttagagcccttgataatagtcttattcccaccacatactaggcactccataaatatctgttgaaccttcatgaccttatcaactttacacccatatcccagcaaatgccactcatccccactcttcatagacacatttgttactctaaccctgcctaggcttcttgtagctccagctctttagagactcccggaaccctttatatggtgcctcagtaaatatgttattaaatatgtaatccgg

SEQ ID NO: 278900 - DNA, 906 bp, Artificial Sequence
  derived and/or modified sequence
caggaagcatggcactctggcgggcataccagcgggccctggccgctcacccgtggaaagtacaggtcctgacagctgggtccctgatgggcctgggtgacattatctcacagcagctggtggagaggcggggtctgcaggaacaccagagaggccggactctgaccatggtgtccctgggctgtggctttgtgggccctgtggtaggaggctggtacaaggttttggatcggttcatccctggcaccaccaaagtggatgcactgaagaagatgttgttggatcaggggggctttgccccgtgttttctaggctgctttctcccactggtaggggcacttaatggactgtcagcccaggacaactgggccaaactacagcgggattatcctgatgcccttatcaccaactactatgttggccgttgtccaatgtgttgctgttatctggaactcctacctgtcctggaaggcacatcggctctaagcctgcctcactccatcgtttccaccttgcagtgatgcagcttgaccctggaacggtcagacaacctcctcaaagtgggcataccagtttccacggggttgggttgccggtcagagcttaagaggactagcaccctgcaatgcccctcttcactctaaaatgtacactgactgctttagagcccttgataatagtcttattcccaccacatactaggcactccataaatatctgttgaaccttcatgaccttatcaactttacacccatatcccagcaaatgccactcatccccactcttcatagacacatttgttactctaaccctgcctaggcttcttgtagctccagctctttagagactcccggaaccctttatatggtgcctcagtaaatatgttattaaatatgtaatccggaa

SEQ ID NO: 278901 - DNA, 603 bp, Artificial Sequence
  derived and/or modified sequence
gcggaagttcctaggccagcctgtcacgtgggagggaggctcggcgctcaggaagcatggcactctggcgggcataccagcgggccctggccgctcacccgtggaaagtacaggtcctgacagctgggtccctgatgggcctgggtgacattatctcacagcagctggtggagaggcggggtctgcaggaacaccagagaggccggactctgaccatggtgtccctgggctgtggctttgtggattatcctgatgcccttatcaccaactactatctatggcctgctgtgcagttagccaacttctacctggtcccccttcattacaggttggccgttgtccaatgtgttgctgttatctggaactcctacctgtcctggaaggcacatcggctctaagcctgcctcactccatcgtttccaccttgcagtgatgcagcttgaccctggaacggtcagacaacctcctcaaagtgggcataccagtttccacggggttgggttgccggtcagagcttaagaggactagcaccctgcaatgcccctcttcactctaaaatgtacactgactgctttagagcccttgataatagtcttattccca

SEQ ID NO: 278902 - DNA, 859 bp, Artificial Sequence
  derived and/or modified sequence
ctcggcgctcaggaagcatggcactctggcgggcataccagcgggccctggccgctcacccgtggaaagtacaggtcctgacagctgcccatcccaggagatgtcctgacaacacctgtgtaccctgcatagggtccctgatgggcctgggtgacattatctcacagcagctggtggagaggcggggtctgcaggaacaccagagaggccggactctgaccatggtgtccctgggctgtggctttgtgggccctgtggtaggaggctggtacaaggttttggatcggttcatccctggcaccaccaaagtggatgcactgaagaagatgttgttggatcaggggggctttgccccgtgttttctaggctgctttctcccactggtaggggcacttaatggactgtcagcccaggacaactgggccaaactacagcgggattatcctgatgcccttatcaccaactactatctatggcctgctgtgcagttagccaacttctacctggtcccccttcattacaggttggccgttgtccaatgtgttgctgttatctggaactcctacctgtcctggaaggcacatcggctctaagcctgcctcactccatcgtttccaccttgcagtgatgcagcttgaccctggaacggtcagacaacctcctcaaagtgggcataccagtttccacggggttgggttgccggtcagagcttaagaggactagcaccctgcaatgcccctcttcactctaaaatgtacactgactgctttagagcccttgataatagtcttattcccaccacatactaggcactccataaatatctgttgaaccttcatgaccttatcaactttacacc

SEQ ID NO: 278903 - DNA, 531 bp, Artificial Sequence
  derived and/or modified sequence
atggccctgtggcgggcctaccagcgggccctggccgcccacccctggaaagtgcaggttctaacggcggggtcgctgatgggactcggcgatattattagccagcagttagtggaaaggcgaggtctgcaggagcaccagcgcggtagaaccctgacaatggtcagtttaggctgcggctttgttggacccgtggtgggaggatggtacaaggtgttagacaggttcattcctggcacaactaaagtggacgccttgaagaaaatgctcctggaccagggaggctttgcgccatgtttcctgggatgcttcctgccattggtgggcgccctcaatggcctaagcgcccaggacaattgggctaagttacagagggattaccccgacgctctgataaccaattactacctctggccagcagtgcagctggccaatttctatttagtacccctgcactacagactggccgttgtgcagtgtgtggctgttatatggaactcctatttgagctggaaagcgcaccgcctctag

SEQ ID NO: 278904 - DNA, 513 bp, Artificial Sequence
  derived and/or modified sequence
atggccctgtggcgggcctaccagcgggccctggccgcccacccctggaaggtgcaggttctgacagcaggttccttaatgggacttggtgatataatctcacaacagttggtcgaacgacgcggtcttcaagagcatcagagaggccggacacttacaatggtatctcttggatgcggcttcgtgggccccgtggtgggtggatggtataaagttctggaccggttcatcccagggacaacaaaagtggacgctcttaaaaagatgctgctggaccagggtggctttgctccgtgtttcctgggctgtttcctgccgctggtgggcgcactcaacgggctgagcgcccaggataattgggctaagctgcaaagggattacccagatgcccttatcactaactattatgtgggcaggtgccccatgtgttgctgttacctcgagcttttgcctgtcctggaagggacatccgctttgtcactcccccatagtatcgtgagtactcttcagtag

SEQ ID NO: 278905 - DNA, 342 bp, Artificial Sequence
  derived and/or modified sequence
atggccctgtggcgggcctaccagcgggccctggccgcccacccctggaaggtgcaggttctcacagctgggtcactgatgggtttgggagacataatttcacagcaactggtggaaaggaggggtctacaagagcaccaaaggggacgcaccctcacaatggtcagcttaggatgcggcttcgtagactacccagatgccctgatcaccaactactacctgtggccagcagttcagctggctaacttctatctcgtgcctctgcattatcggcttgccgtggtccagtgcgtggctgtaatctggaatagctatctgagttggaaagcgcaccgactatag

SEQ ID NO: 278906 - DNA, 576 bp, Artificial Sequence
  derived and/or modified sequence
atggccctgtggcgggcctaccagcgggccctggccgcccacccctggaaggtgcaggtcttgactgccgcccacccaagacgatgccccgataatacatgcgtaccctgcattggaagtcttatggggctgggagacattattagtcagcagctcgtggagagacgtgggctgcaagagcatcagcgcggccggaccctgaccatggttagtctgggttgtggatttgtcggccccgtcgtgggaggttggtacaaagtactcgatcggttcatcccaggtacaaccaaggtagatgccttgaaaaagatgttactcgatcagggcggcttcgccccgtgttttttaggatgctttctcccactggtaggggccctcaatggcctgagcgcacaggacaattgggccaaattacagagggactatcccgatgcacttatcaccaactattatctatggcccgcagtgcagctggctaatttctacttggtgcctctccactatagactggctgttgtccagtgcgtcgcggtgatttggaacagttacctttcctggaaagcccaccggttgtag

SEQ ID NO: 278907 - DNA, 531 bp, Artificial Sequence
  derived and/or modified sequence
atggccttgtggagggcataccaacgcgcactggcagctcacccctggaaagtgcaggttcttactgcgggaagcttaatgggcctgggcgacatcatctcacagcaactagtcgagcgacggggtttacaggagcaccaacggggacgcacactgacaatggtctctctcggctgtgggtttgtaggacccgtcgtcggaggatggtacaaggtgctggaccgcttcatcccgggtacaaccaaggtggatgctctgaagaagatgctgctagatcaagggggattcgcaccctgttttctcggctgtttcctgcctctggtgggggctctaaacgggctcagcgcgcaagataactgggctaagctacaacgagattatcccgatgcacttatcacaaattactatctctggcctgccgtgcagctggcaaatttttaccttgtccccctgcattatcggctggcagtcgtgcaatgcgtcgccgtgatttggaactcttacctcagttggaaagcccatcgcttgtag

SEQ ID NO: 278908 - DNA, 513 bp, Artificial Sequence
  derived and/or modified sequence
atggctctgtggcgggcttatcagcgggcactagcagcccatccttggaaggtgcaggttttgaccgctgggtccctgatgggccttggcgacattatttctcaacagttagttgagcggaggggcctgcaggagcaccagagaggacggaccctgacgatggtttcccttggatgcggctttgtggggccagtagtagggggatggtacaaggtactggacaggttcataccgggtaccaccaaggtggacgcactgaagaagatgttactggatcagggcggatttgccccttgctttctcgggtgcttcttacctctggtgggcgcactgaatggcctgtccgcacaggacaattgggctaagttacaaagagactaccccgacgcattgatcacaaattattatgtggggagatgcccaatgtgttgctgttacctagaactgctgccagtcctggagggcacatctgcactgagtttgccacacagcatagtttcaacgttacagtag

SEQ ID NO: 278909 - DNA, 342 bp, Artificial Sequence
  derived and/or modified sequence
atggcactttggagggcctatcaacgtgcattggcggcacatccatggaaggtgcaggtgttgacagcaggatccctgatgggcctaggagacattattagtcagcagctggtagagagacgcggactgcaggagcatcagaggggcaggacattgacaatggttagcctgggctgtggctttgtggactatcccgatgcattaattaccaactactacttatggccggcagtacagctcgcaaatttttacttagtcccgcttcactacaggctggctgttgttcagtgcgtggcagtaatttggaacagctacctttcttggaaggctcaccgcctctag

SEQ ID NO: 278910 - DNA, 576 bp, Artificial Sequence
  derived and/or modified sequence
atggcgctctggcgcgcttatcagagagctttggctgcccatccatggaaagttcaggtcttaactgccgctcatcccaggaggtgcccagacaacacgtgtgtgccctgtatcggatcgctaatgggcctcggagacatcatctcgcagcagctggtggagagacgcggattacaggaacatcagagagggaggaccctgacaatggtgtctctcggatgtggattcgtgggccctgtggtggggggatggtacaaggtgctggataggttcatccctggcacaaccaaggtggatgctctcaaaaagatgttgttagaccaggggggtttcgctccatgctttctcggatgctttctccctttagtgggggcactgaatggactgtctgctcaggacaactgggctaaactgcagagagactatcctgatgccctgatcacaaactactatctctggccagccgtgcaacttgctaatttttacctggtgcccctgcattacaggttagccgtggtgcagtgcgtggctgtaatctggaatagctatctgagttggaaggctcacaggctgtag

SEQ ID NO: 278911 - DNA, 513 bp, Artificial Sequence
  derived and/or modified sequence
atggccctgtggagagcctaccagagagccctggccgcccacccctggaaggtgcaggtgctgaccgccggcagcctgatgggcctgggcgacatcatcagccagcagctggtggagagaagaggcctgcaggagcaccagagaggcagaaccctgaccatggtgagcctgggctgcggcttcgtgggccccgtggtgggcggctggtacaaggtgctggacagattcatccccggcaccaccaaggtggacgccctgaagaagatgctgctggaccagggcggcttcgccccctgcttcctgggctgcttcctgcccctggtgggcgccctgaacggcctgagcgcccaggacaactgggccaagctgcagagagactaccccgacgccctgatcaccaactactacgtgggcagatgccccatgtgctgctgctacctggagctgctgcccgtgctggagggcaccagcgccctgagcctgccccacagcatcgtgagcaccctgcagtag

SEQ ID NO: 278912 - DNA, 342 bp, Artificial Sequence
  derived and/or modified sequence
atggccctgtggagagcctaccagagagccctggccgcccacccctggaaggtgcaggtgctgaccgccggcagcctgatgggcctgggcgacatcatcagccagcagctggtggagagaagaggcctgcaggagcaccagagaggcagaaccctgaccatggtgagcctgggctgcggcttcgtggactaccccgacgccctgatcaccaactactacctgtggcccgccgtgcagctggccaacttctacctggtgcccctgcactacagactggccgtggtgcagtgcgtggccgtgatctggaacagctacctgagctggaaggcccacagactgtag

SEQ ID NO: 278913 - DNA, 576 bp, Artificial Sequence
  derived and/or modified sequence
atggccctgtggagagcctaccagagagccctggccgcccacccctggaaggtgcaggtgctgaccgccgcccaccccagaagatgccccgacaacacctgcgtgccctgcatcggcagcctgatgggcctgggcgacatcatcagccagcagctggtggagagaagaggcctgcaggagcaccagagaggcagaaccctgaccatggtgagcctgggctgcggcttcgtgggccccgtggtgggcggctggtacaaggtgctggacagattcatccccggcaccaccaaggtggacgccctgaagaagatgctgctggaccagggcggcttcgccccctgcttcctgggctgcttcctgcccctggtgggcgccctgaacggcctgagcgcccaggacaactgggccaagctgcagagagactaccccgacgccctgatcaccaactactacctgtggcccgccgtgcagctggccaacttctacctggtgcccctgcactacagactggccgtggtgcagtgcgtggccgtgatctggaacagctacctgagctggaaggcccacagactgtag

SEQ ID NO: 278914 - DNA, 363 bp, Artificial Sequence
  derived and/or modified sequence
atgtgccatttgtatgaggggccggtcgtgggggggtggtataaggtcttggaccggttcatccctggcactacaaaagtcgacgctctgaagaagatgttgctcgaccagggcggattcgccccatgctttctgggatgcttcctgcccctggtgggagcattgaatgggctgagcgcccaggacaattgggccaaactccagagggattatccagatgccctgatcaccaattattatctctggcctgcggtacagctggctaatttctacctggtgcccctgcactatcgcctagcagttgtccagtgtgtggcagtgatatggaacagttatctaagctggaaagcccatagattatag

SEQ ID NO: 278915 - DNA, 204 bp, Artificial Sequence
  derived and/or modified sequence
tgagattcccaggggaaaaagaccggatttacaggtattaaaaaaggagactaccccgacgccctgataaccaactactatctgtggcctgcggtgcagctcgcaaatttctatctagtgccactccattaccgtctggccgtggtccaatgtgtcgccgtgatctggaactcctacttgtcttggaaagcacatcgactgtag

SEQ ID NO: 278916 - DNA, 363 bp, Artificial Sequence
  derived and/or modified sequence
atgtgccacctgtatgagggccctgtggtgggcggctggtacaaggtgctggaccgcttcatccctggcaccaccaaggtggatgccctgaagaagatgctgctggaccagggcggctttgccccctgcttcctgggctgcttcctgcccctggtgggcgccctgaatggcctgagcgcccaggacaactgggccaagctgcagagggactacccagatgccctgatcaccaactactacctgtggccagctgtgcagctggccaacttctacctggtgcccctgcactaccgcctggccgtggtgcagtgtgtggccgtcatctggaacagctacctgtcctggaaggcccaccggctgtag

SEQ ID NO: 278917 - DNA, 204 bp, Artificial Sequence
  derived and/or modified sequence
tgagacagccagggcaagaagacaggcttcaccggcatcaagaagggggactacccagatgccctgatcaccaactactacctgtggccagctgtgcagctggccaacttctacctggtgcccctgcactaccgcctggccgtggtgcagtgtgtggccgtcatctggaacagctacctgtcctggaaggcccaccggctgtag

SEQ ID NO: 278918 - DNA, 2011 bp, Artificial Sequence
  derived and/or modified sequence
acagtgactatgatactgcctcctaagcaaggacacaccccagtgatgagaaataggcaaaccatggtcttgaaatgcctaggagtataggctggggtttggagggaaatagttggatgacctcaggaaatagaaaaaaacaggcagctgctttttggagagagtggagatgagatcagtgcctacctggaacaaaaccctctggcattctagactggctgaatatgtagtgtagggactttatcatctgtcagaaaatctcctttaagaagaagcgatcaagaagtttagtcctggccaggtgtggtggctcacgcctgtaatcccaacactttgggaggccaaggcaggcggattacttgaggtcagaagttcaagaccagcctggccaatgtatggtgaaaccccgtctctaccaaaaatgtaaaaaattagccaggtgtgatggcacacacctgcaatcccagctactcaggaggctgaggcagaagaatcatttgaacctgggatgcagaggttgcagtgagccgagatcctgccactgcactccagcctgggtgacggagcgagactccgtctcaaaaagagttcagcccctatcctgtacagatgagaaaatagacctggaggaaacccaagtctatcaacagcagagaccacaacccatgtcagtgcaaagaagccaagtgttgcactaccctattgggatccagctcacattgagccagttttgttttttgagctgttacgcaagtgccttctgtcgaagagaagctttactcaattctacagggcagcccccttcctattttcagtggtagaaaagatgagacctggggatccacacttgaggctgtagattggtgctggcagccctgcttctgcaactgagtctcagccctagtcttgaccttgttctttttctctaacaagccttttctctttctaaccctccctcccaatatacccacttcatactatccattgttcatacacttctctacctttattcctcttctcatattcctcccttcgccagagtgtctttttccaccatcttcacctgagttcaattcatccttcaaggtcccggctcaaattccaccttcaccaaagagcttcccagttttctccagtaaaaaatagtttccctcccttgtgttcccaagggggaagggaggaaaaaggataaacaagcattaagcacttgatccattttaggcacttcgcatgtgtcacttgtatgagggccctgtggtaggaggctggtacaaggttttggatcggttcatccctggcaccaccaaagtggatgcactgaagaagatgttgttggatcaggggggctttgccccgtgttttctaggctgctttctcccactggtaggggcacttaatggactgtcagcccaggacaactgggccaaactacagcgggattatcctgatgcccttatcaccaactactatctatggcctgctgtgcagttagccaacttctacctggtcccccttcattacaggttggccgttgtccaatgtgttgctgttatctggaactcctacctgtcctggaaggcacatcggctctaagcctgcctcactccatcgtttccaccttgcagtgatgcagcttgaccctggaacggtcagacaacctcctcaaagtgggcataccagtttccacggggttgggttgccggtcagagcttaagaggactagcaccctgcaatgcccctcttcactctaaaatgtacactgactgctttagagcccttgataatagtcttattcccaccacatactaggcactccataaatatctgttgaaccttcatgaccttatcaactttacacccatatcccagcaaatgccactcatccccactcttcatagacacatttgttactctaaccctgcctaggcttcttgtagctccagctctttagagactcccggaaccctttatatggtgcctcagtaaatatgttattaaatatgtaatccgg

SEQ ID NO: 278919 - DNA, 623 bp, Artificial Sequence
  derived and/or modified sequence
ctgacagccaggggaagaagacaggttttacagggataaaaaagggggattatcctgatgcccttatcaccaactactatctatggcctgctgtgcagttagccaacttctacctggtcccccttcattacaggttggccgttgtccaatgtgttgctgttatctggaactcctacctgtcctggaaggcacatcggctctaagcctgcctcactccatcgtttccaccttgcagtgatgcagcttgaccctggaacggtcagacaacctcctcaaagtgggcataccagtttccacggggttgggttgccggtcagagcttaagaggactagcaccctgcaatgcccctcttcactctaaaatgtacactgactgctttagagcccttgataatagtcttattcccaccacatactaggcactccataaatatctgttgaaccttcatgaccttatcaactttacacccatatcccagcaaatgccactcatccccactcttcatagacacatttgttactctaaccctgcctaggcttcttgtagctccagctctttagagactcccggaaccctttatatggtgcctcagtaaatatgttattaaatatgtaatccggaa

SEQ ID NO: 278920 - DNA, 363 bp, Artificial Sequence
  derived and/or modified sequence
atgtgccacctgtacgagggccccgtggtgggcggctggtacaaggtgctggaccgtttcattcctggcacaaccaaagtggacgcgttaaagaagatgctgcttgaccagggtggctttgccccgtgctttctcggctgttttcttcccttagtgggcgccctgaatgggctgagtgctcaggataattgggccaaactgcaaagggattatcccgacgcacttatcaccaattattacctttggcctgcagtccagttggccaatttctatttagttccccttcactatagactggccgttgttcagtgtgtggcggtgatctggaactcttacctgtcttggaaagcccatcggctttag

SEQ ID NO: 278921 - DNA, 204 bp, Artificial Sequence
  derived and/or modified sequence
tgagacagccagggcaagaagaccggcttcaccggcatcaagaagggtgactaccctgatgctctgattactaactactatctgtggcccgcagtgcaactggcaaatttctatctggttcccctgcattaccggttagccgtagtccagtgcgtcgccgtaatctggaactcctacctgagctggaaggcccatcgtctgtag

SEQ ID NO: 278922 - DNA, 363 bp, Artificial Sequence
  derived and/or modified sequence
atgtgccacctgtacgaaggacctgtagttggaggctggtataaagtgctggatagatttatccctgggacgaccaaggtggacgcactcaagaaaatgctactggaccaaggtggcttcgccccatgctttctgggctgtttcctgccattagtcggggctctgaacggactgtctgctcaggacaactgggctaagctccagcgcgactacccggatgctctgattacgaattattacctgtggccagcggtccaactagcaaatttttacctggtgcccctacactaccgactcgccgtggtccagtgtgtggccgtgatctggaatagttacttgtcatggaaagcacacagactgtag

SEQ ID NO: 278923 - DNA, 204 bp, Artificial Sequence
  derived and/or modified sequence
taggattcccagggtaaaaagactggctttactggcatcaagaaaggagactatccagatgcactgataactaactattacctgtggcctgctgtccagctggccaatttctatctcgtcccccttcattatcgtttagctgtggtacagtgcgttgcagttatttggaattcttacctcagctggaaggcacatcgactctag

SEQ ID NO: 278924 - DNA, 363 bp, Artificial Sequence
  derived and/or modified sequence
atgtgccacctgtacgagggccccgtggtgggcggctggtacaaggtgctggacagattcatccccggcaccaccaaggtggacgccctgaagaagatgctgctggaccagggcggcttcgccccctgcttcctgggctgcttcctgcccctggtgggcgccctgaacggcctgagcgcccaggacaactgggccaagctgcagagagactaccccgacgccctgatcaccaactactacctgtggcccgccgtgcagctggccaacttctacctggtgcccctgcactacagactggccgtggtgcagtgcgtggccgtgatctggaacagctacctgagctggaaggcccacagactgtag

SEQ ID NO: 278925 - DNA, 204 bp, Artificial Sequence
  derived and/or modified sequence
tgagacagccagggcaagaagaccggcttcaccggcatcaagaagggcgactaccccgacgccctgatcaccaactactacctgtggcccgccgtgcagctggccaacttctacctggtgcccctgcactacagactggccgtggtgcagtgcgtggccgtgatctggaacagctacctgagctggaaggcccacagactgtag

SEQ ID NO: 278926 - protein, 921 aa, Artificial Sequence
  derived and/or modified sequence
MAVQPKETLQLESAAEVGFVRFFQGMPEKPTTTVRLFDRGDFYTAHGEDALLAAREVFKTQGVIKYMGPAGAKNLQSVVLSKMNFESFVKDLLLVRQYRVEVYKNRAGNKASKENDWYLAYKASPGNLSQFEDILFGNNDMSASIGVVGVKMSAVDGQRQVGVGYVDSIQRKLGLCEFPDNDQFSNLEALLIQIGPKECVLPGGETAGDMGKLRQIIQRGGILITERKKADFSTKDIYQDLNRLLKGKKGEQMNSAVLPEMENQVAVSSLSAVIKFLELLSDDSNFGQFELTTFDFSQYMKLDIAAVRALNLFQGSVEDTTGSQSLAALLNKCKTPQGQRLVNQWIKQPLMDKNRIEERLNLVEAFVEDAELRQTLQEDLLRRFPDLNRLAKKFQRQAANLQDCYRLYQGINQLPNVIQALEKHEGKHQKLLLAVFVTPLTDLRSDFSKFQEMIETTLDMDQVENHEFLVKPSFDPNLSELREIMNDLEKKMQSTLISAARDLGLDPGKQIKLDSSAQFGYYFRVTCKEEKVLRNNKNFSTVDIQKNGVKFTNSKLTSLNEEYTKNKTEYEEAQDAIVKEIVNISSGYVEPMQTLNDVLAQLDAVVSFAHVSNGAPVPYVRPAILEKGQGRIILKASRHACVEVQDEIAFIPNDVYFEKDKQMFHIITGPNMGGKSTYIRQTGVIVLMAQIGCFVPCESAEVSIVDCILARVGAGDSQLKGVSTFMAEMLETASILRSATKDSLIIIDELGRGTSTYDGFGLAWAISEYIATKIGAFCMFATHFHELTALANQIPTVNNLHVTALTTEETLTMLYQVKKGVCDQSFGIHVAELANFPKHVIECAKQKALELEEFQYIGESQGYDIMEPAAKKCYLERENLRVTEPKDQCLILLTWKRKLRGGKRSACSRPERQNQGSGELS

SEQ ID NO: 278927 - DNA, 2766 bp, Artificial Sequence
  derived and/or modified sequence
atggccgtgcagcccaaggagaccctgcagctggagagcgccgccgaggtgggcttcgtgagattcttccagggcatgcccgagaagcccaccaccaccgtgagactgttcgacagaggcgacttctacaccgcccacggcgaggacgccctgctggccgccagagaggtgttcaagacccagggcgtgatcaagtacatgggccccgccggcgccaagaacctgcagagcgtggtgctgagcaagatgaacttcgagagcttcgtgaaggacctgctgctggtgagacagtacagagtggaggtgtacaagaacagagccggcaacaaggccagcaaggagaacgactggtacctggcctacaaggccagccccggcaacctgagccagttcgaggacatcctgttcggcaacaacgacatgagcgccagcatcggcgtggtgggcgtgaagatgagcgccgtggacggccagagacaggtgggcgtgggctacgtggacagcatccagagaaagctgggcctgtgcgagttccccgacaacgaccagttcagcaacctggaggccctgctgatccagatcggccccaaggagtgcgtgctgcccggcggcgagaccgccggcgacatgggcaagctgagacagatcatccagagaggcggcatcctgatcaccgagagaaagaaggccgacttcagcaccaaggacatctaccaggacctgaacagactgctgaagggcaagaagggcgagcagatgaacagcgccgtgctgcccgagatggagaaccaggtggccgtgagcagcctgagcgccgtgatcaagttcctggagctgctgagcgacgacagcaacttcggccagttcgagctgaccaccttcgacttcagccagtacatgaagctggacatcgccgccgtgagagccctgaacctgttccagggcagcgtggaggacaccaccggcagccagagcctggccgccctgctgaacaagtgcaagaccccccagggccagagactggtgaaccagtggatcaagcagcccctgatggacaagaacagaatcgaggagagactgaacctggtggaggccttcgtggaggacgccgagctgagacagaccctgcaggaggacctgctgagaagattccccgacctgaacagactggccaagaagttccagagacaggccgccaacctgcaggactgctacagactgtaccagggcatcaaccagctgcccaacgtgatccaggccctggagaagcacgagggcaagcaccagaagctgctgctggccgtgttcgtgacccccctgaccgacctgagaagcgacttcagcaagttccaggagatgatcgagaccaccctggacatggaccaggtggagaaccacgagttcctggtgaagcccagcttcgaccccaacctgagcgagctgagagagatcatgaacgacctggagaagaagatgcagagcaccctgatcagcgccgccagagacctgggcctggaccccggcaagcagatcaagctggacagcagcgcccagttcggctactacttcagagtgacctgcaaggaggagaaggtgctgagaaacaacaagaacttcagcaccgtggacatccagaagaacggcgtgaagttcaccaacagcaagctgaccagcctgaacgaggagtacaccaagaacaagaccgagtacgaggaggcccaggacgccatcgtgaaggagatcgtgaacatcagcagcggctacgtggagcccatgcagaccctgaacgacgtgctggcccagctggacgccgtggtgagcttcgcccacgtgagcaacggcgcccccgtgccctacgtgagacccgccatcctggagaagggccagggcagaatcatcctgaaggccagcagacacgcctgcgtggaggtgcaggacgagatcgccttcatccccaacgacgtgtacttcgagaaggacaagcagatgttccacatcatcaccggccccaacatgggcggcaagagcacctacatcagacagaccggcgtgatcgtgctgatggcccagatcggctgcttcgtgccctgcgagagcgccgaggtgagcatcgtggactgcatcctggccagagtgggcgccggcgacagccagctgaagggcgtgagcaccttcatggccgagatgctggagaccgccagcatcctgagaagcgccaccaaggacagcctgatcatcatcgacgagctgggcagaggcaccagcacctacgacggcttcggcctggcctgggccatcagcgagtacatcgccaccaagatcggcgccttctgcatgttcgccacccacttccacgagctgaccgccctggccaaccagatccccaccgtgaacaacctgcacgtgaccgccctgaccaccgaggagaccctgaccatgctgtaccaggtgaagaagggcgtgtgcgaccagagcttcggcatccacgtggccgagctggccaacttccccaagcacgtgatcgagtgcgccaagcagaaggccctggagctggaggagttccagtacatcggcgagagccagggctacgacatcatggagcccgccgccaagaagtgctacctggagagagagaacctgagagtgaccgagcccaaggaccagtgcctgatcctgctgacctggaagagaaagctgagaggcggcaagagaagcgcctgcagcagacccgagagacagaaccagggcagcggcgagctgagctag

SEQ ID NO: 278928 - DNA, 2766 bp, Artificial Sequence
  derived and/or modified sequence
atggccgtgcagcccaaagagactctgcagctggagtcagccgcagaggttggtttcgtgcgattttttcaggggatgccggagaaacccactaccactgtgaggctatttgatcggggggacttttacactgcacatggcgaggatgccctcctcgctgccagggaggtgtttaagacacaaggggtgatcaaatacatggggcccgcaggggccaaaaatcttcaatcagtggtgctttctaagatgaacttcgagtctttcgtgaaagacttgctgctcgttaggcagtaccgtgttgaagtgtacaagaatagggccggaaacaaagcttctaaggagaatgattggtatctggcctataaggcttccccagggaatctgtcccagttcgaggatattcttttcggaaacaacgatatgtccgcatcaataggagttgtcggcgtgaaaatgagcgccgttgacggacagcggcaggtgggtgtggggtatgttgactcgatccaaaggaaactgggactttgtgagtttcctgacaatgatcagttctccaacctcgaggcactgctcattcagataggaccaaaagaatgcgtcctaccagggggagaaacggccggcgatatgggaaagttacgccaaattatccagaggggaggaatcttgatcacagaaagaaaaaaagcggacttttcgacaaaggatatctatcaggacctgaaccggctccttaaggggaaaaagggggagcagatgaactcagcagttcttccagaaatggagaaccaggtggcagtttcaagcctgtctgccgtgatcaagttccttgagttgctgagcgacgacagcaattttggtcagtttgaacttacaacgttcgactttagccaatatatgaagctggatatagccgccgtccgcgctttaaatctcttccagggttcagtcgaagacaccaccggttcgcagtctcttgccgctttgctgaataagtgcaagacacctcaggggcagaggctggtcaatcagtggatcaagcagccgctcatggacaagaaccgtatcgaggagcggctgaatttggttgaagctttcgtagaggatgcagagcttaggcagacgctacaggaggacctgctgagaaggttcccagacctgaacagactggccaagaagtttcagcgacaggctgctaatttgcaggattgttatagactgtaccagggaatcaatcagctacctaacgtaattcaggccctcgaaaaacatgagggcaaacaccagaagctcctactcgctgtttttgtcactcccctgactgaccttcggtcagacttctccaaattccaagagatgatcgaaacaaccctggacatggaccaagtcgagaaccacgaattcctcgtcaagccaagtttcgatcccaatctaagcgaactccgagaaataatgaacgacctcgagaaaaaaatgcagtccaccctcatctcggccgcgagggacctggggctggaccccggaaaacagatcaaattggacagtagcgcacaatttgggtattatttcagggtgacttgtaaagaagaaaaagtgctgcgaaataataaaaacttcagcacagtagacattcaaaagaatggggtgaagtttacaaactctaagctgacaagccttaacgaagaatacaccaagaacaaaaccgaatacgaggaggcccaggacgcaattgtgaaggaaatagttaatatatccagcggttacgtggaacctatgcagactttgaacgatgtcctcgcccagttagatgccgttgttagtttcgcccatgtcagcaacggtgccccagtcccttacgttagaccagccattctagagaaaggtcagggacgcattatcctcaaagcatcaagacacgcatgtgtagaggtgcaggacgaaatcgcttttattcctaacgacgtctatttcgagaaagacaagcagatgtttcacattattacaggtcctaacatggggggtaagtccacctatattcgccagactggtgtgattgtgctgatggctcaaataggatgctttgtcccttgtgaaagtgccgaagtgagtattgtggattgcatattggcacgggtgggggccggagattcccagcttaaaggagtgtccacttttatggcggagatgttggaaaccgcctctatcctgcgcagcgcaacgaaagatagcctaatcattatagatgagctggggaggggcacatcaacatacgatggctttgggctggcctgggctatcagcgaatacattgcaactaagatcggagcattctgtatgtttgctacacactttcatgagctgacagcactcgcgaatcagattcctactgtgaacaaccttcacgtaactgcactgacgaccgaggaaaccttgaccatgctttaccaggttaagaagggagtctgcgaccagtcctttggaatccatgtcgcagaactggccaattttcctaagcatgttattgaatgcgctaaacaaaaggctctcgagcttgaggagttccagtatattggcgagtcccaagggtatgacatcatggaacccgcagccaagaaatgctatctggagcgagaaaatctgagagttacagaacctaaagatcagtgtctcatcctgctgacttggaagcgcaagctgcgcggcggaaaaagatccgcctgcagtcggccggagcggcagaaccagggtagtggcgagctaagttag

SEQ ID NO: 278929 - DNA, 2766 bp, Artificial Sequence
  derived and/or modified sequence
atggctgtgcagcccaaggagaccctgcagctggagagcgctgctgaggtgggctttgtgcgcttcttccagggcatgcctgagaagcccaccaccaccgtgcggctgtttgacagaggagacttctacacagcccacggggaggatgccctgctggccgcccgggaggtgttcaagacccagggcgtcatcaagtacatgggccctgctggggccaagaacctgcagagcgtggtgctgagcaagatgaactttgagagctttgtgaaggacctgctgctggtgcggcagtacagagtggaggtgtacaagaacagagctggcaacaaggccagcaaagaaaatgactggtacctggcctacaaggccagccctggcaacctgagccagtttgaggacatcctgtttggaaataatgacatgtctgccagcattggagtggtgggcgtgaagatgtctgctgtggatggccagaggcaggtgggcgtgggctacgtggacagcatccagaggaagctgggcctgtgtgagttcccagacaatgaccagttcagcaacctggaggccctgctgatccagatcggccccaaggaatgtgtgctgcccggcggggagacagctggggacatgggcaagctgcggcagatcatccagaggggcggcatcctgatcacagagaggaagaaggctgacttcagcaccaaggacatctaccaggacctgaaccggctgctgaagggcaagaagggggagcagatgaacagcgctgtgctgcctgagatggagaaccaggtggccgtgagcagcctgtctgctgtgatcaagttcctggagctgctgagtgatgacagcaactttggccagtttgagctgaccacctttgacttcagccagtacatgaagctggacattgctgctgtgcgggccctgaacctcttccagggctctgtggaggacaccaccggcagccagagcctggccgccctgctgaacaagtgcaagaccccccagggccagaggctggtgaaccagtggatcaagcagcccctgatggacaagaaccgcatcgaggagcggctgaacctggtggaggcctttgtggaggatgctgagctgcggcagaccctgcaggaggacctgctgcggcgcttcccagacctgaaccggctggccaagaagttccagaggcaggccgccaacctgcaggactgctaccgcctgtaccagggcatcaaccagctgcccaacgtcatccaggccctggagaagcatgagggcaagcaccagaagctgctgctggccgtgtttgtgacccccctgacagacctgcggagtgacttcagcaagttccaggagatgattgagaccaccctggacatggaccaggtggagaaccacgagttcctggtgaagcccagctttgaccccaacctgtctgagctgcgggagatcatgaatgacctggagaagaagatgcagagcaccctcatctctgctgcccgggacctgggcctggaccccgggaagcagatcaagctggacagcagcgcccagtttggctactacttccgggtgacctgcaaggaggagaaggtgctgaggaacaacaagaacttcagcacagtggacatccagaagaatggagtgaagttcaccaacagcaagctgaccagcctgaatgaggagtacaccaagaacaagacagaatatgaggaggcccaggatgccatcgtgaaggagatcgtgaacatcagcagcggctacgtggagcccatgcagaccctgaatgatgtgctggcccagctggatgctgtggtgtcctttgcccacgtgtccaatggagcccctgtgccctacgtgcggcctgccatcctggagaagggccagggccgcatcatcctgaaggccagcagacatgcctgtgtggaggtgcaggatgagatcgccttcatccccaatgatgtgtactttgagaaggacaagcagatgttccacatcatcaccggccccaacatgggcggcaagagcacctacatccggcagacaggagtgattgtgctgatggcccagatcggctgctttgtgccctgtgagagcgctgaggtgtccatcgtggactgcatcctggcccgggtgggcgctggggacagccagctgaagggcgtgtccaccttcatggccgagatgctggagacagccagcatcctgcggagcgccaccaaggacagcctcatcatcattgatgagctgggccggggcaccagcacctatgatggcttcggcctggcctgggccatcagcgagtacatcgccaccaagatcggggccttctgcatgtttgccacccacttccacgagctgacagccctggccaaccagatccccaccgtgaacaacctgcacgtgacagccctgaccacagaggagaccctgaccatgctgtaccaggtgaagaagggcgtgtgtgaccagagctttggcatccacgtggccgagctggccaacttccccaagcacgtgattgaatgtgccaagcagaaggccctggagctggaggagttccagtacatcggggagagccagggctatgacatcatggagcctgctgccaagaagtgctacctggagcgggagaacctgcgggtgacagagcccaaggaccagtgcctgatcctgctgacctggaagaggaagctgcggggcggcaagaggtctgcctgcagcaggcctgagcggcagaaccagggcagcggggagctgtcctag

SEQ ID NO: 278930 - DNA, 2766 bp, Artificial Sequence
  derived and/or modified sequence
atggccgtgcagcccaaggagaccctgcagctggagagcgccgccgaggttggcttcgtgagatttttccagggaatgcccgagaagccaaccactaccgtccgtctattcgaccggggagacttttatactgctcatggtgaggatgctctgctggctgcacgcgaagtgttcaagactcagggagtgataaaatacatgggtcccgccggcgccaaaaatttacaaagcgttgttctgtcgaagatgaacttcgaatcttttgtgaaagatctgctgctggtaaggcagtatagggtggaggtttataagaatcgggccggtaacaaagcctcaaaggaaaacgattggtatctcgcgtacaaagcaagtcccggaaacctcagtcagttcgaagacatccttttcggaaacaacgacatgtccgccagtattggtgtggtcggcgtcaaaatgtccgcagtagacgggcagcggcaggtgggggtaggatatgttgattccattcagcggaagctgggtttatgtgagtttcctgataatgaccagtttagtaatctggaagctttactgatccaaataggtcctaaggaatgcgtcttacccgggggagagacagccggcgacatgggaaaacttcgccaaattattcagagaggaggtatccttattacagaaagaaagaaggcggatttcagcactaaagacatttaccaagacctgaatagactcctgaaggggaaaaaaggagaacaaatgaactccgccgttctgcctgagatggagaatcaggtcgctgtcagttctctttccgccgtcattaaattcctggaacttctctccgatgacagtaatttcggtcagttcgagctgacgacctttgacttttctcagtatatgaaactcgacatagcagccgttcgagcactgaacctgtttcaggggtcggtggaggacacgacaggtagccaaagcctggcagctttactgaacaagtgcaaaaccccacaggggcagaggttggtgaaccagtggatcaaacaaccactaatggacaagaatagaatagaggagcgactgaacctcgtcgaagcattcgttgaggacgctgagctgcgccagaccttacaggaggacctgctgagacggtttcctgatctgaatagacttgcgaaaaagttccagagacaggcagcaaatctgcaggactgctacaggctgtatcaaggaatcaatcagctgcccaacgtgattcaagctttggaaaaacacgaaggcaaacaccagaagctcctgttggctgtatttgtcacacccctcacagacctccggagcgacttcagcaagtttcaggagatgatagagaccacactggacatggatcaagtggaaaatcacgaattcctcgtaaaaccctccttcgacccgaacttgtccgagctacgagagattatgaatgaccttgagaagaagatgcaatctacattaatcagcgccgcacgcgatttgggacttgaccccgggaagcagatcaaactcgattccagtgctcagttcggatactactttcgggtcacctgcaaggaagagaaagtcctgaggaataacaaaaatttttcaactgtggacattcagaagaacggcgtcaagttcactaacagtaagctgactagcctgaatgaggaatacaccaagaacaagactgaatacgaggaggcccaggacgctatcgtaaaagaaattgtcaacatctcatctggatacgtggaaccaatgcagactctgaatgatgtattggcccagctggatgctgttgtgtcatttgctcacgtgtccaatggagccccggtgccctacgtgagacctgcaatactggagaaagggcagggtcgtatcattcttaaggcaagccgacatgcatgtgtggaggttcaggatgagattgccttcatacccaacgacgtttacttcgaaaaggataagcaaatgttccatattattaccggcccaaacatggggggcaaaagcacctacattcgacagaccggggtgatcgtgttaatggcgcagattggctgcttcgtgccttgcgagagtgccgaagtgagtatcgtggattgcatactggcccgcgtgggagcaggggactcccaacttaaaggggtgtccacctttatggctgagatgctcgaaaccgcttctatcctcaggtcagcgactaaggactcacttatcataatcgacgaactcgggcgcggcacttccacctatgatgggtttggactagcatgggccatttctgaatatatcgccactaagatcggagcattttgtatgttcgccacccactttcacgaactgacggctctggcaaatcagataccaaccgtcaacaatctgcacgttactgctcttaccaccgaggagaccctgactatgctataccaggtgaaaaagggtgtgtgcgatcagagtttcggaattcatgttgctgagctggccaatttccccaagcacgtgatcgagtgtgctaaacaaaaagccctcgagctggaggagttccaatacattggcgagtcacaagggtatgacatcatggagcccgcagccaagaaatgttatctggaaagagagaatctgcgggtcacagaacccaaggaccagtgccttatactgctgacctggaagcgcaaactgcgtggcggcaaacgaagcgcttgctcccggcccgaaagacagaaccagggatccggggagctgtcatag

SEQ ID NO: 278931 - DNA, 3628 bp, Artificial Sequence
  derived and/or modified sequence
aaacagcttagtgggtgtggggtcgcgcattttcttcaaccaggaggtgaggaggtttcgacatggcggtgcagccgaaggagacgctgcagttggagagcgcggccgaggtcggcttcgtgcgcttctttcagggcatgccggagaagccgaccaccacagtgcgccttttcgaccggggcgacttctatacggcgcacggcgaggacgcgctgctggccgcccgggaggtgttcaagacccagggggtgatcaagtacatggggccggcaggagcaaagaatctgcagagtgttgtgcttagtaaaatgaattttgaatcttttgtaaaagatcttcttctggttcgtcagtatagagttgaagtttataagaatagagctggaaataaggcatccaaggagaatgattggtatttggcatataaggcttctcctggcaatctctctcagtttgaagacattctctttggtaacaatgatatgtcagcttccattggtgttgtgggtgttaaaatgtccgcagttgatggccagagacaggttggagttgggtatgtggattccatacagaggaaactaggactgtgtgaattccctgataatgatcagttctccaatcttgaggctctcctcatccagattggaccaaaggaatgtgttttacccggaggagagactgctggagacatggggaaactgagacagataattcaaagaggaggaattctgatcacagaaagaaaaaaagctgacttttccacaaaagacatttatcaggacctcaaccggttgttgaaaggcaaaaagggagagcagatgaatagtgctgtattgccagaaatggagaatcaggttgcagtttcatcactgtctgcggtaatcaagtttttagaactcttatcagatgattccaactttggacagtttgaactgactacttttgacttcagccagtatatgaaattggatattgcagcagtcagagcccttaacctttttcagggttctgttgaagataccactggctctcagtctctggctgccttgctgaataagtgtaaaacccctcaaggacaaagacttgttaaccagtggattaagcagcctctcatggataagaacagaatagaggagagattgaatttagtggaagcttttgtagaagatgcagaattgaggcagactttacaagaagatttacttcgtcgattcccagatcttaaccgacttgccaagaagtttcaaagacaagcagcaaacttacaagattgttaccgactctatcagggtataaatcaactacctaatgttatacaggctctggaaaaacatgaaggaaaacaccagaaattattgttggcagtttttgtgactcctcttactgatcttcgttctgacttctccaagtttcaggaaatgatagaaacaactttagatatggatcaggtggaaaaccatgaattccttgtaaaaccttcatttgatcctaatctcagtgaattaagagaaataatgaatgacttggaaaagaagatgcagtcaacattaataagtgcagccagagatcttggcttggaccctggcaaacagattaaactggattccagtgcacagtttggatattactttcgtgtaacctgtaaggaagaaaaagtccttcgtaacaataaaaactttagtactgtagatatccagaagaatggtgttaaatttaccaacagcaaattgacttctttaaatgaagagtataccaaaaataaaacagaatatgaagaagcccaggatgccattgttaaagaaattgtcaatatttcttcaggctatgtagaaccaatgcagacactcaatgatgtgttagctcagctagatgctgttgtcagctttgctcacgtgtcaaatggagcacctgttccatatgtacgaccagccattttggagaaaggacaaggaagaattatattaaaagcatccaggcatgcttgtgttgaagttcaagatgaaattgcatttattcctaatgacgtatactttgaaaaagataaacagatgttccacatcattactggccccaatatgggaggtaaatcaacatatattcgacaaactggggtgatagtactcatggcccaaattgggtgttttgtgccatgtgagtcagcagaagtgtccattgtggactgcatcttagcccgagtaggggctggtgacagtcaattgaaaggagtctccacgttcatggctgaaatgttggaaactgcttctatcctcaggtctgcaaccaaagattcattaataatcatagatgaattgggaagaggaacttctacctacgatggatttgggttagcatgggctatatcagaatacattgcaacaaagattggtgctttttgcatgtttgcaacccattttcatgaacttactgccttggccaatcagataccaactgttaataatctacatgtcacagcactcaccactgaagagaccttaactatgctttatcaggtgaagaaaggtgtctgtgatcaaagttttgggattcatgttgcagagcttgctaatttccctaagcatgtaatagagtgtgctaaacagaaagccctggaacttgaggagtttcagtatattggagaatcgcaaggatatgatatcatggaaccagcagcaaagaagtgctatctggaaagagagaacctcagagtgacagagccaaaagaccagtgcctcattttgctgacatggaaaaggaaacttcgtgggggaaagagatctgcttgcagtcggccagagagacagaaccagggcagtggtgagctctcatgacctggtgtctgttgccttctggttaagtttttcatttgtaattctacaaacatcccttctgtaaacatttccctcaaaatggagcaggaagctctcaaaaatggaccagaaaggggtcaggaatataactttctctgcccagattccaggacttacagtgagaaagcgccttctgggaacttcacaatggctaaagtgtgctaatgggatgatgtgcccttgtacacccactgcctctgaactctgctctgcattgctgagcaaactacatttcccagaactccttgttggattccttccaaacaggtttaccactgggagagcctgttggttggggagggcaggaagagggaggaaagaggaagggactcacttcctgtttccagctgaagtctaaatcaatccactatcaacaggtagctatcatactaccctcattgtcacccctcagaggtcccactgcagctgcataatgtcccctcagtggcctgaacatgagatgaacaacactcttcttgggagtaccagccttgcttggttcatggccacttttcctgattatcttgcagctatattaggtcatgtgacaaagttctggccagtggcaagggaacacaagtgataggtacagatagaagtgtctgatactacatagattatgcttgcactcactcttaagagagagacatgaacttttaccaacggaagccagtattattttgaacctctgttagagtggcttgaatctgtatcctaacttgtatccctaatgtgtgacccatgaaaattagccaggcagc

SEQ ID NO: 278932 - DNA, 2766 bp, Artificial Sequence
  derived and/or modified sequence
atggctgttcaaccaaaggaaaccctgcagctagaaagtgcagcagaagtcgggttcgtaaggttctttcagggtatgccagaaaagcctactacaactgttagactcttcgaccgaggcgatttctacactgcacacggagaggacgcgcttctggcggcacgagaagtgtttaaaacccagggagtaattaagtacatgggccctgccggagccaagaatctgcagagcgttgtcttgagcaagatgaattttgaaagctttgtgaaggacctgctcctggtgcgccagtaccgggtggaggtgtataagaatcgcgcaggaaacaaagctagcaaagagaacgattggtacctcgcctacaaggcctccccaggcaatctgagtcagtttgaggacatcctgttcggtaataacgatatgtcagcttccatcggcgtggtaggggttaaaatgagtgcggtcgacggacagcgccaggtaggcgtagggtatgtcgacagtatccagcggaaactcggtctttgtgagtttcccgacaacgatcagtttagtaacctagaggccctcttgattcagataggccctaaagagtgcgtgctcccaggtggggaaactgcaggggacatgggaaaactgagacagatcattcaacgcggtggtatcctcatcacagaacgcaagaaggcagacttctccaccaaggatatctatcaggacttaaatcgcttgctgaaaggcaagaaaggtgagcagatgaactccgcggtgctacccgaaatggaaaatcaggtggctgtaagctccttgagcgccgtcatcaaattcctggaactgctgtctgacgattcaaactttggacaattcgagttgactaccttcgatttttcacaatacatgaagcttgatattgccgcagtgcgcgcactgaatctcttccagggctccgtagaagacactacaggctcccagtccctggctgcattgctgaataagtgcaaaactccccagggccagcgtttggtgaaccaatggataaagcagcctcttatggacaaaaaccgtatcgaagaacggctcaacctggtggaagccttcgtggaggatgctgagctaaggcagactctccaggaggacttgcttcgaaggttcccagaccttaaccggttagcaaagaagtttcagcgccaggccgcaaaccttcaggactgttatcggctgtaccaggggatcaaccagttgcctaatgttatccaggctttggagaagcacgagggcaaacatcagaagctgctgttagccgtctttgtgacaccccttacagacttaagatctgacttctccaaattccaggaaatgatcgagactactttggatatggaccaggttgagaaccatgagttcctcgtaaaaccttctttcgatcccaacttaagtgagttaagagagattatgaatgacctggagaaaaaaatgcagtcaacactgatatctgctgccagagatcttggattagacccaggaaagcagattaaactggacagctctgcacagttcggatactactttagggtgacttgtaaggaagagaaggttctccgcaacaacaagaatttcagtaccgttgatattcagaagaacggggtgaaatttacaaacagtaaactgacttccctgaatgaggagtacaccaagaataagaccgaatatgaagaggctcaggatgccatagtcaaggaaattgtaaatatttccagcgggtacgttgagcccatgcaaacactgaatgatgtgctggcccagctcgacgccgttgtcagtttcgctcacgtgtccaatggggcacctgtcccttacgtgcgcccagccatcctggagaaggggcaaggacgaattattcttaaagcttcccgtcatgcctgtgtggaggtgcaagatgagattgcatttatccccaacgacgtctacttcgagaaggataagcaaatgttccatattatcactggacccaacatgggtggcaagtctacctatatcagacagactggagtgattgtgcttatggcacagataggctgttttgtgccttgcgaaagcgctgaggtcagcattgtcgattgcatcctcgcccgtgtgggtgctggtgactcacagctgaagggtgtgagcacattcatggccgaaatgttagagaccgccagtatcctgcgatcggcaaccaaggatagcctgattatcatcgacgaattgggtcggggtacaagtacctacgatggctttgggctcgcctgggctatttctgagtacattgcaaccaaaatcggcgctttctgtatgttcgcaacacacttccacgagttaactgccctggccaatcaaatacccaccgtcaataacctccatgtgacagccctgaccacagaagagactcttaccatgctttaccaagtcaagaagggcgtgtgcgaccagagctttgggattcacgtcgcagaactggccaactttcctaaacatgttattgagtgcgcgaagcagaaggccctcgagctggaggaatttcagtatattggggagtcacaagggtatgacatcatggagccggcagcgaaaaaatgctatcttgagcgggagaatctgcgagtgacagagccaaaggaccagtgcctcatactgctcacatggaagagaaaactcagaggtggcaaacgcagcgcttgttctagacctgagaggcagaatcaaggtagtggagagctgagttag

SEQ ID NO: 278933 - protein, 49 aa, Artificial Sequence
  derived and/or modified sequence
MKDNDIKRLLYTHLLCIFSIILSVFIPSLFLENFSILETHLTWLCICSG

SEQ ID NO: 278934 - DNA, 150 bp, Artificial Sequence
  derived and/or modified sequence
atgaaggataacgacataaagaggttactttacacccatctgctgtgtatcttctctatcatcctgtccgtctttatacccagcctgttcttagaaaactttagcattctcgaaacccatcttacttggttgtgtatctgctctggatag

SEQ ID NO: 278935 - DNA, 150 bp, Artificial Sequence
  derived and/or modified sequence
atgaaggacaatgacatcaagaggctgctgtacacccacctgctgtgcatcttcagcatcatcctgtctgtgttcatccccagcctcttcctggagaacttcagcatcctggagacccacctgacctggctgtgcatctgcagcggctag

SEQ ID NO: 278936 - DNA, 150 bp, Artificial Sequence
  derived and/or modified sequence
atgaaggacaacgacatcaagcggctgctgtacacccacctgctgtgtatatttagcatcattctgagcgtgttcatcccttcgctgtttctggaaaacttttccattctagaaacccacttaacttggttgtgtatttgctccggttag

SEQ ID NO: 278937 - DNA, 619 bp, Artificial Sequence
  derived and/or modified sequence
gccgcccgtcgtacctgatggtaggaggcagtagttccccgcttcccttccgcgggagggagagttaggtaagccccgctggacgccctcggcgtctcgcctcacgaggtgcaagctacccccgcgaattgccgaagcagccctgagccttggcgccccgacccgccggcgctcgccgtcagctcagcgccactcttccggcgtgccctgatggacagaccccctttcggatccgagttttcgcctctgtcccccagttttcccttgtcttcaactcccatgctctttgatcctgcctctcagctggttcctcgctgcccacgcttgcgccggcgtaggctcgggcagaatcccgagggacccgggttggggtggggctgccggtgaaggtgcggcgatgcccgcgaaggctcctctgggtgccgctcggaagagccttctctccgctgcgctagccatccaagaaaacaccatgaaagataacgatatcaagagactactgtatacccatcttttatgcatattttcaattatcctaagtgtcttcattccatcactcttcttggagaacttctcaatattggaaacacacttgacatggttgtgcatctgttctggt

SEQ ID NO: 278938 - DNA, 150 bp, Artificial Sequence
  derived and/or modified sequence
atgaaggacaatgatatcaagaggctcctgtacactcatctgttatgtatattctctatcattctgagcgtattcatccctagcctgtttctcgaaaacttctccatcctggagacgcaccttacctggctctgcatttgcagcgggtag

SEQ ID NO: 278939 - DNA, 150 bp, Artificial Sequence
  derived and/or modified sequence
atgaaggacaacgacatcaagagactgctgtacacccacctgctgtgcatcttcagcatcatcctgagcgtgttcatccccagcctgttcctggagaacttcagcatcctggagacccacctgacctggctgtgcatctgcagcggctag

SEQ ID NO: 278940 - protein, 1982 aa, Artificial Sequence
  derived and/or modified sequence
MELAHSLLLNEEALAQITEAKRPVFIFEWLRFLDKVLVAANKTDVKEKQKKLVEQLTGLISSSPGPPTRKLLAKNLAALYSIGDTFTVFQTLDKCNDIIRNKDDTAAYLPTKLAAVACVGAFYEKMGRMLGSAFPETVNNLLKSLKSAESQGRSEILMSLQKVLSGLGGAAASSHRDIYKNARSLLTDRSMAVRCAVAKCLLELQNEAVFMWTAELENIATLCFKALENSNYGVRVAVSKLLGTVMATALMPKQATVMRQNVKRATFDEVLELMATGFLRGGSGFLKSGGEMLKVGGSVNREVRVGVTQAYVVFVTTLGGQWLERSFATFLSHVLDLVSHPRATQTHVEAVYSRRCVSFILRATVGSLLGEKAQIAAAKEICQAIGKQMKAVEAVVNDTSGENKSGAADIAASQHVMVCALQELGSLVQSLNATASPLIQEASIGLLEIVTSVLLHPSMAARLAAAWCLRCVAVALPFQLTPFLDRCAERLNNLKTSPEAVSGYSFAMAALLGGVHQCPLGIPHAKGKMVVSIAEDLLRTAAQNSRLSLQRTQAGWLLLGALMTLGPSVVRYHLPKMLLLWRNVFPRSLKELEAEKARGDSFTWQVTLEGRAGALCAMRSFVAHCPELLTEDVIRKLMTPIECAMTMMSHIPSVMKAHGAHLKASAAMVRLRLYDILALLPPKTYEGSFNALLRELVAEFTLTDNSANTTTSLLRSLCHYDDSVLLGSWLQETDHKSIEDQLQPNSASGSGALEHDPSSIYLRIPAGEAVPGPLPLGVSVIDASVALFGVVFPHVSYKHRLQMLDHFAECVKQAKGVRQQAVQLNIFTAVLSALKGLAENKSTLGPEEVRKSALTLVMGPLDNPNPILRCAAGEALGRMAQVVGEATFIARMAQYSFDKLKSARDVVSRTGHSLALGCLHRYVGGIGSGQHLKTSVSILLALAQDGTSPEVQTWSLHSLALIVDSSGPMYRGYVEPTLSLVLTLLLTVPPSHTEVHQCLGRCLGAIITTVGPELQGNGATTSTIRSSCLVGCAITQDHSDSLVQAAAISCLQQLHMFAPRHVNLSSLVPSLCVHLCSSHLLLRRAAVACLRQLAQREAAEVCEYAMSLAKNTGDKESSSANVSPFAPGVSSRTDIHCRHQGVNITETGLEGLLFGMLDRETDRKLCSDIHDTLGHMLSSLAVEKLSHWLMLCKDVLAASSDMSTATLLSSGKDEEAEKKDEMDDDTMFTTLGEEDKSKPFVAPRWATRVFAADCLCRIINLCENADQAHFDLALARSAKLRNPTNDLLVLHLSDLIRMAFMAATDHSNQLRMAGLQALEDIIKKFASVPEPEFPGHVILEQYQANVGAALRPAFSQDTPSDIIAKACQVCSTWIGSGVVSDLNDLRRVHNLLVSSLDKVQAGKGSSSQLYRESATTMEKLAVLKAWAEVYVVAMNIKKEAESKPKRAIKNTDDDDDDCGTIDELPPDSLITLVQPELPTLSRLWLAALKDYALLTLPAEFSSQLPPDGGAFYTPETIDTARLHYRNSWAPILHAVALWLNSTGFTCSESTEAAAISGLQKRSTSVNLNQASGAVGSAKSLPEINKDRMHLILGVSIQFLCSPRPEEPIEHVTACLQALHTLLDSPYARVHIAEDQLIGVELLSVLHRLLLTWNPSSVQLLVTGVVQQIVRAAQDYLQEKRNTLRCMTILPTILFLIARILKDTAIKSADNQVPPPVSAALQGIKSIVTLSMAKTEAGVQKQWTALIRSTLACILEYSQPEDSVPTPDEVSMLTAIALFLWSASNEIIGVQSLQNGCMNRFKNALNSCDPWVQAKCYQLLLSVFQHSNRALSTPYIHSLAPIVVEKLKAVERNRPASNIELLAVQEGIKVLETLVALGEEQNRVQLLALLVPTLISYLLDENSFASASSASKDLHEFALQNLMHIGPLYPHAFKTVMGAAPELKVRLETAVRASQASKAKAAARQPAPAIHSAPTIKLKTSFF

SEQ ID NO: 278941 - protein, 384 aa, Artificial Sequence
  derived and/or modified sequence
MWYVSTRGVAPRVNFEGALFSGYAPDGGLFMPEELPQLDRGTLCQWSTLSYPGLVKELCALFIGSELLPKDELNDLIDRAFSRFRHREVVHLSRLRNGLNVLELWHGVTYAFKDLSLSCTTQFLQYFLEKREKHVTVVVGTSGDTGSAAIESVQGAKNMDIIVLLPKGHCTKIQELQMTTVLKQNVHVFGVEGNSDELDEPIKTVFADVAFVKKHNLMSLNSINWSRVLVQMAHHFFAYFQCTPSLDTHPLPLVEVVVPTGAAGNLAAGYIAQKIGLPIRLVVAVNRNDIIHRTVQQGDFSLSEAVKSTLASAMDIQVPYNMERVFWLLSGSDSQVTRALMEQFERTQSVNLPKELHSKHSPVLPRPCLCSQVPGSCPGCWPDP

SEQ ID NO: 278942 - protein, 226 aa, Artificial Sequence
  derived and/or modified sequence
MDIIVLLPKGHCTKIQELQMTTVLKQNVHVFGVEGNSDELDEPIKTVFADVAFVKKHNLMSLNSINWSRVLVQMAHHFFAYFQCTPSLDTHPLPLVEVVVPTGAAGNLAAGYIAQKIGLPIRLVVAVNRNDIIHRTVQQGDFSLSEAVKSTLASAMDIQVPYNMERVFWLLSGSDSQVTRALMEQFERTQSVNLPKELHSKHSPVLPRPCLCSQVPGSCPGCWPDP

SEQ ID NO: 278943 - DNA, 1155 bp, Artificial Sequence
  derived and/or modified sequence
atgtggtacgtgagcactcggggagtcgctccgagagtcaactttgagggagccttattctcaggctatgccccagacggagggctattcatgcctgaggaactgccccagctagatagaggcacgctttgccaatggagcactttaagttatccgggactagtgaaggaactttgtgcactgtttatcgggagtgagctcctaccaaaggacgaactgaacgatcttatcgatcgggctttttcgcggtttaggcatcgggaggtagtccatttgagccgactgcgcaatggcctgaatgttctggagctgtggcacggcgtgacctatgccttcaaagatctttccttgtcttgcaccacccagtttctgcagtacttcctggaaaagcgcgagaagcacgtgactgtcgtggttggcaccagtggagacactggttcagccgcaatagagtctgtgcagggggcaaagaacatggacattatcgtgctcttgcctaagggacattgtaccaaaattcaagagctacagatgaccacagtcctgaaacagaatgttcacgtcttcggggtggaaggaaactctgacgaactcgacgaacctataaagaccgtgtttgcagacgtggcattcgtcaagaagcacaatctgatgagcctgaattcgattaactggagccgggttctggtccagatggcccatcattttttcgcttattttcagtgcacaccctcccttgatactcaccctcttcctttggtggaggtcgtggtcccgactggggcagcaggcaaccttgccgcaggttatattgctcagaagatcggcctgcctatccgtctggtagtcgctgtcaatagaaacgacatcatccataggactgtgcagcagggcgactttagcctatccgaggctgtgaaaagcaccctcgcctccgcaatggacattcaggtaccatataatatggagcgcgtgttttggcttctctccggatccgattcacaagtcactcgggctttgatggaacaatttgagagaacacagagtgttaatcttccgaaggagcttcactcaaagcactcgccggtgctgccgaggccttgcctgtgttcccaggtgcccggaagctgtccgggttgctggcctgatccatag

SEQ ID NO: 278944 - DNA, 1155 bp, Artificial Sequence
  derived and/or modified sequence
atgtggtatgtcagcactcgcggagttgcccccagagtgaactttgaaggtgctcttttttctggctatgcccctgacggtggcctgttcatgcccgaagaactcccccaactcgaccgcggcacattatgtcagtggtcaactctatcgtaccctggtctcgtcaaggagctgtgcgcactgtttattggctccgaacttctccctaaagacgagctgaacgacttgattgatcgcgctttctcccgatttagacatcgcgaagtagtacacctgagccggcttaggaacggcctaaacgttctggagctttggcatggcgtgacttatgcattcaaggaccttagtctctcatgcacaacgcaattcctgcagtacttcctcgagaaaagagagaagcacgttaccgtcgtcgtgggcacatctggagatacggggagcgcggctattgagtccgtccagggtgccaaaaacatggacattatcgttctgctgccaaaaggacactgcactaaaattcaggaacttcaaatgactaccgtgctgaaacaaaacgttcatgtcttcggcgtcgaaggcaattctgatgaactcgatgaaccgataaaaaccgtcttcgccgatgtcgccttcgtaaagaaacacaacttaatgagtcttaactctatcaactggagtagagttctcgtccaaatggctcaccatttctttgcctattttcaatgtaccccctctctggacacacacccactaccgctggtggaggtagtggtacccaccggtgctgcaggaaacctggctgctggctacattgcccagaaaattggtctgccaattagactcgttgtggcagtgaatcgcaatgacattatacatcgcacggtgcaacagggcgatttctctctctctgaggcggtcaaatccaccttggcctccgctatggacatccaagtaccttacaatatggaaagggtgttttggttactcagcggttccgactcccaggtaaccagggccctcatggagcaatttgaacgaacccaatccgtgaatttgcctaaggagttgcactcaaaacacagccctgtgctccctcgtccctgtctgtgctcccaggtgcctggcagctgtccgggatgctggcccgacccctag

SEQ ID NO: 278945 - DNA, 1155 bp, Artificial Sequence
  derived and/or modified sequence
atgtggtatgtcagcactcgcggagttgcccccagagtgaactttgaaggtgctcttttttctggctatgcccctgacggtggcctgttcatgcccgaagaactcccccaactcgaccgcggcacattatgtcagtggtcaactctatcgtaccctggtctcgtcaaggagctgtgcgcactgtttattggctccgaacttctccctaaagacgagctgaacgacttgattgatcgcgctttctcccgatttagacatcgcgaagtagtacacctgagccggcttaggaacggcctaaacgttctggagctgtggcatggcgtgacctacgcattcaaagacctgtcacttagctgtaccactcaattcctgcagtactttttagagaagcgagaaaaacacgttaccgtggtggtgggcacctctggcgacactggcagcgcggccatcgaaagcgttcagggagccaaaaatatggatatcatcgtgctgctccctaaaggacattgcacaaaaattcaagaactccaaatgacaaccgtactaaagcaaaacgtgcacgtctttggcgtggaggggaatagcgacgagctggacgaacccattaagactgtgtttgccgatgtcgccttcgtaaaaaaacacaatcttatgagtcttaatagcatcaattggagccgcgttctggtgcagatggctcaccattttttcgcatatttccagtgtactccgagtctagatacacatcccttacccttagtcgaagtggtcgtgcccacgggtgctgcagggaacctcgccgccggatatatagcccaaaaaatcggactgccaatccgcctggtggtcgcagttaaccgcaacgatataattcatagaaccgttcaacagggagacttttctctgagtgaggctgtcaaatctaccctggcttccgcaatggatatacaggtgccctataacatggaaagagtgttttggcttttgagcgggtctgactcccaggttaccagggccctcatggaacaatttgagcgcacccaaagcgtgaatctacccaaagaattacacagtaaacactctcccgtcctgcctcgtccctgcctttgcagtcaagtgcctggcagttgtcctggttgttggcccgacccctag

SEQ ID NO: 278946 - DNA, 1072 bp, Artificial Sequence
  derived and/or modified sequence
acattcgcagcccgggcagccctgctgcgcaccgggcctcgcgccccgcgccccgcgccccgcgccccgcgccccgcaccgcccatccaggaacatctggggacacaggaagtgctgccattgagagtgttcaaggggcaaagaacatggacattatcgttctgctgcccaaaggtcactgcacaaagattcaggagctccagatgacaacggtgctgaagcagaacgtacatgtgtttggagtggagggaaacagcgatgagctcgatgagccgatcaagactgtgtttgccgatgtggcttttgtcaagaagcacaatctgatgagcctgaattcgatcaactggtcccgggtcctggtgcagatggcccatcacttctttgcttacttccagtgtacgccatccttggacacacatcccctacccctggtggaggtggttgtgccaacaggggctgccggtaaccttgcagctgggtacattgctcaaaagataggcctgcccatccgtctggtcgtggcagtgaaccgcaatgacatcatccacaggactgtccagcagggagacttctctctctctgaggctgttaaatcaaccttggcatcagctatggacattcaggtgccctacaacatggagagggtgttctggctgctctctggctctgacagccaggtgacaagagccctcatggagcagtttgaaaggacccaaagtgtgaatctgcccaaggaactgcacagcaagcactccccggtgctgcctcgcccctgcctctgcagccaagttcccggaagctgtcctggctgctggcctgacccctgagactcccgcggagatcgtagccctggagcacaaggagacacgctgcaccctgatgcggagaggtgacaactggatgctgatgcttcgggacaccattgaggaccttagccgacagtggaggagtcatgccctcaacacctcccagtagcctggctggaggtggctttctttaggcttcagatcccaggaagatgcaccttctgagctgccttgtgcaccctccccattaagcgtaggttaggagg

SEQ ID NO: 278947 - DNA, 1155 bp, Artificial Sequence
  derived and/or modified sequence
atgtggtacgtgagcaccagaggcgtggcccccagagtgaacttcgagggcgccctgttcagcggctacgcccccgacggcggcctgttcatgcccgaggagctgccccagctggacagaggcaccctgtgccagtggagcaccctgagctaccccggcctggtgaaggagctgtgcgccctgttcatcggcagcgagctgctgcccaaggacgagctgaacgacctgatcgacagagccttcagcagattcagacacagagaggtggtgcacctgagcagactgagaaacggcctgaacgtgctggagctgtggcacggcgtgacctacgccttcaaggacctgagcctgagctgcaccacccagttcctgcagtacttcctggagaagagagagaagcacgtgaccgtggtggtgggcaccagcggcgacaccggcagcgccgccatcgagagcgtgcagggcgccaagaacatggacatcatcgtgctgctgcccaagggccactgcaccaagatccaggagctgcagatgaccaccgtgctgaagcagaacgtgcacgtgttcggcgtggagggcaacagcgacgagctggacgagcccatcaagaccgtgttcgccgacgtggccttcgtgaagaagcacaacctgatgagcctgaacagcatcaactggagcagagtgctggtgcagatggcccaccacttcttcgcctacttccagtgcacccccagcctggacacccaccccctgcccctggtggaggtggtggtgcccaccggcgccgccggcaacctggccgccggctacatcgcccagaagatcggcctgcccatcagactggtggtggccgtgaacagaaacgacatcatccacagaaccgtgcagcagggcgacttcagcctgagcgaggccgtgaagagcaccctggccagcgccatggacatccaggtgccctacaacatggagagagtgttctggctgctgagcggcagcgacagccaggtgaccagagccctgatggagcagttcgagagaacccagagcgtgaacctgcccaaggagctgcacagcaagcacagccccgtgctgcccagaccctgcctgtgcagccaggtgcccggcagctgccccggctgctggcccgacccctag

SEQ ID NO: 278948 - DNA, 1155 bp, Artificial Sequence
  derived and/or modified sequence
atgtggtatgtaagcacccggggagtggcccctagagtgaactttgaaggggcactattttctgggtacgcccctgatggaggtctattcatgccggaggagttgccacaattggatcgcggcaccctctgtcagtggtccaccctgagctaccctggactcgttaaagaactctgcgcattgtttatcggttctgagctgttgccaaaggatgagctgaatgatttgatagacagggccttttcccgatttcggcaccgggaggtagtgcacctatcccggctacgaaacggacttaatgtgctggaactctggcacggtgtgacgtacgctttcaaggatttaagtctatcctgcaccacccagtttcttcagtactttctggaaaagagggagaagcacgtaacagtggtcgttggtacgtccggcgacacaggctccgccgctatcgagtcagtccaaggcgcaaaaaacatggatatcatcgtcctgctgccaaagggacactgcacaaagatacaggagctacagatgacaactgtgctcaagcagaacgtgcacgtgttcggtgtcgagggaaactccgatgagctggatgagccaatcaagacggtgttcgctgacgtcgccttcgtgaagaagcacaatcttatgtctttgaattctatcaattggtcacgagtccttgtccaaatggcccaccatttttttgcctatttccagtgcactccttcacttgatacgcaccctctgcccttggtggaggttgtggtgccgacgggcgctgccggtaatctcgcagcggggtatatcgcgcaaaaaatcggtctccctatcaggttggttgtcgccgtgaacagaaacgatataatccaccgcactgtgcagcagggggacttctcactctctgaggccgtgaagtcaacacttgcatcagccatggacatacaggtgccgtataacatggagcgggtgttctggctcttatcaggttcggattcacaggttactcgcgccctgatggagcagttcgaacgtacccagagcgtcaacctccccaaggagctgcattctaagcattcaccagttctgcctagaccctgcctctgctctcaggtccccggttcatgccctggctgttggcccgatccctag

SEQ ID NO: 278949 - DNA, 1155 bp, Artificial Sequence
  derived and/or modified sequence
atgtggtacgtgtccacccggggcgtggccccccgggtgaactttgaaggagccctcttcagcggctacgccccagatggcggcctcttcatgcctgaggagctgccccagctggaccggggcaccctgtgccagtggagcaccctgagctacccaggcctggtgaaggagctgtgtgccctcttcatcggcagcgagctgctgcccaaggatgagctgaatgacctgattgaccgggccttcagccgcttccgccaccgggaggtggtgcacctgagccggctgagaaatggcctgaatgtgctggagctgtggcacggcgtgacctacgccttcaaggacctgagcctgagctgcaccacccagttcctgcagtacttcctggagaagcgggagaagcacgtgacagtggtggtgggcaccagcggggacaccggcagcgctgccatcgagagcgtgcagggcgccaagaacatggacatcatcgtgctgctgcccaagggccactgcaccaagatccaggagctgcagatgaccaccgtgctgaagcagaatgtgcacgtgtttggagtggagggcaacagtgatgagctggatgagcccatcaagacagtgtttgctgatgtggcctttgtgaagaagcacaacctgatgagcctgaacagcatcaactggagccgggtgctggtgcagatggcccaccacttctttgcctacttccagtgcacccccagcctggacacccaccccctgcccctggtggaggtggtggtgcccaccggggctgctggcaacctggccgccggctacatcgcccagaagattggcctgcccatccggctggtggtggccgtgaacagaaatgacatcatccacaggacagtgcagcagggcgacttcagcctgtctgaggccgtgaagagcaccctggccagcgccatggacatccaggtgccctacaacatggagagggtcttctggctgctgagcggcagtgacagccaggtgacccgggccctgatggagcagtttgagaggacccagagcgtgaacctgcccaaggagctgcacagcaagcacagccctgtgctgccccggccctgcctgtgcagccaggtgcccggcagctgccccggctgctggccagacccctag

SEQ ID NO: 278950 - DNA, 1959 bp, Artificial Sequence
  derived and/or modified sequence
agctccggccccgaccggaagccccaccgcaccgtcagggacgcggactcgggagtgcgcacattcgcagcccgggcagccctgctgcgcaccgggcctcgcgccccgcgccccgcgccccgcgccccgcgccccgcaccggcctccaggatcatgtggtatgtcagcaccaggggcgtagccccacgggtcaactttgagggggccctcttctctggctatgcacctgacgggggcctctttatgcctgaagagctcccacagttggacagagggaccctgtgccagtggagcacactctcctatcctggcctggtgaaggagctgtgtgccctcttcattggctctgagctccttccaaaagatgaattaaatgatctgatcgaccgagccttcagcagattccgtcacagagaagtggtccatctgtccaggttgaggaatgggctgaacgtgttggagctgtggcatggcgtcacatatgcatttaaggacctgtccctgtcctgcacaacacagttcctgcagtacttcctggagaagagggagaagcacgtcactgtggttgtaggaacatctggggacacaggaagtgctgccattgagagtgttcaaggggcaaagaacatggacattatcgttctgctgcccaaaggtcactgcacaaagattcaggagctccagatgacaacggtgctgaagcagaacgtacatgtgtttggagtggagggaaacagcgatgagctcgatgagccgatcaagactgtgtttgccgatgtggcttttgtcaagaagcacaatctgatgagcctgaattcgatcaactggtcccgggtcctggtgcagatggcccatcacttctttgcttacttccagtgtacgccatccttggacacacatcccctacccctggtggaggtggttgtgccaacaggggctgccggtaaccttgcagctgggtacattgctcaaaagataggcctgcccatccgtctggtcgtggcagtgaaccgcaatgacatcatccacaggactgtccagcagggagacttctctctctctgaggctgttaaatcaaccttggcatcagctatggacattcaggtgccctacaacatggagagggtgttctggctgctctctggctctgacagccaggtgacaagagccctcatggagcagtttgaaaggacccaaagtgtgaatctgcccaaggaactgcacagcaagcactccccggtgctgcctcgcccctgcctctgcagccaagttcccggaagctgtcctggctgctggcctgacccctgagactcccgcggagatcgtagccctggagcacaaggagacacgctgcaccctgatgcggagaggtgacaactggatgctgatgcttcgggacaccattgaggaccttagccgacagtggaggagtcatgccctcaacacctcccagtagcctggctggaggtggctttctttaggcttcagatcccaggaagatgcaccttctgagctgccttgtgcaccctccccattaagcgtaggttaggaggtttccgggaggctgctcagctggatctggagccagctggctttgctccgttccctggctagtctgtgcctggtcaccagggaggctgagtgaggggctgtgaacagttgccggaagcaccccctccctccccggcccgtgcagcagtgtctgagctgtagtgaaagtttcagggcctgcaaaagaagaggcttgggcacaggactgaccatggctccaggggtttaggaccccagacctgtgaaggtgggagcagctcaccaccttcacgcaggctttgtatgttctctgagccttagttgattttggcccccaaaccaaatccaaaggttctggcccaccttgtcagaggcttccaccctgctcacatgttgggaatccctggaataaaatgcttgttcagtgtg

SEQ ID NO: 278951 - DNA, 1155 bp, Artificial Sequence
  derived and/or modified sequence
atgtggtacgtgagcacccggggcgtggccccccgggtgaacttcgaaggggccctgttctctgggtatgccccggacggaggcctgtttatgcctgaggagttaccacagctggacagaggtacgctttgccagtggtcgaccctgtcatatcctggcttggtgaaggaactgtgcgccctgttcattgggtcagagctgcttcccaaagatgaactgaatgatctgatagatcgcgcgttcagtagatttcgacaccgcgaagtggtgcatctgagccgccttaggaacggcctcaacgtgttagagctttggcatggggtgacatacgcgttcaaagatctgagtctgtcgtgcaccactcaattcttacagtactttctggagaagcgggagaagcacgtaacagtggtggtcggaaccagcggggacaccggatcagccgcaatagaaagcgtgcagggtgcgaagaatatggatataatcgtccttttgcccaagggccactgcaccaaaattcaggagctgcagatgaccacagttcttaaacaaaacgtgcatgtgttcggcgtggaagggaactctgatgaattggatgagccaattaaaaccgtgttcgccgacgtcgccttcgtcaagaaacataacttgatgagtctgaatagtattaattggtctcgagtgttggttcagatggcccatcatttcttcgcttactttcagtgcactccatctctagacacacatccgctgcctctcgtcgaggtggttgtgcccaccggagcagccggtaacttggcggcgggttatatagctcagaaaatcggactgcccattcggcttgtggtcgctgtcaaccgaaatgatattatccataggaccgtgcagcagggagatttcagcttatctgaggctgtgaagtcaactctggcttcagccatggacatccaggtgccttacaacatggaacgggtattctggcttctctccggcagcgacagccaggtgactagggctctcatggagcaatttgaaagaactcagtccgtgaatctccctaaggaacttcactcaaagcatagccctgtgttgcctcgaccgtgtctctgtagccaagtccctggcagttgccctgggtgctggcccgacccttag

SEQ ID NO: 278952 - RNA, 1155 nt, Artificial Sequence
  derived and/or modified sequence
augugguaugucagcacucgcggaguugcccccagagugaacuuugaaggugcucuuuuuucuggcuaugccccugacgguggccuguucaugcccgaagaacucccccaacucgaccgcggcacauuaugucaguggucaacucuaucguacccuggucucgucaaggagcugugcgcacuguuuauuggcuccgaacuucucccuaaagacgagcugaacgacuugauugaucgcgcuuucucccgauuuagacaucgcgaaguaguacaccugagccggcuuaggaacggccuaaacguucuggagcuuuggcauggcgugacuuaugcauucaaggaccuuagucucucaugcacaacgcaauuccugcaguacuuccucgagaaaagagagaagcacguuaccgucgucgugggcacaucuggagauacggggagcgcggcuauugaguccguccagggugccaaaaacauggacauuaucguucugcugccaaaaggacacugcacuaaaauucaggaacuucaaaugacuaccgugcugaaacaaaacguucaugucuucggcgucgaaggcaauucugaugaacucgaugaaccgauaaaaaccgucuucgccgaugucgccuucguaaagaaacacaacuuaaugagucuuaacucuaucaacuggaguagaguucucguccaaauggcucaccauuucuuugccuauuuucaauguacccccucucuggacacacacccacuaccgcugguggagguagugguacccaccggugcugcaggaaaccuggcugcuggcuacauugcccagaaaauuggucugccaauuagacucguuguggcagugaaucgcaaugacauuauacaucgcacggugcaacagggcgauuucucucucucugaggcggucaaauccaccuuggccuccgcuauggacauccaaguaccuuacaauauggaaaggguguuuugguuacucagcgguuccgacucccagguaaccagggcccucauggagcaauuugaacgaacccaauccgugaauuugccuaaggaguugcacucaaaacacagcccugugcucccucgucccugucugugcucccaggugccuggcagcuguccgggaugcuggcccgaccccuag

SEQ ID NO: 278953 - RNA, 1155 nt, Artificial Sequence
  derived and/or modified sequence
augugguaugucagcacucgcggaguugcccccagagugaacuuugaaggugcucuuuuuucuggcuaugccccugacgguggccuguucaugcccgaagaacucccccaacucgaccgcggcacauuaugucaguggucaacucuaucguacccuggucucgucaaggagcugugcgcacuguuuauuggcuccgaacuucucccuaaagacgagcugaacgacuugauugaucgcgcuuucucccgauuuagacaucgcgaaguaguacaccugagccggcuuaggaacggccuaaacguucuggagcuguggcauggcgugaccuacgcauucaaagaccugucacuuagcuguaccacucaauuccugcaguacuuuuuagagaagcgagaaaaacacguuaccgugguggugggcaccucuggcgacacuggcagcgcggccaucgaaagcguucagggagccaaaaauauggauaucaucgugcugcucccuaaaggacauugcacaaaaauucaagaacuccaaaugacaaccguacuaaagcaaaacgugcacgucuuuggcguggaggggaauagcgacgagcuggacgaacccauuaagacuguguuugccgaugucgccuucguaaaaaaacacaaucuuaugagucuuaauagcaucaauuggagccgcguucuggugcagauggcucaccauuuuuucgcauauuuccaguguacuccgagucuagauacacaucccuuacccuuagucgaaguggucgugcccacgggugcugcagggaaccucgccgccggauauauagcccaaaaaaucggacugccaauccgccugguggucgcaguuaaccgcaacgauauaauucauagaaccguucaacagggagacuuuucucugagugaggcugucaaaucuacccuggcuuccgcaauggauauacaggugcccuauaacauggaaagaguguuuuggcuuuugagcgggucugacucccagguuaccagggcccucauggaacaauuugagcgcacccaaagcgugaaucuacccaaagaauuacacaguaaacacucucccguccugccucgucccugccuuugcagucaagugccuggcaguuguccugguuguuggcccgaccccuag

SEQ ID NO: 278954 - protein, 126 aa, Artificial Sequence
  derived and/or modified sequence
MWYVSTRGVAPRVNFEGALFSGYAPDGGLFMPEELPQLDRGTLCQWSTLSYPGLVKELCALFIGSELLPKDELNDLIDRAFSRFRHREVVHLSRLRNGLNVLELWHGVTYAFKDLSLSCTTQFLQY

SEQ ID NO: 278955 - protein, 372 aa, Artificial Sequence
  derived and/or modified sequence
MDQYKFYDPSPPRRRGNWITLKMRKLIKSKKDINRERQKSLTLTPTRSDSSEGFLQLPHQDSQDSSSVGSNSLEDGQTLGTKKSSNTTSFEDISPQGVSDDSSTGSRVHAGAVNNQSRPQSHSSGEFSLLHDHEAWSSSGSSPIQYLKRQTRSSPVLQHKISETLESRHHKIKTGSPGSEVVTLQQFLEESNKLTSVQIKSSSQENLLDEVMKSLSVSSDFLGKDKPVSCGLARSVSGKTPGDFYDRRTTKPEFLRPGPRKTEDTYFISSAGKPTPGTQGKIKLVKESSLSRQSKDSNPYATLPRASSVISTAEGTTRRTSIHDFLTKDSRLPISVDSPPAAADSNTTAASNVDKVQESRNSKSRSREQQSS

SEQ ID NO: 278956 - DNA, 1119 bp, Artificial Sequence
  derived and/or modified sequence
atggatcaatacaaattctacgaccctagcccgccccggcgccggggcaactggatcaccctcaagatgcgaaaactaattaaaagcaagaaagacatcaatcgggagcggcagaagtcattaactttgacacccactcgctcggactcctcagagggctttctacagctgcctcaccaggatagccaagatagctcctccgtggggagtaactcactggaagacggacagacactgggtaccaaaaaatcttctaatacgacgtcttttgaggacatctctccgcagggcgtaagcgatgattcatccaccgggtcacgggtccacgccggcgccgttaataatcagtccagaccgcagtcacattcaagcggcgagttttcactgcttcacgatcacgaggcatggtcttcatctgggtcgtccccaatccagtacctgaagcgccaaacccgaagctccccagttctgcaacataagattagcgagacattggagtctcggcaccacaaaattaagactgggtcccctggctcagaagttgtgacattgcaacagtttttagaggagagcaataagctgacctccgtccaaatcaagagcagctctcaagagaacttgcttgacgaagtgatgaagagtttaagtgtgagctccgattttctgggcaaagacaagccagtcagctgcgggctagctcgctccgtgagcgggaagacacccggcgacttctatgaccggcgaactacgaagcccgagtttctgaggccaggccctaggaagacagaagacacctatttcatctcatccgcaggaaaaccgacgcccggaacgcaggggaagatcaagctcgttaaggagtcgagtctgtcaaggcaatcgaaggattccaacccatacgcaaccttaccgcgcgcttcatccgtgatcagtacagccgagggaactacaaggcggacctctatccatgatttcttgacaaaggactcacgactccctatctctgtggatagccctccagctgctgcagatagtaataccaccgccgctagtaacgttgacaaagtgcaggagtccaggaactctaagagcagatcacgggagcaacagtcctcttag

SEQ ID NO: 278957 - DNA, 1119 bp, Artificial Sequence
  derived and/or modified sequence
atggaccagtacaagttctatgaccccagccccccaagaagaagaggcaactggatcaccctgaagatgaggaagctgatcaagagcaagaaggacatcaaccgggagcggcagaagagcctgaccctgacccccaccaggagtgacagcagcgagggcttcctgcagctgccccaccaggacagccaggacagcagctctgtgggcagcaacagcctggaggatggccagaccctgggcaccaagaagagcagcaacaccaccagctttgaggacatcagcccccagggcgtgtctgatgacagcagcacaggcagccgggtgcacgccggggctgtgaacaaccagagccggccccagagccacagcagcggggagttcagcctgctgcatgaccacgaggcctggagcagcagcggcagcagccccatccagtacctgaagaggcagaccaggagcagccctgtgctgcagcacaagatcagcgagaccctggagagccgccaccacaagatcaagacaggcagccctggcagcgaggtggtgaccctgcagcagttcctggaggagagcaacaagctgacctctgtgcagatcaagagcagcagccaggagaacctgctggatgaggtgatgaagagcctgtctgtgtccagtgacttcctgggcaaggacaagcctgtgtcctgtggcctggcccggtctgtgtctgggaagacccctggggacttctatgacaggaggaccaccaagccagagttcctgcggcccggccccaggaagacagaggacacctacttcatcagcagcgctgggaagcccaccccaggcacccagggcaagatcaagctggtgaaggagagcagcctgagccggcagagcaaggacagcaacccctatgccaccctgccccgggccagcagcgtcatcagcacagctgagggcaccaccaggaggaccagcatccatgacttcctgaccaaggacagccggctgcccatctctgtggacagccccccagctgctgctgacagcaacaccacagctgccagcaatgtggacaaggtgcaggagagcaggaacagcaagagccgcagccgggagcagcagagcagctag

SEQ ID NO: 278958 - DNA, 1119 bp, Artificial Sequence
  derived and/or modified sequence
atggaccagtacaagttctacgaccccagccccccccggcggcggggaaactggatcacattgaagatgaggaagctcatcaagtcaaaaaaggacattaatagggagcggcaaaaaagccttactttaaccccgacacggtccgattcttctgaagggttcctccagctccctcatcaggattcccaggacagttcctctgtgggcagtaacagcctcgaggacgggcagacactcggcacgaagaagtcctcaaataccacctcatttgaggatatcagcccgcagggggtgagcgacgattcttccaccgggagtcgtgtgcatgctggcgccgtcaacaatcagagccgccctcagagtcactcttcgggcgagttttccctgctccacgaccacgaagcctggtcctcctctggcagttctccaatacagtacttaaagcgccagacccggtcgagcccagtgctccaacacaaaatttcggaaacgctcgagtcccgacatcacaaaattaagactgggtccccgggcagcgaggtcgtgactttgcaacagtttctcgaggagtccaataagctcacttccgtgcaaatcaagtcttcttctcaggagaacttacttgacgaggttatgaagtctctctctgtgagttccgatttcctcggaaaagataagccggtatcctgcgggcttgccagatcagtgagtggaaaaacacctggcgacttttacgatcgccgtacaaccaaacccgagtttttacgccctggcccgcgaaagacagaagacacatacttcatatcctctgccggtaagccaaccccagggacacagggcaagatcaagctggtgaaggaatcttccttgtcacggcaatccaaggatagtaacccctacgcaacactgccaagagcttctagtgtgatcagcaccgctgagggaacaacacgccgcacctcgatccatgacttccttactaaagattctagactcccgatcagtgtggacagcccgcccgccgcagcagattctaataccaccgccgcctccaatgtagacaaggtgcaggagagcaggaactccaaaagccggtcccgtgagcagcaatcatcctag

SEQ ID NO: 278959 - DNA, 1119 bp, Artificial Sequence
  derived and/or modified sequence
atggatcagtacaaattttacgatccgagcccacccagacgaagagggaattggatcactttaaagatgcgcaagctcattaagtccaagaaggacataaatcgcgaaaggcagaagtctctgaccttgacacccacaagatccgattcctcagaaggattcttacagcttccacatcaggatagtcaagatagtagtagtgtcgggagcaattcactcgaagatggtcaaaccctcggcacaaagaagagctccaataccacgtctttcgaggacatatcacctcagggagttagcgacgactcctcaacaggcagccgcgttcatgcgggagcagtgaacaaccagagcaggccccagagccactcctctggggagttctcacttctgcatgaccatgaagcctggagctctagcgggagctcaccaattcaatacttgaaaagacaaacacggagctctcccgtgttgcagcacaagattagcgaaactctggagtctagacaccataagatcaagacaggatcccctggctctgaggtagttacactccagcagtttctagaagagtctaacaagttaacctctgtgcagataaaatctagctcgcaggaaaatttacttgatgaggtgatgaaaagcctttccgtgtccagtgactttctaggcaaggataaaccagtgtcttgcgggcttgccagatcagtgtctgggaaaactcccggtgacttttacgacagaagaaccacaaagccagagttcctgcgtccaggacccaggaaaacagaggatacctatttcatcagctcagccggtaagcccacccctggcacccagggcaagattaaattggtcaaagagtccagcctctcccgtcagagtaaagactccaacccgtacgccacgctgccaagagcaagcagtgtgatatccaccgcggaaggcaccaccaggcggacgtctatccacgattttttgacaaaagactccaggctgccaatctccgttgattccccaccagctgcggctgactctaatactaccgcggctagtaatgtggacaaagttcaggaatcacgcaatagcaagagccggagccgtgaacaacaaagttcatag

SEQ ID NO: 278960 - DNA, 4236 bp, Artificial Sequence
  derived and/or modified sequence
aaattatggatcaatacaaattttatgacccatctcctcctagaaggagaggcaactggattactctaaaaatgagaaaattgataaagtctaagaaagatattaatcgggaacgccagaaatctctaacattaacacccacccgctcagactccagtgaaggatttcttcagctccctcatcaagacagtcaagatagttcttcagtaggttcaaactctttagaagatggccagaccttggggaccaagaaaagcagcaatactacatcctttgaagacataagtccacaaggtgttagtgatgattctagtacgggatcaagagttcatgcaggtgcagttaataaccaaagcaggccacaaagccacagcagtggagaatttagcctgcttcatgaccatgaggcttggtccagcagtggtagcagtccaatccagtacttgaaaagacagaccagatcaagcccagtgctccagcacaaaatatctgaaacactggagagtcgacatcacaagatcaaaactggttcccctggaagtgaagttgttactctacaacagtttttggaagaaagcaataagcttacctcagtacagataaagtcctcaagtcaagagaatcttttagatgaagtaatgaaaagtttgtctgtctcttctgactttttgggaaaagacaaaccagttagctgtggtctggccaggtcagtaagtggaaaaaccccaggggacttctatgatagacggacaactaagcctgagtttttgagacctggtcctcgaaaaactgaagatacctacttcattagttctgcgggaaaacctacaccaggcactcaaggaaaaataaaattagtaaaagaatcttctctgtcacgacaatcaaaagatagtaacccttatgcaactttacctcgtgcaagcagcgtgatctcaactgccgaaggaactacacgaaggacaagcatccatgattttttgaccaaggacagtagactgcctatatcagttgattcaccaccagctgctgctgacagcaacaccactgcagcatctaatgtggacaaagtacaagaaagcagaaattcaaaaagcaggtctagggagcaacaaagctcctaattctattacccactacatgacatgtgggccaagtgagagaaaagtgtccttcagtttctcagtatgaagcctttatttctgaagtaacaagacacctagcaactataggaatcatttttaaaaatctttaaggagacttttaacagtccttcgtgaatagagcaggcaagaaatacaaaccttcattccttgaatcaaggagcactactggattcaactgccaaaattttttaaaggttttaggacttactataccttgtactgttaagatctactgaataaaggacgttctctcactaaggaccaggtgttttaaggttaagtgtttaaagaagtactccaagaacaatctgcttttttcatcatttgttttatgaatttatccatgtttgcttaatgcttctgctaagtgttagccaaaatctagccatttatatttagttgtgtaaacctaaattaaatgctgtagtattttgtggaatgtactatatagcaagatacagagaaaattgttttggcatgtcagagccttatttggttagcagactgcatgtgttgatactttttttttcttaaagccaattattttgatgcaaaagaaattcagtttataagataaatctgaaaaatccataatgaaataggagttataaaaaatttatagtgatattaatctttccatatttcccattaagcaacactaagcattcataagttaacccatggtaaagagtgtttttctgaaacttttttttagtaagatggtttttcagcaaatggcattcccaagataaagctgttgtgctttaactcatttcttttctttggtattgggttatgtatgcgtgtgcatttttttaacttgagagctgactgttgcttaagaagttttcttatggcaaaaataatgtaaataagttactatgatctgcattttgccagaaactcatttataattaaggctatcatttattaatgatttttttctcctttatgatattacattaaagttgataactgttattggtacttttgaaatatttgtatgcatttgttacctttaaacatttggaagaagcacaaaaaaatagatttagttaacccagggaaacatcaatttttttagtagttccaattttatatcacagttttattttcttatgaaatcaaaaaatgcattgatactcattaatgcaaattcattatttaacatcaatatcagagtaatcttcaaggtctgaaatgagaaacatactgactttttaaaattttaacagtgtacttcttaggctttcattaccagctctgaagaactttttggaataattccatattccatagtgtgtggtttatgagttgtgggtttcatcactaacccagtaaccataagaaaagtctctctctctctctctctctctctctctttctctctccctctttctctctctctttcgtaggccagtagcaatgttgtgttcacagtctaatttccaaaagaccatcaataaaaaagagagcatgtttaaattgaaatggaacttagagaacttgagcttacttacgtacttcaatgccaccggtaacttaggttttaccaccaaatgctgttaacgttaaatcattttgaaaatcttggatgaaaggtgctatgtaaatggaaatacaaaggattcttactaacatacaaaaataatgcacaacagaaatatctaaaaccttttccgtagactttgaaacatctctctctctcataactccctggattcaagtagcacattggtaataggtatcagagcagtctagagacaattgcatgtcaaaaaatgtacattcatttttaggtggataaaagtaaacatagaaattatgttatggctaaatacagttagtgggtaacttagatttatattagctagcatctaatttgcacaactagaacacatcccagaacaattactgaaaagctgaaatttaatgggtggtgatgtagcccaatgagggcgaatgacattacagcttgacctctccagaacactaatatcctaaaatacagaacatgctgggttaagtgcattagtgcttcaagcagaaaatgctgaaaacaacgtgtaaagtactgaatctgagtaggctgaccctgagaagggacaattaaagagacaaccaagggaacacattgagactacaaaaatatgaataatctcaattatattcatcacacttttttcataccatttcaagaaacgactagacagtagtaaccacatgaatattttactttctccagtataccttgagaagcaaactttgtaggaagccactcttctcccctaaacaacttctgccaaacaataataaagccaactggaaacgaatcggagccattttcattttcctaaccggggcctgacatgctttaaattatctggctgtattctaaatcaacacctaacccctcaaggaaactgaagaatcaatatacagggtaatagctttggctcagagctccaataatgtgcttcagatctgtccatgtggaaatgctttcatccaaatttttaaattggtggttaccaaagagttcacaaaacaggtttgtatgtagcacctttcatgcaaggcatgcaaaaagcctattttaaaatcactgtgcatattatagagttgtagccacctcacaatgaagtactacagcctgtgctgtcttaatggtttatgtcaggaaatgaaaaagatactgtaccaaatctggaattacaatggggagtaataatgtatactaaatgacttttgtattttaagttactttttgtgagtggtgaatttttgtgtttttcttttcagctacacttagtcctgagatgtattttttctttaagtcttgaatgaatacaaaaggagcccattttataatataaaccttgatgtacatgttgagatatttggacaatgaaaatgccttaaaaggaatgcatatggataaagttgcacttataacacccttcaacaaaatctaattttaaattgtctttttcttttctattaagggttttctttttcagtgtctaccattgtacttataactgttattaaataccaaatcaaataatat

SEQ ID NO: 278961 - DNA, 1119 bp, Artificial Sequence
  derived and/or modified sequence
atggaccagtacaagttctacgaccccagcccccccagaagaagaggcaactggatcaccctgaagatgagaaagctgatcaagagcaagaaggacatcaacagagagagacagaagagcctgaccctgacccccaccagaagcgacagcagcgagggcttcctgcagctgccccaccaggacagccaggacagcagcagcgtgggcagcaacagcctggaggacggccagaccctgggcaccaagaagagcagcaacaccaccagcttcgaggacatcagcccccagggcgtgagcgacgacagcagcaccggcagcagagtgcacgccggcgccgtgaacaaccagagcagaccccagagccacagcagcggcgagttcagcctgctgcacgaccacgaggcctggagcagcagcggcagcagccccatccagtacctgaagagacagaccagaagcagccccgtgctgcagcacaagatcagcgagaccctggagagcagacaccacaagatcaagaccggcagccccggcagcgaggtggtgaccctgcagcagttcctggaggagagcaacaagctgaccagcgtgcagatcaagagcagcagccaggagaacctgctggacgaggtgatgaagagcctgagcgtgagcagcgacttcctgggcaaggacaagcccgtgagctgcggcctggccagaagcgtgagcggcaagacccccggcgacttctacgacagaagaaccaccaagcccgagttcctgagacccggccccagaaagaccgaggacacctacttcatcagcagcgccggcaagcccacccccggcacccagggcaagatcaagctggtgaaggagagcagcctgagcagacagagcaaggacagcaacccctacgccaccctgcccagagccagcagcgtgatcagcaccgccgagggcaccaccagaagaaccagcatccacgacttcctgaccaaggacagcagactgcccatcagcgtggacagcccccccgccgccgccgacagcaacaccaccgccgccagcaacgtggacaaggtgcaggagagcagaaacagcaagagcagaagcagagagcagcagagcagctag

SEQ ID NO: 278962 - protein, 737 aa, Artificial Sequence
  derived and/or modified sequence
MVVFNGLLKIKICEAVSLKPTAWSLRHAVGPRPQTFLLDPYIALNVDDSRIGQTATKQKTNSPAWHDEFVTDVCNGRKIELAVFHDAPIGYDDFVANCTIQFEELLQNGSRHFEDWIDLEPEGRVYVIIDLSGSSGEAPKDNEERVFRERMRPRKRQGAVRRRVHQVNGHKFMATYLRQPTYCSHCRDFIWGVIGKQGYQCQVCTCVVHKRCHELIITKCAGLKKQETPDQVGSQRFSVNMPHKFGIHNYKVPTFCDHCGSLLWGLLRQGLQCKVCKMNVHRRCETNVAPNCGVDARGIAKVLADLGVTPDKITNSGQRRKKLIAGAESPQPASGSSPSEEDRSKSAPTSPCDQEIKELENNIRKALSFDNRGEEHRAASSPDGQLMSPGENGEVRQGQAKRLGLDEFNFIKVLGKGSFGKVMLAELKGKDEVYAVKVLKKDVILQDDDVDCTMTEKRILALARKHPYLTQLYCCFQTKDRLFFVMEYVNGGDLMFQIQRSRKFDEPRSRFYAAEVTSALMFLHQHGVIYRDLKLDNILLDAEGHCKLADFGMCKEGILNGVTTTTFCGTPDYIAPEILQELEYGPSVDWWALGVLMYEMMAGQPPFEADNEDDLFESILHDDVLYPVWLSKEAVSILKAFMTKNPHKRLGCVASQNGEDAIKQHPFFKEIDWVLLEQKKIKPPFKPRIKTKRDVNNFDQDFTREEPVLTLVDEAIVKQINQEEFKGFSYFGEDLMP

SEQ ID NO: 278963 - DNA, 2214 bp, Artificial Sequence
  derived and/or modified sequence
atggtggtgttcaacggcctgctgaagatcaagatctgcgaggccgtgagcctgaagcccaccgcctggagcctgagacacgccgtgggccccagaccccagaccttcctgctggacccctacatcgccctgaacgtggacgacagcagaatcggccagaccgccaccaagcagaagaccaacagccccgcctggcacgacgagttcgtgaccgacgtgtgcaacggcagaaagatcgagctggccgtgttccacgacgcccccatcggctacgacgacttcgtggccaactgcaccatccagttcgaggagctgctgcagaacggcagcagacacttcgaggactggatcgacctggagcccgagggcagagtgtacgtgatcatcgacctgagcggcagcagcggcgaggcccccaaggacaacgaggagagagtgttcagagagagaatgagacccagaaagagacagggcgccgtgagaagaagagtgcaccaggtgaacggccacaagttcatggccacctacctgagacagcccacctactgcagccactgcagagacttcatctggggcgtgatcggcaagcagggctaccagtgccaggtgtgcacctgcgtggtgcacaagagatgccacgagctgatcatcaccaagtgcgccggcctgaagaagcaggagacccccgaccaggtgggcagccagagattcagcgtgaacatgccccacaagttcggcatccacaactacaaggtgcccaccttctgcgaccactgcggcagcctgctgtggggcctgctgagacagggcctgcagtgcaaggtgtgcaagatgaacgtgcacagaagatgcgagaccaacgtggcccccaactgcggcgtggacgccagaggcatcgccaaggtgctggccgacctgggcgtgacccccgacaagatcaccaacagcggccagagaagaaagaagctgatcgccggcgccgagagcccccagcccgccagcggcagcagccccagcgaggaggacagaagcaagagcgcccccaccagcccctgcgaccaggagatcaaggagctggagaacaacatcagaaaggccctgagcttcgacaacagaggcgaggagcacagagccgccagcagccccgacggccagctgatgagccccggcgagaacggcgaggtgagacagggccaggccaagagactgggcctggacgagttcaacttcatcaaggtgctgggcaagggcagcttcggcaaggtgatgctggccgagctgaagggcaaggacgaggtgtacgccgtgaaggtgctgaagaaggacgtgatcctgcaggacgacgacgtggactgcaccatgaccgagaagagaatcctggccctggccagaaagcacccctacctgacccagctgtactgctgcttccagaccaaggacagactgttcttcgtgatggagtacgtgaacggcggcgacctgatgttccagatccagagaagcagaaagttcgacgagcccagaagcagattctacgccgccgaggtgaccagcgccctgatgttcctgcaccagcacggcgtgatctacagagacctgaagctggacaacatcctgctggacgccgagggccactgcaagctggccgacttcggcatgtgcaaggagggcatcctgaacggcgtgaccaccaccaccttctgcggcacccccgactacatcgcccccgagatcctgcaggagctggagtacggccccagcgtggactggtgggccctgggcgtgctgatgtacgagatgatggccggccagccccccttcgaggccgacaacgaggacgacctgttcgagagcatcctgcacgacgacgtgctgtaccccgtgtggctgagcaaggaggccgtgagcatcctgaaggccttcatgaccaagaacccccacaagagactgggctgcgtggccagccagaacggcgaggacgccatcaagcagcaccccttcttcaaggagatcgactgggtgctgctggagcagaagaagatcaagccccccttcaagcccagaatcaagaccaagagagacgtgaacaacttcgaccaggacttcaccagagaggagcccgtgctgaccctggtggacgaggccatcgtgaagcagatcaaccaggaggagttcaagggcttcagctacttcggcgaggacctgatgccctag

SEQ ID NO: 278964 - DNA, 2214 bp, Artificial Sequence
  derived and/or modified sequence
atggtggttttcaatggtcttctcaagatcaagatctgtgaggccgtgagtttgaagcctaccgcatggtccctgcgccatgccgttgggcccagaccacagacatttctgcttgatccatatatcgctctcaatgttgatgactccagaatcggccaaacagctacgaaacagaagacaaactctccagcgtggcatgatgagttcgttaccgacgtctgtaatggaaggaagatcgaactggctgtctttcacgacgcacccatcggatacgacgatttcgtagctaattgtacaatccagtttgaggaactactacagaacggaagccgccattttgaggactggatcgacttagaaccagaagggcgggtctacgttatcatagatctgtccgggtcatcaggagaggccccgaaggacaacgaagagagggtgttccgcgagcgcatgaggccaaggaagagacagggcgcagtgcggagaagggtgcatcaggtgaacggtcacaagttcatggcaacatatttgaggcagcctacgtactgtagccactgtcgagatttcatttggggggtaatcggcaagcagggctatcagtgccaggtctgcacatgcgtggtgcataaaaggtgccacgagctcatcattacaaaatgcgcagggctgaaaaagcaggaaacgcctgatcaggttggcagtcagcgcttctctgtgaacatgccgcataagtttgggatccacaattacaaagtcccaactttttgcgatcactgtggcagtctactctggggcctgcttaggcagggtcttcagtgtaaggtgtgtaagatgaacgttcaccgtcgctgtgagaccaacgtggcaccaaattgcggtgtggatgcgagagggattgccaaagtactggccgacttaggtgtaacgccagataagatcacaaacagcggtcagcggcgcaaaaagttaatcgctggggccgaatctccccagcctgcctctggatcatccccaagtgaagaggatagatctaagtctgcccctacttcaccatgtgatcaagagattaaggagcttgaaaacaacatccgcaaagcactgtcattcgacaatagaggggaggagcacagagccgcttctagtcccgacggacagctcatgtcccctggcgagaacggtgaggttcgccagggacaggccaaaaggcttggccttgatgaatttaacttcatcaaggtcctaggaaagggttcgttcggaaaggtgatgctggccgagctgaaagggaaggatgaagtatacgctgtcaaggttcttaagaaggacgtgatacttcaggatgacgatgtcgattgcaccatgaccgagaagaggattctggctctcgctcgcaaacatccatacttgacccagctctactgctgttttcagacgaaggaccgattatttttcgtcatggaatacgtaaacggcggagacctcatgttccagatacagcggtcccggaagttcgacgaacctagaagccgattttacgccgctgaggtgacaagtgccttgatgttccttcaccaacatggcgtaatctaccgcgaccttaaactggacaacatactcttagacgcagagggccattgtaaattagcagacttcggaatgtgcaaagaaggcatcttaaacggtgtaacgacaactacattttgtggaaccccagattacatagctccagagatcctgcaggagctggaatacgggccctcagtggattggtgggccctgggcgttctgatgtacgaaatgatggctggccagccgccattcgaggcagacaatgaagacgaccttttcgaatctatactgcacgacgacgtgctgtatcccgtatggctgtccaaggaggctgtgtcaatcctgaaagcgttcatgacaaaaaaccctcataaacgcttgggctgcgtggcctctcaaaatggcgaggacgcaatcaagcagcacccatttttcaaggagatcgactgggtactcctggaacagaagaagattaagcctcctttcaaacccaggattaagaccaagcgagacgtaaataatttcgaccaggacttcactcgtgaagagccagtattaactctggtggacgaggctattgtaaaacagattaatcaggaagagttcaaaggcttcagctacttcggggaggatcttatgccttag

SEQ ID NO: 278965 - DNA, 2214 bp, Artificial Sequence
  derived and/or modified sequence
atggtggtgttcaacggcctgctgaagatcaagatctgtgaggccgtgtccctgaagcccacagcctggagcctgcggcatgctgtgggcccccggccccagaccttcctgctggacccctacatcgccctgaatgtggatgacagcagaattggccagacagccaccaagcagaagaccaacagccctgcctggcatgatgaatttgtgacagatgtgtgcaatggaaggaagattgagctggccgtgttccatgatgcccccatcggctatgatgactttgtggccaactgcaccatccagtttgaggagctgctgcagaatggcagccgccactttgaggactggattgacctggagcctgagggccgggtgtatgtgatcatcgacctgagcggcagcagtggagaggcccccaaggacaatgaggagagggtcttccgggagaggatgaggcccaggaagaggcagggcgctgtgagaagaagagtgcaccaggtgaatggccacaagttcatggccacctacctgcggcagcccacctactgcagccactgccgggacttcatctggggcgtcatcggcaagcagggctaccagtgccaggtgtgcacctgtgtggtgcacaagcgctgccacgagctgatcatcaccaagtgtgccggcctgaagaagcaggagaccccagaccaggtgggcagccagcgcttctctgtgaacatgccccacaagtttggcatccacaactacaaggtgcccaccttctgtgaccactgcggcagcctgctgtggggcctgctgcggcagggcctgcagtgcaaggtgtgcaagatgaatgtgcaccggcgctgtgagaccaacgtggcccccaactgtggggtggatgcccggggcatcgccaaggtgctggccgacctgggcgtgaccccagacaagatcaccaacagcggccagaggaggaagaagctgattgctggagctgagagcccccagcctgccagcggcagcagccccagtgaagaagatagaagcaagagcgcccccaccagcccctgtgaccaggagatcaaggagctggagaacaacatcaggaaggccctgagctttgacaacagaggagaggagcaccgggccgccagcagcccagatggccagctgatgagccctggagaaaatggagaggtgcggcagggccaggccaagaggctgggcctggatgagttcaacttcatcaaggtgctgggcaagggcagctttgggaaggtgatgctggccgagctgaagggcaaggatgaggtgtatgctgtgaaggtgctgaagaaggatgtgatcctgcaggatgatgatgtggactgcaccatgacagagaagaggatcctggccctggccaggaagcacccctacctgacccagctgtactgctgcttccagaccaaggacaggctcttctttgtgatggagtatgtgaatggaggagacctgatgttccagatccagaggagcaggaagtttgatgagcccaggagccgcttctatgctgctgaggtgaccagcgccctgatgttcctgcaccagcacggcgtcatctacagagacctgaagctggacaacatcctgctggatgctgagggccactgcaagctggccgactttggcatgtgcaaggagggcatcctgaatggagtgaccaccaccaccttctgtggcaccccagactacatcgcccctgagatcctgcaggagctggagtatggccccagcgtggactggtgggccctgggcgtgctgatgtatgagatgatggccggccagcccccatttgaagctgacaatgaagatgacctgtttgagagcatcctgcatgatgatgtgctgtaccctgtgtggctgagcaaggaggccgtgtccatcctgaaggccttcatgaccaagaacccccacaagaggctgggctgtgtggccagccagaatggagaagatgccatcaagcagcaccccttcttcaaggagattgactgggtgctgctggagcagaagaagatcaagccacccttcaagccccgcatcaagaccaagagagatgtgaacaactttgaccaggacttcacccgggaggagcctgtgctgaccctggtggatgaggccatcgtgaagcagatcaaccaggaggagttcaagggcttctcctactttggagaggacctgatgccctag

SEQ ID NO: 278966 - DNA, 2214 bp, Artificial Sequence
  derived and/or modified sequence
atggtggtgttcaacggcctgctgaagatcaagatctgcgaggccgtctctctgaaacccacagcctggtccttacgacacgcagttggcccccgcccacagactttcctccttgatccatacattgcactgaatgttgatgacagcaggatcgggcaaaccgctacaaaacaaaaaacgaattcacctgcctggcacgacgaattcgtcaccgacgtctgtaatggccgtaaaatcgaactggccgtgttccatgatgcccccataggctacgatgacttcgtggcaaattgcaccattcagttcgaggagcttctgcagaacggcagccgtcacttcgaagattggattgatttggagcctgaaggaagggtgtacgtgataattgacctgagcgggtcctccggggaggctcccaaggacaacgaagaaagggtcttccgcgagcggatgagaccacggaagcgacaaggggcggttcggcggcgggtccatcaagtgaacggtcacaaatttatggcaacctacctgaggcagccaacctattgttcccactgtcgggacttcatatggggtgtgattggtaagcagggttaccagtgccaggtctgtacctgtgttgttcacaagagatgtcacgagctgattattacgaaatgcgcgggcctgaagaagcaagagactccggatcaggttggatcccaacgttttagtgtaaatatgccgcacaaattcggcatccataattataaagtgcctacgttctgtgatcactgcggttccctattgtgggggctgttacggcagggcttgcagtgtaaggtctgcaagatgaacgtgcatcgtcgatgtgagacaaacgttgccccaaattgcggggtcgatgccaggggcatcgcgaaagtgctggcagatctgggcgtcacccccgataagattacaaattcgggacagcggcgtaagaagcttattgcgggcgctgagtccccccagcctgcgtctggaagttccccgagtgaggaggacagatccaagagtgcccccacctctccctgtgatcaggaaatcaaagaactcgaaaataacatccggaaggcgctttcattcgacaatcgtggtgaagaacatcgggcagcaagtagtccagacggccaattgatgagtcccggtgagaatggcgaggttcggcagggacaagcaaaaagactgggactggatgagtttaatttcataaaggttctcggcaagggatcattcggtaaagtcatgttggcggagttaaaaggcaaggacgaggtgtacgcggtcaaggtgctgaagaaggatgtgattctgcaggatgacgacgttgattgcaccatgaccgagaagcggatcttagccctggcccgcaagcatccctatttaactcagctatactgttgctttcagacaaaagataggctgtttttcgtcatggaatatgttaatggaggggatctgatgtttcaaattcagagatctcgcaagttcgacgaaccaagaagcagattttatgcagccgaggtcactagtgctcttatgttcttgcaccagcacggcgtgatataccgcgacctaaagctggataacattttgctggatgcagaagggcattgtaaactagcagacttcggcatgtgcaaagaggggatcttaaacggtgtaacaaccacaactttttgcggcaccccagactacatcgctcctgaaatccttcaggaactggagtacggaccctccgtggattggtgggctctgggtgtgctcatgtacgagatgatggctggccagccaccctttgaagccgataacgaagacgatctcttcgagagcatcttacacgacgatgtcttataccccgtgtggcttagcaaggaggctgtctccatcctcaaagcattcatgactaaaaatcctcacaagaggttgggttgcgttgcaagccagaatggcgaagatgcaatcaaacaacatccattttttaaagagattgattgggtgttgctggagcagaagaaaatcaaaccacctttcaagccaaggattaagactaagcgcgacgtaaacaactttgaccaagatttcacccgcgaagagccagtgctgacactggtggacgaggcaatcgtgaagcagatcaaccaggaagagttcaaggggttttcttactttggggaggatcttatgccctag

SEQ ID NO: 278967 - DNA, 2214 bp, Artificial Sequence
  derived and/or modified sequence
atggttgtgttcaatgggttattgaaaattaagatttgtgaggctgtctcccttaaacccaccgcgtggtctctgcgacacgccgtgggccctcgtccccagacctttttactagatccatacatagctctgaacgtggacgactcacgcatcggacagaccgcgaccaagcaaaagacgaattctcccgcatggcacgacgaattcgtaaccgacgtgtgcaatggcaggaagatcgagttggctgtattccacgacgccccaatcggctatgacgatttcgtggcaaactgtacaattcagtttgaggagctgttacagaacggatccaggcactttgaagattggattgatttagaacctgaggggagggtttatgtgattatcgacctcagcggctcaagtggtgaggccccaaaagacaacgaagagagggtcttcagggagaggatgcgaccacgtaagcgccagggtgcagttcgacgcagagttcaccaggtgaacggacataaatttatggctacctacctccgccaacccacttactgctctcactgccgcgacttcatatggggtgtaattggtaagcaaggctaccagtgtcaggtgtgtacttgtgttgtgcacaagcggtgccatgagcttatcattacaaaatgcgcagggctaaaaaaacaggagacccccgaccaggttggaagccaacggttcagcgtgaatatgccccacaagttcggcatccacaattataaggttccgacgttttgtgaccattgtggctcactcctgtgggggctgctccgtcagggactgcaatgtaaggtgtgtaaaatgaatgtccaccgacgttgtgaaaccaatgtggccccaaattgtggggtggacgctaggggcatagccaaggtccttgcagacttgggggtcacgcccgataaaattactaattcaggacagcgaaggaaaaagttgattgcaggggcagagtcaccccagcccgctagcgggtcaagcccatctgaggaagaccggagcaagtctgcacctacctctccttgcgaccaggagattaaagaactcgagaacaatatccgtaaagccctttcattcgataaccggggtgaggagcatagggccgctagttcaccagacggacagctgatgagccccggagaaaatggagaggtcagacagggtcaagccaagcgcctcggcctggacgagtttaacttcatcaaggttctgggtaagggttccttcggcaaggtgatgctcgctgaacttaagggaaaggatgaagtctacgccgtgaaagtcctgaaaaaggatgtgattttacaggatgacgacgttgattgtactatgacagaaaaacgcatcttagcgttagctaggaagcacccttatcttacgcaactatattgctgcttccagaccaaggatcggctgtttttcgttatggagtatgttaatggcggtgacttaatgtttcaaatacaaagatcccgaaagttcgacgagccacgctctcggttctatgccgctgaggtaacctcagctcttatgtttctgcaccagcacggggtgatctaccgagacctcaaactcgacaatatcctgctcgatgccgagggacattgtaagctggccgacttcggcatgtgtaaggaaggtatcctaaatggagtaaccacaaccactttctgcgggacacccgattatatagctcccgagatactgcaagagcttgagtatgggccaagcgtagactggtgggcactgggggtactgatgtacgagatgatggccggacagcctccgttcgaagcagacaatgaggacgacctgtttgagtccatcctacacgacgatgtgctgtatccggtttggctcagtaaggaagccgtcagcatcctcaaagcctttatgactaagaatccccataagcgtctgggctgcgtggccagtcagaacggagaagacgccatcaaacaacacccatttttcaaggagatcgactgggttctcctggagcaaaagaaaatcaagcccccattcaaaccccgtatcaaaaccaaaagggatgtgaacaattttgaccaggacttcacccgcgaagagccagtcttgactctggtcgatgaagctatagttaaacaaattaatcaggaagagttcaagggtttctcttatttcggtgaggatttgatgccttag

SEQ ID NO: 278968 - DNA, 5650 bp, Artificial Sequence
  derived and/or modified sequence
cagcccccgcggcttgcagcggagccgacagctcgtcttctcttctggaggtgcagctggtggtcggggggagagacttgctccaaacacggacatcccccagctctcccccctccctgttttccgttaggaacccggcgaggaaatacatgcactggctgagaatcgcccgcgccagggcgcaacgccacaaggtgtagggagtgtgcggggtggggcgaaaggggacccaagagtccctgtggctcggagtgccgggccgtcggttcttcattcctgccctcggggcagacggagtgaccccggcccccactccccgccccgaccatggtagtgttcaatggccttcttaagatcaaaatctgcgaggccgtgagcttgaagcccacagcctggtcgctgcgccatgcggtgggaccccggccgcagactttccttctcgacccctacattgccctcaatgtggacgactcgcgcatcggccaaacggccaccaagcagaagaccaacagcccggcctggcacgacgagttcgtcaccgatgtgtgcaacggacgcaagatcgagctggctgtctttcacgatgcccccataggctacgacgacttcgtggccaactgcaccatccagtttgaggagctgctgcagaacgggagccgccacttcgaggactggattgatctggagccagaaggaagagtgtatgtgatcatcgatctctcagggtcgtcgggtgaagcccctaaagacaatgaagagcgtgtgttcagggaacgcatgcggccgaggaagcggcagggggccgtcaggcgcagggtccatcaggtcaacggccacaagttcatggccacctatcttcggcagcccacctactgctcccattgcagagacttcatctggggtgtcataggaaagcagggataccagtgtcaagtctgcacctgcgtggtccacaagcggtgccacgagctcataatcacaaagtgtgctgggttaaagaagcaggagacccccgaccaggtgggctcccagcggttcagcgtcaacatgccccacaagttcggtatccacaactacaaggtccctaccttctgcgatcactgtgggtccctgctctggggactcttgcggcagggtttgcagtgtaaagtctgcaaaatgaatgttcaccgtcgatgtgagaccaacgtggctcccaactgtggagtggatgccagaggaatcgccaaagtactggccgacctgggcgttaccccagacaaaatcaccaacagcggccagagaaggaaaaagctcattgctggtgccgagtccccgcagcctgcttctggaagctcaccatctgaggaagatcgatccaagtcagcacccacctccccttgtgaccaggaaataaaagaacttgagaacaacattcggaaagccttgtcatttgacaaccgaggagaggagcaccgggcagcatcgtctcctgatggccagctgatgagccccggtgagaatggcgaagtccggcaaggccaggccaagcgcctgggcctggatgagttcaacttcatcaaggtgttgggcaaaggcagctttggcaaggtcatgttggcagaactcaagggcaaagatgaagtatatgctgtgaaggtcttaaagaaggacgtcatccttcaggatgatgacgtggactgcacaatgacagagaagaggattttggctctggcacggaaacacccgtaccttacccaactctactgctgcttccagaccaaggaccgcctctttttcgtcatggaatatgtaaatggtggagacctcatgtttcagattcagcgctcccgaaaattcgacgagcctcgttcacggttctatgctgcagaggtcacatcggccctcatgttcctccaccagcatggagtcatctacagggatttgaaactggacaacatccttctggatgcagaaggtcactgcaagctggctgacttcgggatgtgcaaggaagggattctgaatggtgtgacgaccaccacgttctgtgggactcctgactacatagctcctgagatcctgcaggagttggagtatggcccctccgtggactggtgggccctgggggtgctgatgtacgagatgatggctggacagcctccctttgaggccgacaatgaggacgacctatttgagtccatcctccatgacgacgtgctgtacccagtctggctcagcaaggaggctgtcagcatcttgaaagctttcatgacgaagaatccccacaagcgcctgggctgtgtggcatcgcagaatggcgaggacgccatcaagcagcacccattcttcaaagagattgactgggtgctcctggagcagaagaagatcaagccacccttcaaaccacgcattaaaaccaaaagagacgtcaataattttgaccaagactttacccgggaagagccggtactcacccttgtggacgaagcaattgtaaagcagatcaaccaggaggaattcaaaggtttctcctactttggtgaagacctgatgccctgagagcccactgcagttggactttgccgatgctgcaagaaggggtgcagagaagactcctgtgttggagacactcagcaggtcttgaactacttctcctcctcggagccccagtcccatgtccactgtctatttattgcattcccttgccccaggccacctcctccccctcccacctggtgaccagaaggcgctctcggttcttgtctcaccagtaatgcagactcattgggtcagcaattagctgtatacactgccgtgtttggaccattggcaagcctggttccactcctcaggggctcctggcagtgaagcaacttcagttcttttactgcaaagaacagaaaaaagaaagaaagcaaacaagaagactccggctctgctatcggacacagatcctgatccctcttgcttcttttccctcctgcaccgcagcttgccatccctgcccttctgtcctggagaagagactggtgcttctccgcacacacgagggagggcgcccttgaggcatgccctctgagggagggagaccagagatgcagggattggccagctgggttggtttgctctggaatggctaactcttgcctgctttggttttagcttttcagcatgccaaagtcatgtaagtttgtgtcttgtggaagaaatcctctttgtggaaaaagaaacagggttttgaactctgttaacatttgaaaaatatattttcaaattcactttctaattggccaaaagagatgagttccagtctgaatacaggtagatattaaagggctaataaaaaatgagaaaccggtcgtccaaggtggatgctgtcaatgcccgagtgacacatgagagctgtatgaattgagagaaaaggcaacaagtagcattcttcatcattcaagttctacctggacacaaaggcgaggaccctggggttccaacaaagctcagctcccagattctctttccagtttcatcctaagttcctagcataaacactatttattttctgcagcagtgtgttatttttgcgcacttatacaaaatggtagtactactgtgttgtggtttttaaacattaaacatgtaaagttatatacgaaatatctgcttttggaataagcagaatgaggctaaacatgggttatacaaagggtatctggaaactgaagagcaacttgttagaaaactgacaatgtcgcaagatgtactcagttttgtttctgtgtgacatgcaatggcaactcatgtggacactattgaagggatgtgacattacctcctgtagatatgctaacagtgttattctttcatttccaagggttctctgtggctttgtgtatatgtttcccagaggtcatttgattacctaatttactgaactgatttagcagggaatggaatccattccaactattgcacgtggatttcccagctgcccctaaatatatatacttgtgagtggcaaagtggcactaatgaagcttttgccttttgtacatttgagatttttgtatatagtgtttgctgcaaggcctgtggaattaattcgttgcatatagaggtatcaactgctgcatgttcaggcatattataaaactttagtctatgaaagaataattataataatgtccaggtgcaatactctgtaagtctattggttcaagttaccgagagataggtgtgttcctttatgggggatgggggggtgtgttggggattctttgtattgtttatttcattttggtttattttaaaagatgtaaacatatattaagctatattaaatctcacatacagttcttctgtgctctattataccctgatagagatgggggagagaaaggaatgtttttgatggtggtttcaaagctcggacagtaactatcttgagcccattagagagtctgtgtccatatttgcatctggctggtcatagcctttgttactaatgatgacattcagttctcttttgtttttattttttaaaaactcaggtgtaattattatctgttcttaagataattgcaaatattaaatattatgatatatcaattcatgtgtttggcataccagtgaatgatgaagaacatgagattaatttaatttatcttcggtaacttgacattctggagagagactatcttctggagttgagtacaagcacagaaacatctttacggtggcatcatctcattttttaggaagacatgataatactgcccatcatattcatgtgtaactactgttctttcttctgctttcttcaccataataaactttggacaaccaagcaagctctaaccgcaatgccagatggccttgtccgagggcctagtgtttgcacggcagtgggaactgggcctttcctacaggacaactggcaagtttgctgggaagtcaaataatacattccacctggcagctgaaggcagccagtcagtctgtcccagaaagggcccttttcagcacccaaagctgggctggctgggatgcctctggctggtgaagttctcacataggctgatttaaatccagcaaaggtctatagaaaaaggcttgcgtgttcgttgagtaatcattgtttcattttcatttttacgagagtttgaaaatagacacactgttaacacttctgccagttttttctgatctttccagccccaccccctttctctttctctctctctctcaaagaaaaaaaaaatgggagtgcaaaaaaaacaaagccaaaaaatatatgaaggatagctgttcttctgtgttctctcattatggactttgtgaagtagaaacataattttttttcctccaaaggtgaaaaaacaatgcattcttgctttaaaaaaaaaaaagaaggctaaaaaattacctctttttaaattatgtgcaaaataattctggctaactgtaaaatgtattcaattttaggattttttttttttgtattgtgatgctttatttgtacatttttttcctttctggatgtaattttaatctcttgccattcattagtgttatttcattgtaaacgttattgtgccaaatgtactgtattcaaaaggatgtgaatgtgtattgtttcagaacctaataaatacaatgacgttaagtctta

SEQ ID NO: 278969 - protein, 127 aa, Artificial Sequence
  derived and/or modified sequence
MVVFNGLLKIKICEAVSLKPTAWSLRHAVGPRPQTFLLDPYIALNVDDSRIGQTATKQKTNSPAWHDEFVTDVCNGRKIELAVFHDAPIGYDDFVANCTIQFEELLQNGSRHFEDWIDLEPEGRVYV

SEQ ID NO: 278970 - DNA, 384 bp, Artificial Sequence
  derived and/or modified sequence
atggtggtgttcaacggcctgctgaagatcaagatctgcgaggccgtgagcctgaagcccaccgcctggagcctgagacacgccgtgggccccagaccccagaccttcctgctggacccctacatcgccctgaacgtggacgacagcagaatcggccagaccgccaccaagcagaagaccaacagccccgcctggcacgacgagttcgtgaccgacgtgtgcaacggcagaaagatcgagctggccgtgttccacgacgcccccatcggctacgacgacttcgtggccaactgcaccatccagttcgaggagctgctgcagaacggcagcagacacttcgaggactggatcgacctggagcccgagggcagagtgtacgtgtag

SEQ ID NO: 278971 - DNA, 384 bp, Artificial Sequence
  derived and/or modified sequence
atggtggtctttaacggcctgctaaaaattaagatttgcgaggccgtctcccttaagcccaccgcgtggtcacttcgacacgctgtcgggcctaggccacagacgtttctccttgatccttacatcgctctcaatgtcgatgactcgaggattgggcagaccgccacgaaacagaagaccaactctccggcctggcacgatgagtttgtcacagatgtgtgtaatggtcgaaaaatagaactcgcggtattccacgatgcccctattggctacgacgattttgtcgccaactgcacaatccagttcgaagaattgttacagaacgggtcgcggcactttgaagattggattgatctcgaaccagagggccgtgtgtacgtttag

SEQ ID NO: 278972 - DNA, 384 bp, Artificial Sequence
  derived and/or modified sequence
atggtggtgttcaacggcctgctgaagatcaagatctgtgaggccgtgtccctgaagcccacagcctggagcctgcggcatgctgtgggcccccggccccagaccttcctgctggacccctacatcgccctgaatgtggatgacagcagaattggccagacagccaccaagcagaagaccaacagccctgcctggcatgatgaatttgtgacagatgtgtgcaatggaaggaagattgagctggccgtgttccatgatgcccccatcggctatgatgactttgtggccaactgcaccatccagtttgaggagctgctgcagaatggcagccgccactttgaggactggattgacctggagcctgagggccgggtgtatgtgtag

SEQ ID NO: 278973 - DNA, 384 bp, Artificial Sequence
  derived and/or modified sequence
atggtggtgttcaacggcctgctgaagatcaagatctgcgaggccgtgtcgttgaaaccaaccgcatggtcgctgaggcacgctgtcgggccacggccgcagacattcttactcgatccctatatagccctgaacgtggacgattcaagaatcggtcagacagctacaaagcagaagaccaacagcccagcttggcatgatgaattcgttaccgatgtgtgcaacgggcgaaagattgaactcgcagtatttcatgatgcacctatcggttatgacgactttgtcgctaactgtaccattcagttcgaagagctgctgcagaacggaagcaggcactttgaggattggattgacttggaacccgaagggagggtgtatgtctag

SEQ ID NO: 278974 - DNA, 384 bp, Artificial Sequence
  derived and/or modified sequence
atggtcgttttcaatggtctgctgaaaattaagatatgcgaggccgtctccctaaagccaacagcctggagcctccgccacgccgtggggcctcggcctcagactttcttgctcgacccatacattgccctgaacgtggatgattcaagaattggacagaccgcgaccaaacagaagactaattcgccagcctggcacgacgaatttgtcaccgacgtttgcaacggccgtaagatcgagttggcagttttccacgacgctccaatcggctacgacgactttgtcgcaaactgcacaattcagtttgaagaactcctccagaatgggtctcgtcactttgaggattggatagatctggagcctgagggacgcgtgtacgtttag

SEQ ID NO: 278975 - DNA, 939 bp, Artificial Sequence
  derived and/or modified sequence
gcggccgcccggactccgagcccgcgcggatgtgagattccgggctcctggcgcctcccgatcgccggctccggcgcggcgctgcttcgcccaggaggcggcggccccggctggccgtggggcttgtggatttttaaaaatttggctccgaggaggaccatttcctctcgacatgcatccctccggatagactgaacatccctccgttcacccccccgccccgcgcggtcagaggcaggcgctgagtgtgcgaagaggatccgggttgaaatctgcgcccccggttctcgtccccgccccgtcccaccgccccatccccctcccggagtcgaaatttcccgggattatgtttcggaaaggaacccggcgaggaaatacatgcactggctgagaatcgcccgcgccagggcgcaacgccacaaggtgtagggagtgtgcggggtggggcgaaaggggacccaagagtccctgtggctcggagtgccgggccgtcggttcttcattcctgccctcggggcagacggagtgaccccggcccccactccccgccccgaccatggtagtgttcaatggccttcttaagatcaaaatctgcgaggccgtgagcttgaagcccacagcctggtcgctgcgccatgcggtgggaccccggccgcagactttccttctcgacccctacattgccctcaatgtggacgactcgcgcatcggccaaacggccaccaagcagaagaccaacagcccggcctggcacgacgagttcgtcaccgatgtgtgcaacggacgcaagatcgagctggctgtctttcacgatgcccccataggctacgacgacttcgtggccaactgcaccatccagtttgaggagctgctgcagaacgggagccgccacttcgaggactggattgatctggagccagaaggaagagtgtatgtgat

SEQ ID NO: 278976 - protein, 586 aa, Artificial Sequence
  derived and/or modified sequence
MAANMYRVGDYVYFENSSSNPYLIRRIEELNKTASGNVEAKVVCFYRRRDISNTLIMLADKHAKEIEEESETTVEADLTDKQKHQLKHRELFLSRQYESLPATHIRGKCSVALLNETESVLSYLDKEDTFFYSLVYDPSLKTLLADKGEIRVGPRYQADIPEMLLEGESDEREQSKLEVKVWDPNSPLTDRQIDQFLVVARAVGTFARALDCSSSVRQPSLHMSAAAASRDITLFHAMDTLYRHSYDLSSAISVLVPLGGPVLCRDEMEEWSASEASLFEEALEKYGKDFNDIRQDFLPWKSLTSIIEYYYMWKTTDRYVQQKRLKAAEAESKLKQVYIPTYSKPNPNQISTSNGKPGAVNGAVGTTFQPQNPLLGRACESCYATQSHQWYSWGPPNMQCRLCAICWLYWKKYGGLKMPTQSEEEKLSPSPTTEDPRVRSHVSRQAMQGMPVRNTGSPKSAVKTRQAFFLHTTYFTKFARQVCKNTLRLRQAARRPFVAINYAAIRAEYADRHAELSGSPLKSKSTRKPLACIIGYLEIHPAKKPNVIRSTPSLQTPTTKRMLTTPNHTSLSILGKRNYSHHNGLD

SEQ ID NO: 278977 - protein, 594 aa, Artificial Sequence
  derived and/or modified sequence
MAANMYRVGDYVYFENSSSNPYLIRRIEELNKTASGNVEAKVVCFYRRRDISNTLIMLADKHAKEIEEESETTVEADLTDKQKHQLKHRELFLSRQYESLPATHIRGKCSVALLNETESVLSYLDKEDTFFYSLVYDPSLKTLLADKGEIRVGPRYQADIPEMLLEGESDEREQSKLEVKVWDPNSPLTDRQIDQFLVVARAVGTFARALDCSSSVRQPSLHMSAAAASRDITLFHAMDTLYRHSYDLSSAISVLVPLGGPVLCRDEMEEWSASEASLFEEALEKYGKDFNDIRQDFLPWKSLTSIIEYYYMWKTTDRYVQQKRLKAAEAESKLKQVYIPTYSKPNPNQISTSNGKPGAVNGAVGTTFQPQNPLLGRACESCYATQSHQWYSWGPPNMQCRLCAICWLYWKKYGGLKMPTQSEEEKLSPSPTTEDPRVRSHVSRQAMQGMPVRNTGSPKSAVKTRQAFFLHTTYFTKFARQVCKNTLRLRQAARRPFVAINYAAIRAEYADRHAELSGSPLKSKSTRKPLACIIGYLEIHPAKKPNVIRSTPSLQTPTTKRMLTTPNHTSLSILGKRNYSHHNGLDELTCCVSD

SEQ ID NO: 278978 - DNA, 1761 bp, Artificial Sequence
  derived and/or modified sequence
atggcggctaacatgtatagggtgggagattacgtgtactttgaaaactcatcctccaatccctacctcatacggaggatcgaagagcttaataagaccgcatccggcaacgtcgaggccaaagtggtgtgcttttacagaagacgagacataagtaacacactcattatgctcgccgataaacacgccaaggaaatcgaagaggaaagcgaaaccactgtggaggccgaccttacggataaacagaagcatcagctcaagcacagagagttattcctgtctcgacagtatgagtctttgccagcgacccacattcggggtaaatgttccgttgctctgctgaatgagactgagtctgtactatcctacttggacaaagaagatacttttttttacagcctggtttacgatccgtcgttgaagaccctgctggccgataagggggagatacgggtcgggccacgctaccaggcagacattcccgagatgctgcttgagggcgagtctgatgagagggaacaatccaaactggaagtgaaggtttgggatcccaactccccattgactgatcggcagatagaccagttcttggtcgtggcccgagccgtgggaacttttgcccgagctctagactgctctagcagtgtgagacagccctctctccacatgtcggccgccgcagccagccgcgacataacactgttccacgctatggataccctgtacaggcattcctacgatctgtcatctgcgatatccgtgttagtcccactgggcggacctgtcttgtgccgggatgaaatggaggaatggtcagcctctgaggcctcattgtttgaagaagctctcgaaaagtacggaaaggattttaacgacattaggcaggatttcctaccatggaagagtctgacctcgataatcgaatactattatatgtggaaaacaactgatcgatacgtacagcaaaaacggctcaaggccgctgaagctgaatctaagctgaaacaggtttatatcccaacatattccaaacccaacccaaatcaaatatctacctcaaatggcaaacccggcgctgtaaacggagctgtaggtacgacattccagccccagaatcccttgttgggccgcgcctgtgaatcatgttacgcaactcagagtcatcagtggtatagctggggtcctcccaacatgcagtgccgactgtgcgcaatttgttggctgtattggaagaagtacgggggcctcaaaatgccaactcagtcagaggaagaaaaactctcaccctctccaactacagaagatcctcgcgtgagatcacatgtcagccggcaggcaatgcaagggatgccagtgcggaatacgggcagtccaaagtccgccgttaagactcgtcaagcgttcttcctccacacgacctatttcaccaagttcgcccgccaggtctgtaagaatactctcaggctccgacaagctgcccggagaccattcgtcgctattaattatgccgccataagggccgagtacgcagaccgtcatgcagagctaagcggaagtcccctgaaatccaagtcaactcgcaaacctctggcctgcattattgggtatttggaaatccaccccgctaaaaagcctaatgtcataagatctaccccctcacttcaaacccctaccacaaaacggatgcttaccactcccaaccacacaagcttgtctatcctggggaagaggaattatagtcatcataacggcctggattag

SEQ ID NO: 278979 - DNA, 1785 bp, Artificial Sequence
  derived and/or modified sequence
atggccgctaatatgtatagagtcggcgactatgtctattttgagaactctagcagcaatccctacctcattcggcgcatcgaagaactgaacaaaacggcctctggaaatgttgaagcaaaggtggtctgtttctatagacggagggacatcagcaacaccctcatcatgctggctgataagcatgcaaaggagatcgaggaggagagtgagacaacggttgaggccgaccttacagacaaacaaaaacaccaattaaagcaccgcgaattgttcttgagtcgccagtatgaatctttacctgcaacccatattagaggaaagtgcagcgttgcactgctgaacgaaaccgaatccgtccttagttacctcgacaaggaagatacctttttctactccttagtctacgatccatctctgaaaacgctacttgccgacaagggggagatccgagtggggccaagataccaggcagacataccggaaatgctgcttgagggggaatccgacgagagagaacagtccaagctggaggtgaaggtctgggatcccaactctcccctgacagacaggcagatcgaccagtttttagtcgtggcacgagctgttggtaccttcgctagggccctagactgtagtagctccgtgcgccagccaagtctgcacatgagcgccgctgccgcgtcgagggacatcacactgttccatgccatggacacactgtatcggcactcctatgacctttcatccgctatcagcgtgcttgtaccacttggtggccccgtgctgtgcagggacgagatggaggagtggtcggccagtgaggcctcattgtttgaggaggcactcgagaaatacggcaaagactttaatgacattcgacaggacttcctgccatggaaatctctgacgagcatcattgagtattactacatgtggaagaccacggacaggtatgtgcagcaaaagcgcctcaaagctgccgaagcggagtctaaactcaaacaggtgtacatccctacatattcgaagccaaaccccaatcagatttctaccagcaatggtaaaccaggagccgtgaacggcgctgtagggactactttccagccccagaatccattgttgggccgagcttgtgagtcctgttacgccacacaaagtcaccagtggtacagctgggggccacctaatatgcagtgccgcttgtgcgccatttgttggttgtattggaagaaatacggaggattgaaaatgcccactcaatcagaggaggagaagttatcgccaagcccaaccaccgaagatccacgcgttaggtcccatgtaagcagacaggcaatgcagggcatgccggtgcgcaacaccggaagccctaagagcgccgtcaagacccgccaggctttcttcctgcacacaacatattttaccaaatttgcgaggcaggtttgtaagaataccctaagattgcgacaagccgcccggaggcccttcgttgccatcaactatgcagcaataagggccgagtacgctgacagacacgctgaactttcaggatccccgctaaagtccaaaagtacaaggaagcctctggcttgcattattggatacttggaaatacatcccgctaagaagccaaacgtaatcaggagtaccccttcccttcagaccccaacgactaagcgtatgctgactacccctaaccatacctccttgagcatattgggtaagaggaattactcccaccacaacggcctggatgaactcacttgttgcgtgagcgactag

SEQ ID NO: 278980 - DNA, 1973 bp, Artificial Sequence
  derived and/or modified sequence
ctagcctggcgctgggggcgggcaccagcccccacccctcggcgtaccatcccctttacttcccccaccccctgtcccctcccttccctcccttcccccccgtggcgaggcagcagcgacggcggcggcggcagcggcggtcgcggctgaggctgaggaggaggcggcggcggcgggcggggctcggctcgggctccgcgggcgggcgggcggacatggcggccaacatgtaccgggtcggagattatgtctactttgagaattcctccagcaacccatacctaataagaaggatagaagaactcaacaagactgcaagtggcaacgtggaagcaaaagtagtatgcttttatagacgacgtgatatttccaacacacttataatgctcgcagataagcatgctaaagaaattgaggaagaatctgaaacaacagttgaggctgacttgaccgataagcagaaacatcagttgaaacatagggaactctttttgtcacgccagtatgaatctctgcccgcaacacatatcaggggaaagtgcagtgttgcccttctgaatgagacagaatcagtattgtcatatcttgataaggaggataccttcttctactcattggtctatgacccctcattgaaaacactattagctgacaaaggtgaaatcagagtgggacctagatatcaagcagacattccagaaatgctgttagaaggagaatcagatgagagggaacaatcaaaattggaagttaaagtttgggatccaaatagcccacttacggatcgacagattgaccagtttttagttgtagcacgtgctgttgggacattcgccagagccctggattgcagcagttctgtgaggcagcctagtttgcatatgagtgctgctgcagcttcccgagacatcaccttgtttcacgctatggatacattgtatagacacagctatgatttgagcagtgccattagtgtcttagtaccactcggaggacctgttttatgcagagatgaaatggaggaatggtcagcctctgaagctagcttatttgaagaggcactggaaaaatatggcaaagacttcaatgacatacggcaagattttcttccttggaaatcattgactagcatcattgaatattattacatgtggaaaactactgacagatatgtgcaacagaaacgtctaaaagcagcagaagctgagagtaaactgaaacaagtatatatcccaacctacagcaaaccaaatcccaaccaaatatccactagtaatgggaagcctggtgctgtgaatggagctgtggggaccacgttccagcctcagaatcctctcttagggagagcctgtgagagctgctatgctacacagtctcaccagtggtattcttggggcccacctaatatgcagtgtagattatgtgcaatttgttggctttattggaaaaaatatggaggcttgaaaatgcccacccagtcagaagaagagaagttatctcctagcccaactacagaggaccctcgtgttagaagtcacgtgtcccgccaggccatgcagggaatgccagtccgaaacactgggagtccaaagtctgcagtgaagacccgccaagctttcttccttcatactacatatttcacaaaatttgctcgtcaggtctgcaaaaataccctccggctgcggcaggcagcaagacggccgtttgttgctattaattatgctgccattagggcagaatatgcagacagacatgctgaactatctggaagtccactgaaaagcaaaagcactaggaagcctttggcatgtatcattgggtatttagagatccatcctgcaaagaaacctaatgtaattcgatctacaccaagcctgcaaaccccaactaccaagcggatgctaacaactccaaatcacacatctctgagcattctggggaaaagaaactacagtcatcacaatggtctggat

SEQ ID NO: 278981 - DNA, 1785 bp, Artificial Sequence
  derived and/or modified sequence
atggcggccaacatgtaccgggtcggagattatgtctactttgagaattcctccagcaacccatacctaataagaaggatagaagaactcaacaagactgcaagtggcaacgtggaagcaaaagtagtatgcttttatagacgacgtgatatttccaacacacttataatgctcgcagataagcatgctaaagaaattgaggaagaatctgaaacaacagttgaggctgacttgaccgataagcagaaacatcagttgaaacatagggaactctttttgtcacgccagtatgaatctctgcccgcaacacatatcaggggaaagtgcagtgttgcccttctgaatgagacagaatcagtattgtcatatcttgataaggaggataccttcttctactcattggtctatgacccctcattgaaaacactattagctgacaaaggtgaaatcagagtgggacctagatatcaagcagacattccagaaatgctgttagaaggagaatcagatgagagggaacaatcaaaattggaagttaaagtttgggatccaaatagcccacttacggatcgacagattgaccagtttttagttgtagcacgtgctgttgggacattcgccagagccctggattgcagcagttctgtgaggcagcctagtttgcatatgagtgctgctgcagcttcccgagacatcaccttgtttcacgctatggatacattgtatagacacagctatgatttgagcagtgccattagtgtcttagtaccactcggaggacctgttttatgcagagatgaaatggaggaatggtcagcctctgaagctagcttatttgaagaggcactggaaaaatatggcaaagacttcaatgacatacggcaagattttcttccttggaaatcattgactagcatcattgaatattattacatgtggaaaactactgacagatatgtgcaacagaaacgtctaaaagcagcagaagctgagagtaaactgaaacaagtatatatcccaacctacagcaaaccaaatcccaaccaaatatccactagtaatgggaagcctggtgctgtgaatggagctgtggggaccacgttccagcctcagaatcctctcttagggagagcctgtgagagctgctatgctacacagtctcaccagtggtattcttggggcccacctaatatgcagtgtagattatgtgcaatttgttggctttattggaaaaaatatggaggcttgaaaatgcccacccagtcagaagaagagaagttatctcctagcccaactacagaggaccctcgtgttagaagtcacgtgtcccgccaggccatgcagggaatgccagtccgaaacactgggagtccaaagtctgcagtgaagacccgccaagctttcttccttcatactacatatttcacaaaatttgctcgtcaggtctgcaaaaataccctccggctgcggcaggcagcaagacggccgtttgttgctattaattatgctgccattagggcagaatatgcagacagacatgctgaactatctggaagtccactgaaaagcaaaagcactaggaagcctttggcatgtatcattgggtatttagagatccatcctgcaaagaaacctaatgtaattcgatctacaccaagcctgcaaaccccaactaccaagcggatgctaacaactccaaatcacacatctctgagcattctggggaaaagaaactacagtcatcacaatggtctggatgaactcacgtgctgtgtgtcagactga

SEQ ID NO: 278982 - DNA, 1761 bp, Artificial Sequence
  derived and/or modified sequence
atggccgccaacatgtacagagtgggggactatgtgtactttgagaacagcagcagcaacccctacctgatcagaagaattgaggagctgaacaagacagccagcggaaatgtggaggccaaggtggtgtgcttctacagaagaagagacatcagcaacaccctcatcatgctggccgacaagcacgccaaggagattgaggaggagagcgagaccaccgtggaggccgacctgacagacaagcagaagcaccagctgaagcaccgggagctgttcctgagccggcagtatgagagcctgcctgccacccacatccggggcaagtgcagcgtggccctgctgaatgaaacagaatctgtgctgagctacctggacaaggaggacaccttcttctacagcctggtgtatgaccccagcctgaagaccctgctggccgacaagggggagatccgggtgggcccccgctaccaggccgacatccctgagatgctgctggagggggagagtgatgagcgggagcagagcaagctggaggtgaaggtgtgggaccccaacagccccctgacagaccggcagattgaccagttcctggtggtggcccgggctgtgggcacctttgcccgggccctggactgcagcagctctgtgcggcagcccagcctgcacatgtctgctgctgctgccagccgggacatcaccctcttccacgccatggacaccctgtaccgccacagctatgacctgagcagcgccatctctgtgctggtgcccctgggcggccctgtgctgtgcagagatgagatggaggagtggagcgccagcgaggccagcctgtttgaggaggccctggagaagtatggcaaggacttcaatgacatccggcaggacttcctgccctggaagagcctgaccagcatcatcgagtactactacatgtggaagaccacagacagatatgtgcagcagaagaggctgaaggctgctgaggccgagagcaagctgaagcaggtgtacatccccacctacagcaagcccaaccccaaccagatcagcaccagcaatggcaagccaggagctgtgaatggagctgtgggcaccaccttccagccccagaaccccctgctgggccgggcctgtgagagctgctacgccacccagagccaccagtggtacagctggggcccccccaacatgcagtgccgcctgtgtgccatctgctggctgtactggaagaagtatggaggcctgaagatgcccacccagagcgaggaggagaagctgagccccagccccaccacagaggacccccgggtgcgcagccacgtgtcccggcaggccatgcagggcatgcctgtgaggaacacaggcagccccaagtctgctgtgaagacccggcaggccttcttcctgcacaccacctacttcaccaagtttgcccggcaggtgtgcaagaacaccctgcggctgcggcaggccgcccggcggccctttgtggccatcaactatgctgccatccgggcagaatatgctgacagacatgctgagctgagcggcagccccctgaagagcaagagcaccaggaagcccctggcctgcatcatcggctacctggagatccacccagccaagaagcccaacgtcatccgcagcacccccagcctgcagacccccaccaccaagaggatgctgaccacccccaaccacaccagcctgagcatcctgggcaagaggaactacagccaccacaacggcctggactag

SEQ ID NO: 278983 - DNA, 1785 bp, Artificial Sequence
  derived and/or modified sequence
atggccgccaacatgtacagagtgggggactatgtgtactttgagaacagcagcagcaacccctacctgatcagaagaattgaggagctgaacaagacagccagcggaaatgtggaggccaaggtggtgtgcttctacagaagaagagacatcagcaacaccctcatcatgctggccgacaagcacgccaaggagattgaggaggagagcgagaccaccgtggaggccgacctgacagacaagcagaagcaccagctgaagcaccgggagctgttcctgagccggcagtatgagagcctgcctgccacccacatccggggcaagtgcagcgtggccctgctgaatgaaacagaatctgtgctgagctacctggacaaggaggacaccttcttctacagcctggtgtatgaccccagcctgaagaccctgctggccgacaagggggagatccgggtgggcccccgctaccaggccgacatccctgagatgctgctggagggggagagtgatgagcgggagcagagcaagctggaggtgaaggtgtgggaccccaacagccccctgacagaccggcagattgaccagttcctggtggtggcccgggctgtgggcacctttgcccgggccctggactgcagcagctctgtgcggcagcccagcctgcacatgtctgctgctgctgccagccgggacatcaccctcttccacgccatggacaccctgtaccgccacagctatgacctgagcagcgccatctctgtgctggtgcccctgggcggccctgtgctgtgcagagatgagatggaggagtggagcgccagcgaggccagcctgtttgaggaggccctggagaagtatggcaaggacttcaatgacatccggcaggacttcctgccctggaagagcctgaccagcatcatcgagtactactacatgtggaagaccacagacagatatgtgcagcagaagaggctgaaggctgctgaggccgagagcaagctgaagcaggtgtacatccccacctacagcaagcccaaccccaaccagatcagcaccagcaatggcaagccaggagctgtgaatggagctgtgggcaccaccttccagccccagaaccccctgctgggccgggcctgtgagagctgctacgccacccagagccaccagtggtacagctggggcccccccaacatgcagtgccgcctgtgtgccatctgctggctgtactggaagaagtatggaggcctgaagatgcccacccagagcgaggaggagaagctgagccccagccccaccacagaggacccccgggtgcgcagccacgtgtcccggcaggccatgcagggcatgcctgtgaggaacacaggcagccccaagtctgctgtgaagacccggcaggccttcttcctgcacaccacctacttcaccaagtttgcccggcaggtgtgcaagaacaccctgcggctgcggcaggccgcccggcggccctttgtggccatcaactatgctgccatccgggcagaatatgctgacagacatgctgagctgagcggcagccccctgaagagcaagagcaccaggaagcccctggcctgcatcatcggctacctggagatccacccagccaagaagcccaacgtcatccgcagcacccccagcctgcagacccccaccaccaagaggatgctgaccacccccaaccacaccagcctgagcatcctgggcaagaggaactacagccaccacaacggcctggatgagctgacctgctgcgtgtctgactag

SEQ ID NO: 278984 - DNA, 1761 bp, Artificial Sequence
  derived and/or modified sequence
atggccgccaacatgtaccgggtgggcgactacgtgtacttcgagaacagcagcagcaatccctatctgatcagaagaatagaggaactgaataaaactgcttccggaaatgttgaagctaaagtggtgtgcttttataggcgtagagatatctccaatacgctaattatgctcgccgataaacacgcgaaggagatcgaagaggaaagcgaaacgactgttgaagcggacctaacagacaaacagaagcaccagctgaagcaccgggaattgtttctctcaagacagtacgaatctctgccggctacgcacatcagggggaagtgtagcgtcgccttgcttaatgaaaccgagtccgtgcttagttatttggataaagaagacacgtttttttactcactggtctacgacccctctctgaagactttgctcgccgacaagggagagatacgggttggtccgcgctatcaggcagacatacctgaaatgcttttagaaggcgagagtgacgaacgcgagcagtcaaagctggaggtgaaggtttgggatcctaatagtccactcactgaccgtcagattgatcagtttctggtcgtggcccgcgcggtgggcaccttcgccagagcactggactgttctagctccgttagacaaccgtccctccatatgagcgcggcggctgcctcacgagatatcaccctatttcacgctatggacaccttgtatcgccactcttacgacttaagctccgccatctccgtgctggttcccctgggaggtccagtgttgtgtagagatgagatggaggagtggagcgcctctgaggcatctttgttcgaagaggctttggagaagtacggcaaggacttcaatgatatccggcaggacttcctgccatggaagagtttgacatctatcatcgagtattattatatgtggaagactaccgacaggtatgttcagcagaaacgcctaaaggccgccgaggccgagagtaaactcaagcaggtgtatatacccacttactcaaagccaaaccccaaccaaatcagcacgagcaacggaaaaccgggcgcagtgaacggcgccgtgggtactacattccagccccaaaacccgttactcggacgtgcgtgtgaatcctgctatgcaacccaatctcaccagtggtactcttggggtcccccaaatatgcagtgtaggctgtgcgcaatctgttggctgtactggaagaagtatggaggactgaagatgccaactcagagcgaagaggagaagctcagtccttcgcccacaacggaagatcccagagttagatcacatgtgtcacgccaggcgatgcaggggatgcctgtgcgcaacacgggctcccccaagtccgcagtcaagacaaggcaggccttttttctccatactacgtacttcacaaaattcgctaggcaagtctgcaagaacactctgcgcctccgtcaggcggctagacgcccctttgttgctatcaattacgcggccatccgggccgagtacgctgatagacacgcagaacttagcggcagccctctcaagtcgaaatctacaaggaagcccctggcttgtattattggctacctggagatacatcctgccaaaaagcccaacgttatcaggagcactccatccctgcagacaccaactactaaaagaatgctcactactccaaatcatacatctttaagtatcctgggtaaacgtaattactctcaccataatggcttagactag

SEQ ID NO: 278985 - DNA, 1785 bp, Artificial Sequence
  derived and/or modified sequence
atggccgccaacatgtaccgggtgggcgactacgtgtacttcgagaacagctcttccaatccctatctcatacgaagaattgaagagctgaacaaaactgcaagcggaaatgtggaagcaaaggttgtttgcttctaccgaaggagagatatttctaatacactcatcatgttggctgataagcacgccaaggaaatagaggaggaatccgaaacgacagtagaggctgatctgacagacaaacagaagcaccagcttaaacatcgggagttgttcctgtctaggcagtacgagtccctccccgccacccatattaggggcaaatgttcggtggcattattaaacgagactgagtcggtcctatcatacctcgacaaagaggataccttcttctactcacttgtgtatgatccatctttaaagactctcctggccgacaaaggggagatccgagtagggcctaggtatcaagctgatatacccgagatgcttctggagggcgaatccgacgaaagagagcaatctaaacttgaggtcaaagtgtgggatcccaactcgcccttgactgaccgccagattgaccagtttctggttgttgccagggccgtaggtacctttgctagagccctggattgcagctcaagcgtgaggcaaccctcactccatatgtcggccgccgccgcctctcgggatatcacactgttccacgccatggacaccctgtacagacactcatacgatctgtccagcgctatctccgtgttagtgcccctcgggggtcctgtattgtgtcgggatgagatggaagaatggtcggctagcgaggcaagcttgttcgaagaggccctagaaaagtatgggaaggattttaacgacattaggcaggacttcctcccatggaagagtctcacatccatcatcgaatactactatatgtggaagaccaccgaccgatacgtgcagcagaagagactgaaggccgctgaggccgaatccaagctcaagcaggtgtacattcctacttactcaaagcccaatcctaatcagatcagtacaagcaacggaaaaccgggagcagtgaacggtgcagtcggaaccacattccagcctcagaaccctctcctgggacgagcttgtgaatcttgttatgctacccagtctcaccagtggtacagttggggacctcccaatatgcagtgtcgattgtgcgctatctgttggttgtattggaaaaaatacggcggattgaagatgcccactcaaagtgaggaggagaaactgagcccatcaccgactacagaggacccgcgcgtgcgatcccatgtctccaggcaagcaatgcaaggtatgcctgtccggaataccgggtcacctaaatccgccgtgaagactagacaggcttttttcctccacaccacctactttacgaaatttgcgaggcaggtgtgtaagaataccctccgattgaggcaggctgctcggaggccctttgtggccatcaactacgccgcaatcagagccgaatatgctgacaggcacgcagagttgtccggctctccgctaaaatccaagagcacacgaaagccactagcatgtatcatcgggtacctggagatacatcccgctaaaaagccgaatgtcatccgaagtacacctagcttgcagacaccaaccacaaaaagaatgctcaccacacccaaccatacgtcactttctatcctgggaaagagaaactacagccaccacaacggcctggatgagctgacatgttgcgtgtcagattag

SEQ ID NO: 278986 - DNA, 1761 bp, Artificial Sequence
  derived and/or modified sequence
atggctgccaacatgtatagggtaggcgactatgtatacttcgagaattcaagttccaatccctatctgatacgaaggatcgaggaacttaacaaaactgcctccggcaacgttgaagctaaggtggtatgcttctataggcggagagacattagcaacacactcatcatgctagccgacaaacatgcgaaggagatagaggaggagagtgagacaaccgtggaagctgacctgaccgataagcagaagcaccaactgaagcaccgtgaactctttctgagccggcagtacgagtcacttccagcaactcacatcagaggtaaatgtagcgtggccttactcaacgagaccgaatccgtgcttagctacctcgacaaagaagatacttttttctattccctggtgtatgatccaagcctcaagactctgttagccgacaaaggggagataagggtgggaccacggtatcaggctgacatccctgaaatgctcctggaaggagaatccgacgaacgagaacagagcaagctggaagtcaaagtgtgggatccaaattctcccctgacagaccgtcagatcgaccaattcctcgtggtagcgagggcagtcggcaccttcgctcgtgcgttggactgttcgagcagcgtgagacaaccttcactccacatgtcagctgctgctgcctctcgagatatcaccttgttccatgctatggataccctttaccgacactcatacgatttgtcttccgcaattagtgtgctggtgcccctgggtggaccagtgttatgtagagatgaaatggaagagtggtctgcgagcgaggcgtcactgttcgaggaggcactcgagaaatatggcaaagatttcaacgatatccgccaagactttcttccatggaaatccctcacttccattatcgagtactactacatgtggaaaactactgatcggtatgttcagcagaagaggctgaaagcagcagaggctgaaagtaagctgaagcaagtttacatccccacctacagtaagcccaacccaaaccagatctcaacatcaaatggtaagcccggagcagtgaatggggcagttggcaccacctttcagccccagaatcccctgctcggacgggcttgtgagtcctgttacgctactcagtcccaccagtggtattcatggggtcccccaaacatgcagtgcagactgtgtgctatttgttggctgtattggaagaagtatgggggtctaaagatgcccacccagtcagaggaggaaaagctctcaccctctccaacaactgaagaccccagagttcggagccacgtttccaggcaggccatgcaggggatgccagtaaggaacacaggcagcccgaagtccgcggtaaaaacacgacaagcattctttctgcacactacttactttactaagtttgccagacaggtttgtaaaaatacactcaggctccggcaagccgcaagacggcctttcgttgctataaattacgcagctattcgggctgagtacgcggaccggcatgctgaactttcaggaagccctctaaagtccaagagcacacgcaaaccactggcatgtattatcggctacttggagatccaccccgcaaagaaaccaaacgtgattcggtccaccccgtcactgcagacacctacaacaaagaggatgctcaccacacccaaccatacgagtctgtctattttgggcaaacggaactacagccaccacaacggactggactag

SEQ ID NO: 278987 - DNA, 1785 bp, Artificial Sequence
  derived and/or modified sequence
atggctgcgaatatgtacagagtgggggactacgtatactttgagaattcgtctagcaacccttatctcattcggcgaattgaggagcttaacaaaactgcaagtggaaacgtagaagccaaggtggtctgtttctaccggcgacgagacatatccaatactctgatcatgctggccgacaaacatgcaaaagaaatcgaagaagagagcgaaaccacagtcgaggctgacctgaccgataagcagaaacatcagcttaagcatagagagctgttcctgtcccggcagtatgagtccctgcctgccacgcatattagagggaaatgcagtgtagccttgctgaacgaaaccgaatctgtcctctcttacttagataaggaagatacgttcttttactctcttgtctatgatcccagcttaaagacactgctggctgataagggcgaaatacgcgtaggacctcgctaccaggccgacattcccgaaatgctgttggaaggcgaaagtgacgaacgcgagcaatctaaactggaagtcaaagtctgggatccaaactcacctctcactgaccgacagatcgaccagtttctggtggtcgcccgagcagttggaactttcgcgcgtgctctggactgttcttcctccgtgcgccagcccagtctccatatgtccgctgcggctgcctcacgggacatcacgctcttccacgccatggataccctctatcggcactcctatgatttgtcaagcgctataagtgtgctggttcccctagggggacctgtgttatgccgggatgagatggaagaatggagcgccagcgaagccagcctctttgaagaggcacttgagaagtatggaaaagatttcaacgatatcaggcaggacttcctaccttggaaatcgcttacgtccatcattgagtattactatatgtggaaaaccaccgaccggtacgttcagcagaagcggttaaaagcagccgaagccgagagtaaactgaagcaggtttacataccaacatactcaaagcctaaccccaatcagatatccacttctaatggcaaacctggcgcagtgaatggcgcagtggggactacatttcaacctcaaaaccccctgctaggccgtgcctgtgaatcttgttatgcgacccaatctcatcagtggtactcttgggggccacctaatatgcagtgtaggctctgtgccatttgctggctctattggaagaagtacgggggacttaagatgcctacacagagcgaagaggaaaaactgtctccgtctccgaccacagaggatccacgagttcgcagtcatgtgagcagacaggctatgcaggggatgcccgtccgcaatacaggctccccgaagagtgccgttaagacgcggcaggcattttttctgcatacgacctatttcacaaaattcgcccgtcaggtgtgtaagaacacactgagactcaggcaagctgccaggcgtccatttgtagccatcaactacgccgcaattagggccgaatatgccgaccgccacgcagaactctcaggtagccctctgaaatcaaagtctacccggaaacccctagcttgcatcatcgggtaccttgagatccatccagcgaagaagcctaacgtcataagatctacaccaagcctccagacacctaccacaaagcgcatgctgaccacaccaaaccatacttctctgtccatcttgggcaagcggaactacagtcatcacaatggcctcgacgagctgacctgttgtgtgtcggactag

SEQ ID NO: 278988 - DNA, 1761 bp, Artificial Sequence
  derived and/or modified sequence
atggccgccaacatgtacagagtgggcgactacgtgtacttcgagaacagcagcagcaacccctacctgatcagaagaatcgaggagctgaacaagaccgccagcggcaacgtggaggccaaggtggtgtgcttctacagaagaagagacatcagcaacaccctgatcatgctggccgacaagcacgccaaggagatcgaggaggagagcgagaccaccgtggaggccgacctgaccgacaagcagaagcaccagctgaagcacagagagctgttcctgagcagacagtacgagagcctgcccgccacccacatcagaggcaagtgcagcgtggccctgctgaacgagaccgagagcgtgctgagctacctggacaaggaggacaccttcttctacagcctggtgtacgaccccagcctgaagaccctgctggccgacaagggcgagatcagagtgggccccagataccaggccgacatccccgagatgctgctggagggcgagagcgacgagagagagcagagcaagctggaggtgaaggtgtgggaccccaacagccccctgaccgacagacagatcgaccagttcctggtggtggccagagccgtgggcaccttcgccagagccctggactgcagcagcagcgtgagacagcccagcctgcacatgagcgccgccgccgccagcagagacatcaccctgttccacgccatggacaccctgtacagacacagctacgacctgagcagcgccatcagcgtgctggtgcccctgggcggccccgtgctgtgcagagacgagatggaggagtggagcgccagcgaggccagcctgttcgaggaggccctggagaagtacggcaaggacttcaacgacatcagacaggacttcctgccctggaagagcctgaccagcatcatcgagtactactacatgtggaagaccaccgacagatacgtgcagcagaagagactgaaggccgccgaggccgagagcaagctgaagcaggtgtacatccccacctacagcaagcccaaccccaaccagatcagcaccagcaacggcaagcccggcgccgtgaacggcgccgtgggcaccaccttccagccccagaaccccctgctgggcagagcctgcgagagctgctacgccacccagagccaccagtggtacagctggggcccccccaacatgcagtgcagactgtgcgccatctgctggctgtactggaagaagtacggcggcctgaagatgcccacccagagcgaggaggagaagctgagccccagccccaccaccgaggaccccagagtgagaagccacgtgagcagacaggccatgcagggcatgcccgtgagaaacaccggcagccccaagagcgccgtgaagaccagacaggccttcttcctgcacaccacctacttcaccaagttcgccagacaggtgtgcaagaacaccctgagactgagacaggccgccagaagacccttcgtggccatcaactacgccgccatcagagccgagtacgccgacagacacgccgagctgagcggcagccccctgaagagcaagagcaccagaaagcccctggcctgcatcatcggctacctggagatccaccccgccaagaagcccaacgtgatcagaagcacccccagcctgcagacccccaccaccaagagaatgctgaccacccccaaccacaccagcctgagcatcctgggcaagagaaactacagccaccacaacggcctggactag

SEQ ID NO: 278989 - DNA, 1785 bp, Artificial Sequence
  derived and/or modified sequence
atggccgccaacatgtacagagtgggcgactacgtgtacttcgagaacagcagcagcaacccctacctgatcagaagaatcgaggagctgaacaagaccgccagcggcaacgtggaggccaaggtggtgtgcttctacagaagaagagacatcagcaacaccctgatcatgctggccgacaagcacgccaaggagatcgaggaggagagcgagaccaccgtggaggccgacctgaccgacaagcagaagcaccagctgaagcacagagagctgttcctgagcagacagtacgagagcctgcccgccacccacatcagaggcaagtgcagcgtggccctgctgaacgagaccgagagcgtgctgagctacctggacaaggaggacaccttcttctacagcctggtgtacgaccccagcctgaagaccctgctggccgacaagggcgagatcagagtgggccccagataccaggccgacatccccgagatgctgctggagggcgagagcgacgagagagagcagagcaagctggaggtgaaggtgtgggaccccaacagccccctgaccgacagacagatcgaccagttcctggtggtggccagagccgtgggcaccttcgccagagccctggactgcagcagcagcgtgagacagcccagcctgcacatgagcgccgccgccgccagcagagacatcaccctgttccacgccatggacaccctgtacagacacagctacgacctgagcagcgccatcagcgtgctggtgcccctgggcggccccgtgctgtgcagagacgagatggaggagtggagcgccagcgaggccagcctgttcgaggaggccctggagaagtacggcaaggacttcaacgacatcagacaggacttcctgccctggaagagcctgaccagcatcatcgagtactactacatgtggaagaccaccgacagatacgtgcagcagaagagactgaaggccgccgaggccgagagcaagctgaagcaggtgtacatccccacctacagcaagcccaaccccaaccagatcagcaccagcaacggcaagcccggcgccgtgaacggcgccgtgggcaccaccttccagccccagaaccccctgctgggcagagcctgcgagagctgctacgccacccagagccaccagtggtacagctggggcccccccaacatgcagtgcagactgtgcgccatctgctggctgtactggaagaagtacggcggcctgaagatgcccacccagagcgaggaggagaagctgagccccagccccaccaccgaggaccccagagtgagaagccacgtgagcagacaggccatgcagggcatgcccgtgagaaacaccggcagccccaagagcgccgtgaagaccagacaggccttcttcctgcacaccacctacttcaccaagttcgccagacaggtgtgcaagaacaccctgagactgagacaggccgccagaagacccttcgtggccatcaactacgccgccatcagagccgagtacgccgacagacacgccgagctgagcggcagccccctgaagagcaagagcaccagaaagcccctggcctgcatcatcggctacctggagatccaccccgccaagaagcccaacgtgatcagaagcacccccagcctgcagacccccaccaccaagagaatgctgaccacccccaaccacaccagcctgagcatcctgggcaagagaaactacagccaccacaacggcctggacgagctgacctgctgcgtgagcgactag

SEQ ID NO: 278990 - protein, 173 aa, Artificial Sequence
  derived and/or modified sequence
MSSMNPEYDYLFKLLLIGDSGVGKSCLLLRFADDTYTESYISTIGVDFKIRTIELDGKTIKLQIESFNNVKQWLQEIDRYASENVNKLLVGNKCDLTTKKVVDYTTAKEFADSLGIPFLETSAKNATNVEQSFMTMAAEIKKRMGPGATAGGAEKSNVKIQSTPVKQSGGGCC

SEQ ID NO: 278991 - protein, 141 aa, Artificial Sequence
  derived and/or modified sequence
MSSMNPEYDYLFKLLLIGDSGVGKSCLLLRFAESFNNVKQWLQEIDRYASENVNKLLVGNKCDLTTKKVVDYTTAKEFADSLGIPFLETSAKNATNVEQSFMTMAAEIKKRMGPGATAGGAEKSNVKIQSTPVKQSGGGCC

SEQ ID NO: 278992 - DNA, 522 bp, Artificial Sequence
  derived and/or modified sequence
atgagctccatgaatccggagtacgactatttgtttaaacttcttcttattggagacagcggcgttggcaagagctgcctgctcctccgctttgctgatgatacctacacagagagttacatcagtacaattggcgttgacttcaaaattagaactatcgagctggacggtaagactattaagctacagatagagtcatttaataatgtgaaacagtggctacaggagattgacagatatgcaagcgagaatgttaataagctattggtcgggaataagtgcgacctgaccactaagaaggtggtcgattacacaactgcaaaagagtttgctgattcactggggattcctttcctggaaacctcagccaaaaacgcgacaaatgtggagcagtcctttatgaccatggccgccgaaattaagaaaagaatgggacccggagccaccgccggaggcgcagagaagagtaatgtgaagatacaatccacccccgtcaagcagtcaggcggagggtgctgctag

SEQ ID NO: 278993 - DNA, 426 bp, Artificial Sequence
  derived and/or modified sequence
atgagctccatgaatccagagtatgactacctgttcaaactgttacttataggagactcaggtgtgggtaagagctgtctactccttcgcttcgctgaatcatttaataatgtgaagcagtggctgcaggagatagatcgttacgccagcgaaaacgttaataaattgcttgttgggaataagtgcgacctgaccaccaaaaaggtggttgactacacaacagcaaaagagtttgccgacagcttaggcattcccttcttggaaacaagcgctaaaaatgccaccaacgtggaacagagtttcatgaccatggcagccgaaatcaaaaagagaatggggccgggcgctactgccgggggtgccgagaaatcaaacgtgaaaattcagagcacccctgtgaagcagtcaggcggaggatgctgctag

SEQ ID NO: 278994 - DNA, 522 bp, Artificial Sequence
  derived and/or modified sequence
atgagctccatgaacccagaatatgactacctgttcaagctgctgctgattggagacagcggcgtgggcaagagctgcctgctgctgcgctttgctgatgacacctacacagagagctacatcagcaccatcggcgtggacttcaagatccgcaccatcgagctggatggcaagaccatcaagctgcagatcgagagcttcaacaacgtgaagcagtggctgcaggagattgacagatatgcctctgaaaatgtgaacaagctgctggtgggcaacaagtgtgacctgaccaccaagaaggtggtggactacaccacagccaaggagtttgctgacagcctgggcatccccttcctggagaccagcgccaagaatgccaccaacgtggagcagagcttcatgaccatggctgctgagatcaagaagaggatgggccctggggccacagctgggggcgctgagaagagcaatgtgaagatccagagcacccctgtgaagcagagcggcggcggctgctgctag

SEQ ID NO: 278995 - DNA, 426 bp, Artificial Sequence
  derived and/or modified sequence
atgagctccatgaacccagaatatgactacctgttcaagctgctgctgattggagacagcggcgtgggcaagagctgcctgctgctgcgctttgctgagagcttcaacaacgtgaagcagtggctgcaggagattgacagatatgcctctgaaaatgtgaacaagctgctggtgggcaacaagtgtgacctgaccaccaagaaggtggtggactacaccacagccaaggagtttgctgacagcctgggcatccccttcctggagaccagcgccaagaatgccaccaacgtggagcagagcttcatgaccatggctgctgagatcaagaagaggatgggccctggggccacagctgggggcgctgagaagagcaatgtgaagatccagagcacccctgtgaagcagagcggcggcggctgctgctag

SEQ ID NO: 278996 - DNA, 522 bp, Artificial Sequence
  derived and/or modified sequence
atgagcagcatgaaccccgagtacgactacctgttcaagctgctgttaatcggagacagtggggtgggtaaatcctgcttgttgcttaggttcgcagacgatacgtacacagaaagctacatttcaaccattggggtagattttaagatcaggactatagagctcgatggaaagaccattaagttgcaaatcgagtcctttaacaacgtgaaacagtggctgcaggagattgacagatacgctagtgaaaacgtgaataagcttctcgtggggaataagtgcgacctaaccacaaaaaaggtggtggactatactactgcaaaggaattcgcagactctttgggaatccccttcctcgaaacatcagcaaagaatgccacaaacgttgaacaaagctttatgaccatggctgctgaaataaaaaagcgtatgggccccggagccacggcaggcggcgctgagaaaagcaacgtcaaaattcagtctacgcccgtgaaacagtccggaggaggctgctgctag

SEQ ID NO: 278997 - DNA, 426 bp, Artificial Sequence
  derived and/or modified sequence
atgagcagcatgaaccccgagtacgactacctgttcaagctgctgcttatcggcgattccggcgttgggaaatcatgtctcctcctgcgctttgccgaatcttttaataacgtaaaacaatggttgcaggagattgaccgctacgcgtcggaaaacgttaataagttgttggtaggtaacaaatgcgacctcacaacaaaaaaagtggttgactacacaacagctaaagaatttgcagattcactgggcattccctttctggagacatccgcgaaaaatgccaccaacgttgagcagagctttatgaccatggctgccgagatcaagaagcggatgggacctggagcgaccgccgggggggccgagaagtcaaatgtgaaaattcagagtacccctgtcaagcagtccggaggcggctgctgttag

SEQ ID NO: 278998 - DNA, 522 bp, Artificial Sequence
  derived and/or modified sequence
atgtcgtctatgaaccccgagtatgattacttgttcaagctgctgctgattggagacagcggagtagggaagagctgcctcctactgcgctttgctgatgatacctacacggaatcttacatcagtacgatcggcgtcgacttcaaaattcggaccattgaactcgatggcaagaccatcaagctgcagattgagagttttaataacgtaaaacagtggctccaggagatcgacaggtatgcgtctgaaaacgtgaataaactgcttgtgggaaacaaatgtgacctcaccaccaaaaaagtggtggactacaccactgcgaaggagttcgctgattcactgggcatccccttccttgagacatcggccaaaaacgccacgaacgtggaacagtcctttatgactatggctgcagaaataaaaaagagaatgggcccaggggcaaccgcaggcggtgctgagaaaagcaacgtcaagattcaatctacaccggtgaaacaatcaggagggggatgttgctag

SEQ ID NO: 278999 - DNA, 426 bp, Artificial Sequence
  derived and/or modified sequence
atgtcgagtatgaatcctgagtacgactatctcttcaaattgctgctgattggggacagtggagtgggcaaaagttgtttactattacgctttgccgagtccttcaataatgttaagcagtggctccaagaaatagacaggtatgcctccgaaaacgtcaacaagctgctggtgggaaacaagtgcgatcttacaaccaagaaggtcgttgactacaccactgccaaggaattcgccgactcactggggatcccttttctcgagacttccgccaagaatgcaaccaatgtggaacagtcattcatgactatggccgcagaaattaagaagcggatggggcctggcgctactgcgggaggggcagagaagagcaacgtcaagatccagtcaacccccgtcaaacagtctggagggggttgttgctag

SEQ ID NO: 279000 - DNA, 907 bp, Artificial Sequence
  derived and/or modified sequence
tttgggtggaagcgatagctgagtggcggcggctgctgattgtgttctaggggacggagtaggggaagacgtttgctctcccggaacagcctatctcattcctttctttcgattacccgtggcgcggagagtcagggcggcggctgcggcagcaagggcggcggtggcggcggcggcagctgcagtgacatgtccagcatgaatcccgaatatgattatttattcaagttacttctgattggcgactcaggggttggaaagtcttgccttcttcttaggtttgcagatgatacatatacagaaagctacatcagcacaattggtgtggatttcaaaataagaactatagagttagacgggaaaacaatcaagcttcaaatagagtccttcaataatgttaaacagtggctgcaggaaatagatcgttatgccagtgaaaatgtcaacaaattgttggtagggaacaaatgtgatctgaccacaaagaaagtagtagactacacaacagcgaaggaatttgctgattcccttggaattccgtttttggaaaccagtgctaagaatgcaacgaatgtagaacagtctttcatgacgatggcagctgagattaaaaagcgaatgggtcccggagcaacagctggtggtgctgagaagtccaatgttaaaattcagagcactccagtcaagcagtcaggtggaggttgctgctaaaatttgcctccatccttttctcacagcaatgaatttgcaatctgaacccaagtgaaaaaacaaaattgcctgaattgtactgtatgtagctgcactacaacagattcttaccgtctccacaaaggtcagagattgtaaatggtcaatactgactttttttttattcccttgactcaagacagctaacttcattttc

SEQ ID NO: 279001 - DNA, 2254 bp, Artificial Sequence
  derived and/or modified sequence
ttttgggtggaagcgatagctgagtggcggcggctgctgattgtgttctaggggacggagtaggggaagacgtttgctctcccggaacagcctatctcattcctttctttcgattacccgtggcgcggagagtcagggcggcggctgcggcagcaagggcggcggtggcggcggcggcagctgcagtgacatgtccagcatgaatcccgaatatgattatttattcaagttacttctgattggcgactcaggggttggaaagtcttgccttcttcttaggtttgcagagtccttcaataatgttaaacagtggctgcaggaaatagatcgttatgccagtgaaaatgtcaacaaattgttggtagggaacaaatgtgatctgaccacaaagaaagtagtagactacacaacagcgaaggaatttgctgattcccttggaattccgtttttggaaaccagtgctaagaatgcaacgaatgtagaacagtctttcatgacgatggcagctgagattaaaaagcgaatgggtcccggagcaacagctggtggtgctgagaagtccaatgttaaaattcagagcactccagtcaagcagtcaggtggaggttgctgctaaaatttgcctccatccttttctcacagcaatgaatttgcaatctgaacccaagtgaaaaaacaaaattgcctgaattgtactgtatgtagctgcactacaacagattcttaccgtctccacaaaggtcagagattgtaaatggtcaatactgactttttttttattcccttgactcaagacagctaacttcattttcagaactgttttaaacctttgtgtgctggtttataaaataatgtgtgtaatccttgttgctttcctgataccagactgtttcccgtggttggttagaatatattttgttttgatgtttatattggcatgtttagatgtcaggtttagtcttctgaagatgaagttcagccattttgtatcaaacagcacaagcagtgtctgtcactttccatgcataaagtttagtgagatgttatatgtaagatctgatttgctagttcttccttgtagagttataaatggaaagattacactatctgattaatagtttcttcatactctgcatataatttgtggctgcagaatattgtaatttgttgcacactatgtaacaaaacaactgaagatatgtttaataaatattgtacttattggaagtaatatcaaactgtatggtgataagtattgttttgattcttatggttaaagggaaatagagccttgcattatattcaacacagccatttgtgtgtgcacaatgcaaactaaggtattctagacctatcttagagcagcatccagtatttgctttctagataatatgcccaataacatgacctagaggggcttctgtgctgtgtagggatttaaccaacttcagtggttcagggagctcaaactatatgtaaaacaagtttagaatgtatgctatctagcccgttatctctgatccttctctaaaaccatttgaaatagcttcattgatcaacatttcataaatgcatctgtggtagaggtagaaagcagcacctttcctaattggcaaatgatcagactaatgtgtgctaatgtttttcttccatgctttcagtcagattcaactattttatcctccacagttgcttaacttggtgttggaggagggtttaagcattaagataggaagcaggaaatttgattgctctaaatttagaaattatatccctaaaaattaaaacatgaatactgggtggtaatgataattgaggcaaatgtatttattttggtgacattttgcatatatgaagattttctgaaataggaccttcaagatcctagggggttttgtttggtttttaattgtgaggaataaaaaatcttctgcccacactggcattttaaggtgactgaggtcaaacgttgtttccttaggttgaaatagcagccaaaacattcttcacgcaggggcttgggatatggctgctggcaacacattttgttgtgggctccttaatttaatgataaaatttaagctaaacacaagccaaaaatgaataggtttttttaatttttatttttcactaaacaggcaattgaaatacatggtacaaaaataagtggtaagataattgtaaaatgaaatggacagaatattcaattttccatctatgaaaatttcacaataaaaatcatagtttactttgt

SEQ ID NO: 279002 - DNA, 522 bp, Artificial Sequence
  derived and/or modified sequence
atgagcagcatgaaccccgagtacgactacctgttcaagctgctgctgatcggcgacagcggcgtgggcaagagctgcctgctgctgagattcgccgacgacacctacaccgagagctacatcagcaccatcggcgtggacttcaagatcagaaccatcgagctggacggcaagaccatcaagctgcagatcgagagcttcaacaacgtgaagcagtggctgcaggagatcgacagatacgccagcgagaacgtgaacaagctgctggtgggcaacaagtgcgacctgaccaccaagaaggtggtggactacaccaccgccaaggagttcgccgacagcctgggcatccccttcctggagaccagcgccaagaacgccaccaacgtggagcagagcttcatgaccatggccgccgagatcaagaagagaatgggccccggcgccaccgccggcggcgccgagaagagcaacgtgaagatccagagcacccccgtgaagcagagcggcggcggctgctgctag

SEQ ID NO: 279003 - DNA, 426 bp, Artificial Sequence
  derived and/or modified sequence
atgagcagcatgaaccccgagtacgactacctgttcaagctgctgctgatcggcgacagcggcgtgggcaagagctgcctgctgctgagattcgccgagagcttcaacaacgtgaagcagtggctgcaggagatcgacagatacgccagcgagaacgtgaacaagctgctggtgggcaacaagtgcgacctgaccaccaagaaggtggtggactacaccaccgccaaggagttcgccgacagcctgggcatccccttcctggagaccagcgccaagaacgccaccaacgtggagcagagcttcatgaccatggccgccgagatcaagaagagaatgggccccggcgccaccgccggcggcgccgagaagagcaacgtgaagatccagagcacccccgtgaagcagagcggcggcggctgctgctag

SEQ ID NO: 279004 - DNA, 717 bp, Artificial Sequence
  derived and/or modified sequence
atgagtcgctatggtaggtacggaggcgagaccaaagtttacgtgggtaatctgggtacgggggccggaaagggcgagttggagcgcgctttttcttattacggtcccctacggacggtatggatcgcacgcaatccacctggcttcgcatttgtggaattcgaggaccctcgggacgctgaggacgccgtgagggggcttgacgggaaagtgatatgtgggtcacgggtgcgggttgaactgagcacaggaatgcctcgtcggtcgcggttcgatagacctccagctcgaaggccttttgaccccaacgatagatgttatgaatgtggcgagaaggggcattacgcatacgattgtcaccgatattcgcgaagacgaaggagccggtctcgaagcagatcgcacagccgatctagagggaggcgatactctcgtagccggagccgttccagaggcagacgctcacgctccgcaagccccagacgcagtcgctcaatttcactgagaaggagtcggtctgcttccctgcgcagatctagaagcggatctattaagggttctcgctatttccagtcccctagccggagccgctcacggtcaagatccatcagtcgaccccggtcgtccagatcaaaaagcaggtctcctagccccaagcggtcccgctcaccgagcggctcgccccgaaggagcgctagccccgaacgaatggactag

SEQ ID NO: 279005 - DNA, 681 bp, Artificial Sequence
  derived and/or modified sequence
atgtccaggtacggccggtatggcggggaaacaaaagtgtatgtcgggaatctcggtacaggcgcaggcaagggagagttggagagggctttctcttattacggacctttgcgaacagtctggatagcaagaaaccccccaggctttgcatttgttgaattcgaggaccctcgtgacgctgaagacgcagtaagggggttagacggcaaggtaatatgtggcagcagggtacgagtcgaattaagcacaggtatgccgcgccgctcgaggtttgaccgcccaccagctcgacggccattcgatcccaatgaccggtgttacgagtgtggtgaaaaggggcattacgcgtacgactgccacagatacagcagaaggagacgctccagatcccgatcccgcagccactccagaagtagaggccgacgctacagccgatctcggtcgagatctcgcgggcggaggtcacgctcggctagcccgagaaggtcacggtcgatctcactcaggaggtcacgttccgccagcctgcggagaagtagatccggttcaatcaaagggagtaggtattttcagtcaccgtccagaagtcggtctcggtctcggtcaataagtcggccacggagttcccgcagtcccagcggctcaccgaggcggtcggccagtcctgaaaggatggattag

SEQ ID NO: 279006 - DNA, 717 bp, Artificial Sequence
  derived and/or modified sequence
atgagccgctatggccgctatggaggagagaccaaggtgtatgtgggcaacctgggcaccggggccggcaagggggagctggagcgggccttctcctactacggccccctgaggacagtgtggatcgccaggaaccccccaggctttgcctttgtggagtttgaggaccccagagatgctgaagatgctgtgcggggcctggatggcaaggtgatctgtggcagccgggtgcgggtggagctgagcacaggcatgcccaggaggagcagatttgaccggcccccagcccggcggccctttgaccccaatgaccgctgctatgaatgtggggagaagggccactacgcctatgactgccaccgctacagcagaagaagaagaagccgcagccgcagccgcagccacagccgcagccggggccgccgctacagccgcagccgcagccgcagccggggcagaagaagccgcagcgccagccccaggaggagccgcagcatcagcctgcggcgcagccgcagcgccagcctgcggcgcagccgcagcggcagcatcaagggcagccgctacttccagagccccagccgcagccgcagccgcagccgcagcatcagccggcccaggagcagccgcagcaagagccgcagccccagccccaagaggagccgcagccccagcggcagccccaggagaagtgccagccctgagaggatggactag

SEQ ID NO: 279007 - DNA, 681 bp, Artificial Sequence
  derived and/or modified sequence
atgagccgctatggccgctatggaggagagaccaaggtgtatgtgggcaacctgggcaccggggccggcaagggggagctggagcgggccttctcctactacggccccctgaggacagtgtggatcgccaggaaccccccaggctttgcctttgtggagtttgaggaccccagagatgctgaagatgctgtgcggggcctggatggcaaggtgatctgtggcagccgggtgcgggtggagctgagcacaggcatgcccaggaggagcagatttgaccggcccccagcccggcggccctttgaccccaatgaccgctgctatgaatgtggggagaagggccactacgcctatgactgccaccgctacagcagaagaagaagaagccgcagccgcagccgcagccacagccgcagccggggccgccgctacagccgcagccgcagccgcagccggggcagaagaagccgcagcgccagccccaggaggagccgcagcatcagcctgcggcgcagccgcagcgccagcctgcggcgcagccgcagcggcagcatcaagggcagccgctacttccagagccccagccgcagccgcagccgcagccgcagcatcagccggcccaggagcagccgcagccccagcggcagccccaggagaagtgccagccctgagaggatggactag

SEQ ID NO: 279008 - DNA, 717 bp, Artificial Sequence
  derived and/or modified sequence
atgagccggtacggccggtacggcggcgagaccaaggtgtacgtgggcaacctgggcacaggcgccggcaagggcgaattggagcgagctttctcatactacggtcccctacggaccgtgtggattgccagaaatccaccgggcttcgcgtttgtggagttcgaggatccaagggacgctgaagacgccgtgaggggactggacggcaaggttatctgtggcagtagagtccgggtcgaactgtcaacaggtatgccacggagaagccggttcgataggccaccggcgaggaggccgttcgatcctaatgaccgttgctacgagtgcggtgagaaggggcactatgcgtacgactgtcatcggtacagccgccgccgccgctcgcggagcagatctcggagtcatagtagatcccgggggagaagatattcccgttcacgttcccgaagtcgcgggcggcggagcaggagcgccagtccaagacggagtcggtccatttctttaagacgtagtagatctgcctcactccgaagatccagatcaggatccatcaagggcagccgatattttcaatctccctctcggtctagatctcgaagtcgctccatcagtcggccccggtccagccgttcgaaatccagaagtccctcccctaagcggtcgcggagcccatctggctcacctcggcgctccgcctcaccagaacggatggactag

SEQ ID NO: 279009 - DNA, 681 bp, Artificial Sequence
  derived and/or modified sequence
atgagccggtacggccggtacggcggcgagaccaaggtgtacgtgggcaatctgggcaccggtgcggggaagggggaattggagagggccttctcttactacggaccattgcgcacagtgtggatagcgcgcaaccctcccggcttcgctttcgtcgaattcgaggatcctcgcgatgccgaggacgcagtgagaggcctggacgggaaagttatttgcggcagccgcgtgcgggtcgagctgtcaacagggatgcctcggcggtctcggttcgaccgccctccagccaggcggccgtttgaccctaatgaccgatgctacgagtgcggcgagaaaggccactatgcctatgactgtcacaggtacagtcggcgccgtcgtagtagatcacggtcacgctctcacagccgctcacggggaaggaggtattcaaggtctaggtctcggtcccgaggacggcggtcacgcagtgcctcccctagacggagccggtccataagtttgcgcagaagtagaagcgcatccttgagaaggagccggtctggctccatcaaaggcagccgatattttcagagcccgagccgaagccggagtcgctcaagatccatctcacgacccagaagtagcagaagcccatctggatctcccagaaggagcgcatctccagagcggatggattag

SEQ ID NO: 279010 - DNA, 717 bp, Artificial Sequence
  derived and/or modified sequence
atgagccggtacgggagatacggaggcgagacaaaagtatatgtcggcaacttgggaacaggtgccggtaagggcgagctcgagcgagccttctcctattacggacccctgcgtaccgtgtggatcgcaagaaacccaccagggttcgcatttgtagagtttgaggaccccagagacgccgaggacgccgttagaggccttgatggtaaggttatttgcggcagccgcgtgcgcgtggagctgtccacggggatgccgcgaaggagtcggtttgatcgcccacctgcaagaagaccctttgatccaaatgatcgatgttacgagtgcggcgagaaaggccattatgcctacgactgtcacagatactccaggagaagaagaagtcgatcaagaagtcggagtcactcccggtcaaggggcaggaggtatagcaggagccggagccgttcccgaggccgacggagcaggagcgccagcccaaggagaagccgatctatatcccttcggcgttcccggagcgcttctctgcgaagaagtagaagtgggtccatcaaaggcagtagatacttccagagcccaagccggtccagatcgcggagccgctcaattagcagaccacggtcttctcggtcaaaaagtcgttccccttcacctaaaaggtcacggtctccctctgggagtccaagacgatctgcctcccctgaaaggatggactag

SEQ ID NO: 279011 - DNA, 681 bp, Artificial Sequence
  derived and/or modified sequence
atgtctaggtacggacggtacgggggagagacaaaggtatacgtaggcaacctgggcaccggcgcaggcaaaggggagcttgagcgagccttcagctactacggaccgctcagaaccgtgtggatcgcgaggaaccctccagggttcgcctttgtagagttcgaggaccccagagatgcggaagatgcagtacgtgggttggatggcaaggttatctgcgggagcagagtacgcgtggaattaagcaccggtatgccacggagatccaggttcgatagaccccctgcacgacggcctttcgatccgaacgaccgctgctacgaatgcggggaaaaaggtcactacgcttacgattgccataggtattctagacggagacgctctagatcgcgttctcggtcacactcccggagcagaggccgaaggtatagccgaagccgatcccgcagccggggaaggcgcagcagaagcgctagcccccgacgcagcagatctatcagtttacgacgtagtagatcggcttccttgcggcgttctcgctctggatcaatcaaaggctctcgatactttcagagcccatctcgatcacggtcccgatcacgcagcattagccgcccacggtctagccggagcccctctgggagcccacgccgaagtgcatctccagaaagaatggattag

SEQ ID NO: 279012 - DNA, 2489 bp, Artificial Sequence
  derived and/or modified sequence
agtctcttcagttccttccgcgtcgtttcttggctgtttccgcccagctcctttgtgccgcgcagaacaacgagatgacgcatgcgcaaagcgcagcggccgcatatataaacgcgaacccgggctcttcctcgtagtgccgccgggactcttggcgggtgaaggtgtgtgtcagcttttgcgtcactcgagccctgggcgctgcttgctaaagagccgagcacgcgggtctgtcatcatgtcgcgttacgggcggtacggaggagaaaccaaggtgtatgttggtaacctgggaactggcgctggcaaaggagagttagaaagggctttcagttattatggtcctttaagaactgtatggattgcgagaaatcctccaggatttgcctttgtggaattcgaagatcctagagatgcagaagatgcagtacgaggactggatggaaaggtgatttgtggctcccgagtgagggttgaactatcgacaggcatgcctcggagatcacgttttgatagaccacctgcccgacgtccctttgatccaaatgatagatgctatgagtgtggcgaaaagggacattatgcttatgattgtcatcgttacagccggcgaagaagaagcaggtcacggtctagatcacattctcgatccagaggaaggcgatactctcgctcacgcagcaggagcaggggacgaaggtcaaggtcagcatctcctcgacgatcaagatctatctctcttcgtagatcaagatcagcttcactcagaagatctaggtctggttctataaaaggatcgaggtatttccaatccccgtcgaggtcaagatcaagatccaggtctatttcacgaccaagaagcagccgatcaaagtccagatctccatctccaaaaagaagtcgttccccatcaggaagtcctcgcagaagtgcaagtcctgaaagaatggactgaagctctcaagttcaccctttagggaaaagttattttgtttacattattataagggatttgtgatgtctgtaaagtgtaacctaggaaagataattcaaccatctaatcaaaatggatctggattactatgtaaattcacagcagtaagataatataaattttgttgaatgtattaacatcatatggtctgaaaatgtgggtttttatttggcacatttaaataaaatgtttctaactagatttttgatttgtgttcaatattaacacttcttaatttgatatatttgagagtcagacattataattgttaaccttattcatacatacctacattcagaattgaaaggtgttggttaagtcttgaacatcactattctatgcataaaacttggccaggatcttaagggactttgaaaattccatcttacccttgtagctctgggtaagatgacctgagtcccttatgatacagcctgaatgcatcatgacagatccttaagttagctaatccgtttgaagttggtgttagtaggtattgtatgatcagtggtgaagcaagtaggaccactgatgtgtctaaatgagcatgacaggaactaaacgaaactgattaaatgtatgagaaatagaaacatttctggatgatctttatactaattgcagctttcaggctactaggtggcatagtgttaattaggactccccaagatatggggagttctactctcaatggtcttgtttctttgctttctacattagttaaccagttttataccaaaaaatgcatgtttgaggaattgtctgaaattgggacaaaacaccttcatgtaaaccagctttgcaaaattttccagcccagatactcttcatctattcaaatggattgtcttattctgagcaaagacctgttgttaatcttcaagctaggttttgcagttcccaaccacaacattcttctattttgccaggctggtgcaaagtaattaaagatgtcaatcagaaatgtcaatgagactaaagtggttttgtaaatctcagctatatttagcaacactccatgtagctaatattttttggtagcatctggtagaccttagaatgttacatagccagtaggttctttattcaaattttaagtatcttaagaatagtagggcagtaacagttacttttgagagttttctggtcaagcttttaccaggcattctctagccttggtacaaaaaaaaaaaaacctgctggttgcgcagatacctaggcttgtccattttatgcatttcagcaaagtcattggatactattgcaacttgggaatactggtctgcatcaagtttattcggtagtttgaccgctagtatgttggaagttatttggattgtttttggaattttgactggctgaattatggttggtataaagttatgtgtataactggcaggcttatttatctgttgcacttggttagctttaattgttctgtattatttaaagataagtttactcaacaataaatctgcagagattgaacaaataa

SEQ ID NO: 279013 - DNA, 1169 bp, Artificial Sequence
  derived and/or modified sequence
gtagtgccgccgggactcttggcgggtgaaggtgtgtgtcagcttttgcgtcactcgagccctgggcgctgcttgctaaagagccgagcacgcgggtctgtcatcatgtcgcgttacgggcggtacggaggagaaaccaaggtgtatgttggtaacctgggaactggcgctggcaaaggagagttagaaagggctttcagttattatggtcctttaagaactgtatggattgcgagaaatcctccaggatttgcctttgtggaattcgaagatcctagagatgcagaagatgcagtacgaggactggatggaaaggtgatttgtggctcccgagtgagggttgaactatcgacaggcatgcctcggagatcacgttttgatagaccacctgcccgacgtccctttgatccaaatgatagatgctatgagtgtggcgaaaagggacattatgcttatgattgtcatcgttacagccggcgaagaagaagcaggtcacggtctagatcacattctcgatccagaggaaggcgatactctcgctcacgcagcaggagcaggggacgaaggtcaaggtcagcatctcctcgacgatcaagatctatctctcttcgtagatcaagatcagcttcactcagaagatctaggtctggttctataaaaggatcgaggtatttccaatccccgtcgaggtcaagatcaagatccaggtctatttcacgaccaagaagcagtcgttccccatcaggaagtcctcgcagaagtgcaagtcctgaaagaatggactgaagctctcaagttcaccctttagggaaaagttattttgtttacattattataagggatttgtgatgtctgtaaagtgtaacctaggaaagataattcaaccatctaatcaaaatggatctggattactatgtaaattcacagcagtaagataatataaattttgttgaatgtattaacatcatatggtctgaaaatgtgggtttttatttggcacatttaaataaaatgtttctaactagatttttgatttgtgttcaatattaacacttcttaatttgatatatttgagagtcagacattataattgttaaccttattcatacatacctacattcagaattgaaaggtgttggttaagtcttgaacatcactattctatgcat

SEQ ID NO: 279014 - DNA, 717 bp, Artificial Sequence
  derived and/or modified sequence
atgagcagatacggcagatacggcggcgagaccaaggtgtacgtgggcaacctgggcaccggcgccggcaagggcgagctggagagagccttcagctactacggccccctgagaaccgtgtggatcgccagaaacccccccggcttcgccttcgtggagttcgaggaccccagagacgccgaggacgccgtgagaggcctggacggcaaggtgatctgcggcagcagagtgagagtggagctgagcaccggcatgcccagaagaagcagattcgacagaccccccgccagaagacccttcgaccccaacgacagatgctacgagtgcggcgagaagggccactacgcctacgactgccacagatacagcagaagaagaagaagcagaagcagaagcagaagccacagcagaagcagaggcagaagatacagcagaagcagaagcagaagcagaggcagaagaagcagaagcgccagccccagaagaagcagaagcatcagcctgagaagaagcagaagcgccagcctgagaagaagcagaagcggcagcatcaagggcagcagatacttccagagccccagcagaagcagaagcagaagcagaagcatcagcagacccagaagcagcagaagcaagagcagaagccccagccccaagagaagcagaagccccagcggcagccccagaagaagcgccagccccgagagaatggactag

SEQ ID NO: 279015 - DNA, 681 bp, Artificial Sequence
  derived and/or modified sequence
atgagcagatacggcagatacggcggcgagaccaaggtgtacgtgggcaacctgggcaccggcgccggcaagggcgagctggagagagccttcagctactacggccccctgagaaccgtgtggatcgccagaaacccccccggcttcgccttcgtggagttcgaggaccccagagacgccgaggacgccgtgagaggcctggacggcaaggtgatctgcggcagcagagtgagagtggagctgagcaccggcatgcccagaagaagcagattcgacagaccccccgccagaagacccttcgaccccaacgacagatgctacgagtgcggcgagaagggccactacgcctacgactgccacagatacagcagaagaagaagaagcagaagcagaagcagaagccacagcagaagcagaggcagaagatacagcagaagcagaagcagaagcagaggcagaagaagcagaagcgccagccccagaagaagcagaagcatcagcctgagaagaagcagaagcgccagcctgagaagaagcagaagcggcagcatcaagggcagcagatacttccagagccccagcagaagcagaagcagaagcagaagcatcagcagacccagaagcagcagaagccccagcggcagccccagaagaagcgccagccccgagagaatggactag

SEQ ID NO: 279016 - protein, 393 aa, Artificial Sequence
  derived and/or modified sequence
MHQAGYPGCRGAMAESHLLQWLLLLLPTLCGPGTAAWTTSSLACAQGPEFWCQSLEQALQCRALGHCLQEVWGHVGADDLCQECEDIVHILNKMAKEAIFQDTMRKFLEQECNVLPLKLLMPQCNQVLDDYFPLVIDYFQNQTDSNGICMHLGLCKSRQPEPEQEPGMSDPLPKPLRDPLPDPLLDKLVLPVLPGALQARPGPHTQDLSEQQFPIPLPYCWLCRALIKRIQAMIPKGALAVAVAQVCRVVPLVAGGICQCLAERYSVILLDTLLGRMLPQLVCRLVLRCSMDDSAGPRSPTGEWLPRDSECHLCMSVTTQAGNSSEQAIPQAMLQACVGSWLDREKCKQFVEQHTPQLLTLVPRGWDAHTTCQALGVCGTMSSPLQCIHSPDL

SEQ ID NO: 279017 - protein, 349 aa, Artificial Sequence
  derived and/or modified sequence
MAESHLLQWLLLLLPTLCGPGTAAWTTSSLACAQGPEFWCQSLEQALQCRALGHCLQDTMRKFLEQECNVLPLKLLMPQCNQVLDDYFPLVIDYFQNQTDSNGICMHLGLCKSRQPEPEQEPGMSDPLPKPLRDPLPDPLLDKLVLPVLPGALQARPGPHTQDLSEQQFPIPLPYCWLCRALIKRIQAMIPKGALAVAVAQVCRVVPLVAGGICQCLAERYSVILLDTLLGRMLPQLVCRLVLRCSMDDSAGPRSPTGEWLPRDSECHLCMSVTTQAGNSSEQAIPQAMLQACVGSWLDREKCKQFVEQHTPQLLTLVPRGWDAHTTCQALGVCGTMSSPLQCIHSPDL

SEQ ID NO: 279018 - protein, 383 aa, Artificial Sequence
  derived and/or modified sequence
GAMAESHLLQWLLLLLPTLCGPGTAAWTTSSLACAQGPEFWCQSLEQALQCRALGHCLQEVWGHVGADDLCQECEDIVHILNKMAKEAIFQDTMRKFLEQECNVLPLKLLMPQCNQVLDDYFPLVIDYFQNQTDSNGICMHLGLCKSRQPEPEQEPGMSDPLPKPLRDPLPDPLLDKLVLPVLPGALQARPGPHTQDLSEQQFPIPLPYCWLCRALIKRIQAMIPKGALAVAVAQVCRVVPLVAGGICQCLAERYSVILLDTLLGRMLPQLVCRLVLRCSMDDSAGPRSPTGEWLPRDSECHLCMSVTTQAGNSSEQAIPQAMLQACVGSWLDREKCKQFVEQHTPQLLTLVPRGWDAHTTCQALGVCGTMSSPLQCIHSPDL

SEQ ID NO: 279019 - protein, 381 aa, Artificial Sequence
  derived and/or modified sequence
MAESHLLQWLLLLLPTLCGPGTAAWTTSSLACAQGPEFWCQSLEQALQCRALGHCLQEVWGHVGADDLCQECEDIVHILNKMAKEAIFQDTMRKFLEQECNVLPLKLLMPQCNQVLDDYFPLVIDYFQNQTDSNGICMHLGLCKSRQPEPEQEPGMSDPLPKPLRDPLPDPLLDKLVLPVLPGALQARPGPHTQDLSEQQFPIPLPYCWLCRALIKRIQAMIPKGALAVAVAQVCRVVPLVAGGICQCLAERYSVILLDTLLGRMLPQLVCRLVLRCSMDDSAGPRSPTGEWLPRDSECHLCMSVTTQAGNSSEQAIPQAMLQACVGSWLDREKCKQFVEQHTPQLLTLVPRGWDAHTTCQALGVCGTMSSPLQCIHSPDL

SEQ ID NO: 279020 - DNA, 1182 bp, Artificial Sequence
  derived and/or modified sequence
atgcaccaggccggctaccccggctgcagaggcgccatggccgagagccacctgctgcagtggctgctgctgctgctgcccaccctgtgcggccccggcaccgccgcctggaccaccagcagcctggcctgcgcccagggccccgagttctggtgccagagcctggagcaggccctgcagtgcagagccctgggccactgcctgcaggaggtgtggggccacgtgggcgccgacgacctgtgccaggagtgcgaggacatcgtgcacatcctgaacaagatggccaaggaggccatcttccaggacaccatgagaaagttcctggagcaggagtgcaacgtgctgcccctgaagctgctgatgccccagtgcaaccaggtgctggacgactacttccccctggtgatcgactacttccagaaccagaccgacagcaacggcatctgcatgcacctgggcctgtgcaagagcagacagcccgagcccgagcaggagcccggcatgagcgaccccctgcccaagcccctgagagaccccctgcccgaccccctgctggacaagctggtgctgcccgtgctgcccggcgccctgcaggccagacccggcccccacacccaggacctgagcgagcagcagttccccatccccctgccctactgctggctgtgcagagccctgatcaagagaatccaggccatgatccccaagggcgccctggccgtggccgtggcccaggtgtgcagagtggtgcccctggtggccggcggcatctgccagtgcctggccgagagatacagcgtgatcctgctggacaccctgctgggcagaatgctgccccagctggtgtgcagactggtgctgagatgcagcatggacgacagcgccggccccagaagccccaccggcgagtggctgcccagagacagcgagtgccacctgtgcatgagcgtgaccacccaggccggcaacagcagcgagcaggccatcccccaggccatgctgcaggcctgcgtgggcagctggctggacagagagaagtgcaagcagttcgtggagcagcacaccccccagctgctgaccctggtgcccagaggctgggacgcccacaccacctgccaggccctgggcgtgtgcggcaccatgagcagccccctgcagtgcatccacagccccgacctgtag

SEQ ID NO: 279021 - DNA, 1050 bp, Artificial Sequence
  derived and/or modified sequence
atggccgagagccacctgctgcagtggctgctgctgctgctgcccaccctgtgcggccccggcaccgccgcctggaccaccagcagcctggcctgcgcccagggccccgagttctggtgccagagcctggagcaggccctgcagtgcagagccctgggccactgcctgcaggacaccatgagaaagttcctggagcaggagtgcaacgtgctgcccctgaagctgctgatgccccagtgcaaccaggtgctggacgactacttccccctggtgatcgactacttccagaaccagaccgacagcaacggcatctgcatgcacctgggcctgtgcaagagcagacagcccgagcccgagcaggagcccggcatgagcgaccccctgcccaagcccctgagagaccccctgcccgaccccctgctggacaagctggtgctgcccgtgctgcccggcgccctgcaggccagacccggcccccacacccaggacctgagcgagcagcagttccccatccccctgccctactgctggctgtgcagagccctgatcaagagaatccaggccatgatccccaagggcgccctggccgtggccgtggcccaggtgtgcagagtggtgcccctggtggccggcggcatctgccagtgcctggccgagagatacagcgtgatcctgctggacaccctgctgggcagaatgctgccccagctggtgtgcagactggtgctgagatgcagcatggacgacagcgccggccccagaagccccaccggcgagtggctgcccagagacagcgagtgccacctgtgcatgagcgtgaccacccaggccggcaacagcagcgagcaggccatcccccaggccatgctgcaggcctgcgtgggcagctggctggacagagagaagtgcaagcagttcgtggagcagcacaccccccagctgctgaccctggtgcccagaggctgggacgcccacaccacctgccaggccctgggcgtgtgcggcaccatgagcagccccctgcagtgcatccacagccccgacctgtag

SEQ ID NO: 279022 - DNA, 1152 bp, Artificial Sequence
  derived and/or modified sequence
ggcgccatggccgagagccacctgctgcagtggctgctgctgctgctgcccaccctgtgcggccccggcaccgccgcctggaccaccagcagcctggcctgcgcccagggccccgagttctggtgccagagcctggagcaggccctgcagtgcagagccctgggccactgcctgcaggaggtgtggggccacgtgggcgccgacgacctgtgccaggagtgcgaggacatcgtgcacatcctgaacaagatggccaaggaggccatcttccaggacaccatgagaaagttcctggagcaggagtgcaacgtgctgcccctgaagctgctgatgccccagtgcaaccaggtgctggacgactacttccccctggtgatcgactacttccagaaccagaccgacagcaacggcatctgcatgcacctgggcctgtgcaagagcagacagcccgagcccgagcaggagcccggcatgagcgaccccctgcccaagcccctgagagaccccctgcccgaccccctgctggacaagctggtgctgcccgtgctgcccggcgccctgcaggccagacccggcccccacacccaggacctgagcgagcagcagttccccatccccctgccctactgctggctgtgcagagccctgatcaagagaatccaggccatgatccccaagggcgccctggccgtggccgtggcccaggtgtgcagagtggtgcccctggtggccggcggcatctgccagtgcctggccgagagatacagcgtgatcctgctggacaccctgctgggcagaatgctgccccagctggtgtgcagactggtgctgagatgcagcatggacgacagcgccggccccagaagccccaccggcgagtggctgcccagagacagcgagtgccacctgtgcatgagcgtgaccacccaggccggcaacagcagcgagcaggccatcccccaggccatgctgcaggcctgcgtgggcagctggctggacagagagaagtgcaagcagttcgtggagcagcacaccccccagctgctgaccctggtgcccagaggctgggacgcccacaccacctgccaggccctgggcgtgtgcggcaccatgagcagccccctgcagtgcatccacagccccgacctgtag

SEQ ID NO: 279023 - DNA, 1182 bp, Artificial Sequence
  derived and/or modified sequence
atgcatcaggccgggtatcccggctgcaggggagcaatggctgagtctcacttgctgcaatggctgcttctgcttctgccaactttatgtggccctggcacagctgcttggacgactagttccctggcctgcgcccagggtcctgaattctggtgtcagtctctagagcaggcgcttcagtgcagggcattaggccattgcttgcaagaggtgtggggacatgtgggcgccgatgacctctgccaagaatgcgaggacatcgtgcacattctgaacaagatggctaaggaggcgatttttcaggatacgatgaggaaatttctcgagcaagaatgcaacgttctgccattgaagctgctcatgcctcagtgcaatcaggtgcttgatgactacttcccactcgtgattgattattttcagaaccagactgatagcaatggcatatgcatgcatctcgggctgtgtaagtcccggcagccagaaccagagcaggagccgggcatgtcagacccgctccccaagccactcagggatcctctccctgacccattactcgacaagcttgtgctcccagtgttacctggagctctgcaggccagaccagggccacacactcaggacttatccgagcaacagtttcccattccactcccatattgctggctctgccgggcattgattaaaagaattcaggccatgatcccgaagggggctctcgctgttgccgttgctcaagtttgccgtgtggtgcccttggtggctggcggcatttgtcagtgcctggcggagcgttattccgtcatcctgctggacacactcctgggtcggatgctcccacagcttgtttgtcggttagtgctaaggtgcagtatggacgattctgccggaccacgaagtcctaccggagaatggcttccccgcgactctgagtgccacctttgcatgagcgtaaccacccaggctggtaattccagcgagcaagccatcccccaggccatgctgcaagcttgcgttggatcatggctagacagagagaaatgtaaacagttcgtggaacagcatacccctcagctgctgaccttagttccgagaggatgggacgcccacacaacatgtcaggccctgggagtctgtggcacaatgtcatcccccttgcaatgtatacactcacccgatctctag

SEQ ID NO: 279024 - DNA, 1182 bp, Artificial Sequence
  derived and/or modified sequence
atgcatcaagctggatacccgggttgtcgtggtgccatggcggaatctcacttgctgcagtggcttctgctgctgcttcctactctctgtggccccggaacagctgcctggacaacttctagtctggcatgcgcccagggaccagaattttggtgccaatcactggaacaggcgctccagtgcagggctcttggccattgcctacaggaagtctggggacatgttggagctgatgatttgtgtcaggagtgcgaggatatagtacatattctgaacaagatggccaaggaggcaatattccaagataccatgcggaagttcctggaacaggaatgtaatgttctgcccctcaaattgctgatgccccaatgtaaccaggtgctggatgattattttccactcgttattgactatttccaaaaccaaaccgattccaacggaatttgcatgcatttgggattatgcaagagcagacaacccgagcccgagcaggaaccaggaatgtccgaccctctgccaaagccgctcagagaccccttaccagatcccttgctcgacaagcttgtgcttcccgtattgcctggcgccttacaggctcgccccggtccgcacacgcaggacctgagcgagcagcagtttccaatccccctcccgtactgttggctctgccgggcattgataaaacggatccaggccatgatcccgaaaggggcattagctgtggctgtagcgcaggtgtgtcgggtggtgccgttggttgcagggggaatctgtcagtgtctagccgaacggtattccgtcatcttattggatactttgctgggtcgcatgcttccacagctggtatgtcggctcgtgctccgctgttctatggacgatagcgctgggccaaggagtcctactggcgagtggcttccacgggacagtgagtgtcacctgtgtatgtcagtgactacacaggccggtaatagtagcgaacaagctattccgcaggcaatgttgcaggcttgcgtggggtcctggctggatcgcgaaaagtgtaagcaatttgtcgagcagcacactccccagctcctgaccctggtgccccgaggctgggatgcacatacgacttgccaagcactgggggtgtgcggaaccatgagctctcctttacaatgcattcacagtccagatctgtag

SEQ ID NO: 279025 - DNA, 1050 bp, Artificial Sequence
  derived and/or modified sequence
atggccgagagtcaccttctgcaatggctgttgctactcttacctactctatgtggccctggtaccgccgcctggacgaccagtagtctcgcatgcgcccagggccccgaattttggtgtcaatccctggaacaggccctgcagtgccgtgctctgggccactgccttcaggacaccatgcggaaatttcttgagcaggaatgtaacgtcttaccactgaagttattaatgccccagtgcaaccaagtgcttgatgattactttcccttagtcatcgattactttcagaatcaaactgactccaatggtatctgtatgcatctggggctttgcaagtctaggcaacccgaaccggagcaagagcctggaatgtctgaccccctccctaagccgttaagggatccgctccctgatcctttgctggataaattggttctcccagttcttcccggggcgctgcaagcgcgccctggtccccacacccaggatctgagtgaacaacagttccctatcccactaccttactgctggttgtgccgggccctcatcaaaagaatccaggccatgatccctaagggtgccctggccgtggctgtcgcgcaagtgtgcagggttgtgccccttgtggccggcggaatctgtcagtgcctggccgagaggtatagcgtgatcctactggatactttattgggcaggatgcttccacagcttgtctgcaggttggtgctgaggtgcagcatggatgactcagcagggcctcggtccccgaccggggaatggctgccgagagatagcgagtgccatctttgcatgagtgtcactacacaggccgggaattcctcagagcaggccatcccacaggcaatgctccaggcctgcgttggtagttggctggaccgggagaaatgtaaacagttcgtggaacagcataccccccaattgttgaccctggtaccaaggggatgggatgcacacacgacatgtcaggccctgggcgtttgtggcaccatgtcatccccgcttcaatgcatccattcaccagatctctag

SEQ ID NO: 279026 - DNA, 1152 bp, Artificial Sequence
  derived and/or modified sequence
ggagccatggctgaatcgcacttactccagtggctcttactcctgctgccaacactgtgcggccctggaacagcagcttggacaacgtcctcgctcgcgtgtgcccagggaccagaattttggtgccagagtctggaacaagcgttgcagtgtagagccctgggacattgcctccaggaggtatgggggcacgtaggcgccgatgacctctgtcaggaatgcgaggacatcgtccacatattgaataagatggccaaggaggctatctttcaggacactatgagaaagttcttagaacaggagtgtaatgtgctgccgttgaaacttcttatgccacagtgtaatcaggtccttgatgactacttccccctcgtgatcgattacttccagaaccaaaccgattctaatggcatttgtatgcatttgggtttgtgtaagagccgacagcctgagcccgaacaagaacctggcatgtccgaccccctccctaagcccctgagggatccactacctgatccattacttgataagctggtgctgcccgtcctgcccggggcactccaagctcggcccggtccacacacgcaggacctgtcagaacaacagtttcccatccctcttccgtactgctggctgtgcagagcactgattaaacggatccaggctatgatccctaagggggcccttgccgtggctgtggcccaggtgtgcagggtggtacccctagtggctggcggaatctgccaatgcttggctgaaaggtactctgtgatcctgctggatactctgctgggaagaatgctcccccagttagtctgccggctagttctgaggtgtagcatggacgacagcgctggaccccgttcaccaaccggggaatggctgcccagggacagcgagtgtcacctgtgcatgagcgtaacgacccaggccgggaactcctcagagcaggccataccacaggccatgttacaggcgtgcgtcggctcctggcttgatagggagaagtgcaaacaattcgttgagcagcatacaccacagttgcttacactcgtgcctcgtggttgggatgcacacaccacttgtcaagctcttggagtgtgtggcacaatgtcaagtccactgcagtgcatccactcccccgatttatag

SEQ ID NO: 279027 - DNA, 1182 bp, Artificial Sequence
  derived and/or modified sequence
atgcaccaggccggctacccaggctgccgcggggccatggccgagagccacctgctgcagtggctgctgctgctgctgcccaccctgtgtggccctggaacagctgcctggaccaccagcagcctggcctgtgcccagggccctgagttctggtgccagagcctggagcaggccctgcagtgccgggccctgggccactgcctgcaggaggtgtggggccacgtgggcgcagatgacctgtgccaggagtgtgaagatattgtgcacatcctgaacaagatggccaaggaggccatcttccaggacaccatgaggaagttcctggagcaggagtgcaatgtgctgcccctgaagctgctgatgccccagtgcaaccaggtgctggatgactacttccccctggtgattgactacttccagaaccagacagacagcaatggcatctgcatgcacctgggcctgtgcaagagccggcagcctgagcctgagcaggagcccggcatgtctgaccccctgcccaagcccctgcgggaccccctgcctgaccccctgctggacaagctggtgctgcctgtgctgcccggggccctgcaggcccggcccggcccccacacccaggacctgtctgagcagcagttccccatccccctgccctactgctggctgtgccgggccctgatcaagaggatccaggccatgatccccaagggggccctggccgtggccgtggcccaggtgtgccgggtggtgcccctggtggccggcggcatctgccagtgcctggccgagcgctacagcgtcatcctgctggacaccctgctgggccgcatgctgccccagctggtgtgccgcctggtgctgcgctgcagcatggatgacagcgctggccccaggagccccactggagagtggctgccccgggacagcgagtgccacctgtgcatgtctgtgaccacccaggccggcaacagcagcgagcaggccatcccccaggccatgctgcaggcctgtgtgggctcctggctggaccgggagaagtgcaagcagtttgtggagcagcacaccccccagctgctgaccctggtgccccggggctgggatgcccacaccacctgccaggccctgggcgtgtgtggcaccatgagcagccccctgcagtgcatccacagcccagacctgtag

SEQ ID NO: 279028 - DNA, 1050 bp, Artificial Sequence
  derived and/or modified sequence
atggccgagagccacctgctgcagtggctgctgctgctgctgcccaccctgtgtggccctggaacagctgcctggaccaccagcagcctggcctgtgcccagggccctgagttctggtgccagagcctggagcaggccctgcagtgccgggccctgggccactgcctgcaggacaccatgaggaagttcctggagcaggagtgcaatgtgctgcccctgaagctgctgatgccccagtgcaaccaggtgctggatgactacttccccctggtgattgactacttccagaaccagacagacagcaatggcatctgcatgcacctgggcctgtgcaagagccggcagcctgagcctgagcaggagcccggcatgtctgaccccctgcccaagcccctgcgggaccccctgcctgaccccctgctggacaagctggtgctgcctgtgctgcccggggccctgcaggcccggcccggcccccacacccaggacctgtctgagcagcagttccccatccccctgccctactgctggctgtgccgggccctgatcaagaggatccaggccatgatccccaagggggccctggccgtggccgtggcccaggtgtgccgggtggtgcccctggtggccggcggcatctgccagtgcctggccgagcgctacagcgtcatcctgctggacaccctgctgggccgcatgctgccccagctggtgtgccgcctggtgctgcgctgcagcatggatgacagcgctggccccaggagccccactggagagtggctgccccgggacagcgagtgccacctgtgcatgtctgtgaccacccaggccggcaacagcagcgagcaggccatcccccaggccatgctgcaggcctgtgtgggctcctggctggaccgggagaagtgcaagcagtttgtggagcagcacaccccccagctgctgaccctggtgccccggggctgggatgcccacaccacctgccaggccctgggcgtgtgtggcaccatgagcagccccctgcagtgcatccacagcccagacctgtag

SEQ ID NO: 279029 - DNA, 1152 bp, Artificial Sequence
  derived and/or modified sequence
ggggccatggccgagagccacctgctgcagtggctgctgctgctgctgcccaccctgtgtggccctggaacagctgcctggaccaccagcagcctggcctgtgcccagggccctgagttctggtgccagagcctggagcaggccctgcagtgccgggccctgggccactgcctgcaggaggtgtggggccacgtgggcgcagatgacctgtgccaggagtgtgaagatattgtgcacatcctgaacaagatggccaaggaggccatcttccaggacaccatgaggaagttcctggagcaggagtgcaatgtgctgcccctgaagctgctgatgccccagtgcaaccaggtgctggatgactacttccccctggtgattgactacttccagaaccagacagacagcaatggcatctgcatgcacctgggcctgtgcaagagccggcagcctgagcctgagcaggagcccggcatgtctgaccccctgcccaagcccctgcgggaccccctgcctgaccccctgctggacaagctggtgctgcctgtgctgcccggggccctgcaggcccggcccggcccccacacccaggacctgtctgagcagcagttccccatccccctgccctactgctggctgtgccgggccctgatcaagaggatccaggccatgatccccaagggggccctggccgtggccgtggcccaggtgtgccgggtggtgcccctggtggccggcggcatctgccagtgcctggccgagcgctacagcgtcatcctgctggacaccctgctgggccgcatgctgccccagctggtgtgccgcctggtgctgcgctgcagcatggatgacagcgctggccccaggagccccactggagagtggctgccccgggacagcgagtgccacctgtgcatgtctgtgaccacccaggccggcaacagcagcgagcaggccatcccccaggccatgctgcaggcctgtgtgggctcctggctggaccgggagaagtgcaagcagtttgtggagcagcacaccccccagctgctgaccctggtgccccggggctgggatgcccacaccacctgccaggccctgggcgtgtgtggcaccatgagcagccccctgcagtgcatccacagcccagacctgtag

SEQ ID NO: 279030 - DNA, 1182 bp, Artificial Sequence
  derived and/or modified sequence
atgcaccaggccggctaccccggctgccggggcgccatggccgagtctcacttactgcagtggcttctcttactccttccaactctgtgcggtccagggacagctgcttggaccacatcatcgctggcctgcgcgcaaggaccagagttctggtgccagagtctggagcaagcactgcagtgccgcgcacttggtcattgcctgcaggaagtgtggggacacgttggcgctgacgatttgtgccaggagtgcgaagacatagtccatattctgaataagatggcaaaggaagctatttttcaggacacaatgaggaagtttctggaacaggagtgcaacgtgctcccattaaaattgcttatgccccagtgcaatcaagtgctggacgattactttccgttggtgatagattacttccagaatcagaccgattcaaacgggatctgcatgcatctcggtttgtgcaaatctcgccaacccgagcccgagcaggagcctgggatgagcgatccgcttcctaagccacttcgtgatcctcttcctgacccgttacttgacaagctggtgcttcctgtcctgcctggcgccttacaggctcgacctggcccacacacccaagatttatctgagcagcagttcccaatacccttgccatactgctggctttgtcgggccctgattaaacgcatccaggctatgatccccaagggcgcattggcagtggcagtggctcaggtatgccgggtggtaccattagtcgcaggtggcatatgtcagtgtctcgcagaacgctacagcgtaatcctgctggacaccctgcttggcaggatgctgcctcagctggtgtgcagactggtgctccggtgttctatggacgactctgctgggcctaggagtcctaccggcgagtggctcccacgcgacagcgagtgtcacctttgcatgagcgttaccacccaggcagggaattctagtgaacaggcaatccctcaggctatgctacaagcatgcgttggcagctggttggatcgggagaagtgcaaacagttcgtggagcagcataccccccagctgctgaccctggtcccgcggggttgggatgcccacaccacatgccaggccctcggagtctgtgggactatgagttcacctctgcagtgtattcactctccagacttgtag

SEQ ID NO: 279031 - DNA, 1182 bp, Artificial Sequence
  derived and/or modified sequence
atgcaccaggccggctaccccggctgccggggcgccatggccgagagccatctccttcaatggttacttcttctccttcccacactgtgtggaccaggcacagccgcttggaccacatctagcctggcttgcgcgcaggggcctgagttctggtgtcagagcctcgaacaagctttgcagtgccgagccctgggccattgcttacaagaggtatggggtcacgtcggagccgacgacttgtgtcaggagtgcgaggatattgttcacattctcaataagatggctaaggaggcaatattccaggatactatgcgaaagttcctggagcaggagtgcaatgtgctcccactcaagctgttgatgcctcagtgtaaccaggtgctggatgactatttcccgctggtgatcgattacttccagaaccagacagatagcaatggaatttgtatgcatctaggcctgtgtaaatccagacaaccagaacctgagcaagagcctgggatgtcggacccattaccgaagccacttcgagacccgttgcccgatcctcttctggataagcttgtcctgcccgttctgcctggcgctctccaggccaggcccggcccgcatacccaggatctttccgagcagcaattccccatcccccttccctattgctggctgtgcagagcccttattaaaagaatacaagctatgattcccaaaggagcattagctgtggctgtcgctcaggtgtgccgggtggtacctctggttgccgggggcatctgtcagtgcctggccgaaaggtattccgtgattctgctggacacactgctgggacgcatgctgccccagctcgtatgccggctcgtgctgaggtgtagtatggatgatagcgccggtcctcgttccccgactggcgaatggcttcccagagatagtgagtgtcatctctgtatgtcagtgaccacccaggcgggtaattcgagcgaacaagccatacctcaagcgatgctgcaagcatgcgttggaagctggctcgaccgcgaaaaatgcaagcagttcgtcgaacagcatactcctcaactgttgactctcgtccccagaggctgggacgcacatacaacatgccaggctctgggcgtgtgtggaacaatgagtagccctctacagtgtatccattctccagatctttag

SEQ ID NO: 279032 - DNA, 1050 bp, Artificial Sequence
  derived and/or modified sequence
atggccgagagccacctgctgcagtggctgctgctgctgctgcccacactgtgcggacctggcaccgctgcttggaccacgtcctccctcgcgtgcgcccagggtcctgaattttggtgtcagtcactggaacaggccctgcagtgccgggcccttggccattgcctgcaggataccatgcgcaaatttctggagcaagaatgcaatgtgctgcctctgaagctgcttatgcctcagtgcaaccaggtgcttgacgattacttccccctggtcattgactacttccagaatcaaacagactctaacggcatatgtatgcacctaggcctttgcaaatccaggcagcctgagccagaacaggagccagggatgtccgatccactgcccaagccactcagagaccccttgcctgaccccctgctggacaaactggtgctcccggtgttgcctggcgctcttcaggctcgcccggggccccacactcaagatctaagtgagcagcagtttcccatcccgttaccctactgttggttgtgtagggccttaatcaagaggatccaggccatgatccctaagggcgccctcgccgtcgcagtggcccaagtgtgtcgcgttgtgcccctcgtcgccggcggtatctgccaatgcctggctgaacgttattctgtgatcttgctggataccctgctcggacggatgctgccacagctggtctgtcggctggttctcaggtgcagcatggacgattcggcgggccctcgttcacctacaggagaatggttgcctagagacagcgaatgtcacctgtgtatgtctgttactacccaggctggaaattccagcgagcaggcaatcccccaggccatgttgcaggcatgtgtcggttcatggctcgaccgcgagaaatgtaagcagtttgtggagcagcatacccctcagctgctgactcttgtgccccgagggtgggatgctcacactacgtgccaggccctgggtgtgtgtggtaccatgtcatcccccctgcagtgcattcatagccctgacctctag

SEQ ID NO: 279033 - DNA, 1152 bp, Artificial Sequence
  derived and/or modified sequence
ggcgccatggccgagagccacctgctgcagtggctgctgctgctgctgcctacactgtgtggccctggcactgccgcctggacgaccagctcattggcatgtgcccagggacccgagttttggtgtcagagtcttgaacaggctttacagtgtagagcgctgggacattgtctacaggaggtgtggggccacgtgggggccgatgatctttgccaggagtgtgaggatattgtccatattcttaacaagatggccaaggaggccatcttccaagacactatgagaaagttcctggaacaggagtgcaacgtcttacctctcaaactactcatgcctcaatgtaaccaggtgctcgacgactactttccattagtgatcgactacttccagaaccagactgattctaatggaatctgcatgcacctgggcctgtgcaagagcaggcagcccgagcctgagcaggagcctggcatgagtgaccctctgccaaagccgctgagggatcccctgcctgatcctctcctggacaaactcgtactgcctgttctgcccggggcacttcaggctcgtccaggacctcacacacaggacctgtctgaacagcagtttcctatcccattgccctattgttggctctgtagagcactcatcaaaaggattcaggcgatgataccaaaaggggccctggccgtcgctgtagctcaggtttgtcgggtggtcccactcgtcgcagggggtatctgccagtgcctggctgagcgctattcggtcattcttcttgacaccctgctggggcgcatgcttcctcagctggtctgtaggctcgtcctccggtgctcgatggatgactccgctggcccccggagcccaactggggagtggttacctcgtgactccgagtgccacctgtgtatgagtgtgacaactcaagcgggtaactcatccgaacaggctatcccacaggcaatgctccaagcgtgcgtgggctcttggctggatcgcgagaagtgcaagcaattcgtcgaacagcatacgcctcagctgctcacactcgtcccacggggctgggacgcacatactacctgccaagcactgggagtgtgtggtaccatgtcttcgccactgcaatgcatacactcgccagacttatag

SEQ ID NO: 279034 - DNA, 1182 bp, Artificial Sequence
  derived and/or modified sequence
atgcatcaagccggttacccagggtgtagaggggcaatggcagagagtcacttactccagtggctattgctactattgccaactctgtgtggacctggaacagcggcatggaccacgagttctctcgcgtgcgcccaggggcctgagttctggtgccagtcacttgaacaggcgcttcagtgtcgcgcactcggacattgcctgcaggaggtgtgggggcacgtcggggcagatgacctttgccaggaatgtgaggacatcgtccacatcctcaataagatggctaaagaggctattttccaggacacaatgaggaaatttctggagcaggagtgtaacgtgctcccactcaagctacttatgccccagtgcaatcaggtgctcgacgactattttccactggtcatcgattatttccagaaccagactgactccaacggcatatgtatgcacctggggttatgtaagtctcggcagccggagcctgagcaggagccagggatgtctgaccctctgcctaagcccctgagggaccctctgccggaccccctactagacaagctggtcctgcctgttctgcccggtgctctgcaagccaggcctggcccacacacccaggacctgagtgaacagcaattccccatccccctcccatactgctggctgtgccgcgcactaatcaagcgaattcaggctatgatccctaaaggtgcactcgctgttgcggtggcccaggtctgccgtgtggtgcctctggtggccggaggtatttgccagtgtttggcagaacgctattcggtcatactgctggacacattgctaggtcggatgttgccgcagctggtatgtcgcctagtcctgcgatgcagcatggacgactccgcaggaccgaggtcgcctacaggagaatggctccctagagacagtgagtgccacctgtgtatgtccgtgactacacaagctggcaactccagcgagcaagccatcccccaggccatgcttcaggcatgcgtgggtagctggctggatcgggagaaatgcaaacaatttgtggaacagcacaccccgcagctcctgacactcgtgcccaggggctgggacgctcacacaacatgccaggctctgggggtgtgtggaaccatgtcgagtcctctccagtgcatacattcccctgatctgtag

SEQ ID NO: 279035 - DNA, 1182 bp, Artificial Sequence
  derived and/or modified sequence
atgcatcaagccggataccccggatgccgaggcgcaatggccgaatctcaccttcttcagtggctgctgcttttgctgcccaccctatgtgggccaggcaccgcggcatggacgacgtccagcctcgcctgcgcacagggccctgagttctggtgccaaagtctcgagcaggcactgcagtgtcgcgctctgggccactgcctgcaagaagtgtggggccacgtaggtgctgacgacctgtgtcaggagtgcgaagatattgtacacatcctgaataagatggcaaaagaggccatcttccaagacacaatgagaaaattcctggaacaggaatgtaatgtcttgcccctcaaacttctcatgccccagtgtaatcaagtcctggatgactatttccctctggtgattgattacttccaaaatcagaccgattcaaacggaatctgtatgcacctgggactgtgcaagtctcgacagccagaacccgagcaagaaccgggaatgagtgaccctctgcccaagccattacgggaccctcttcccgatccactgttggataaactagtgctgccggtgctccctggagcattgcaagccaggccaggcccacatacccaagacttgagcgaacaacagttcccaatacccctgccatattgctggttgtgcagagctctgatcaaacggattcaagctatgatccccaaaggagccctggccgtggcggttgcacaggtttgcagagtggtgccactggtcgccggaggcatatgccagtgtctggctgaacgatactctgttatcctcctggataccttactgggaagaatgctaccccaactggtatgccggctggttttgcggtgcagcatggatgactccgctgggccaaggagccctacaggtgagtggcttcctagggatagtgagtgtcatttgtgcatgtccgtcaccacacaggctggaaattccagtgagcaggcaatcccgcaggctatgcttcaggcctgcgtcggcagctggttagaccgggaaaaatgcaaacagtttgttgagcagcacacaccccagttgttaacccttgtccccaggggatgggacgcacataccacatgtcaggctctgggggtctgcggcacaatgagcagccccctccaatgtatccactctcctgatctctag

SEQ ID NO: 279036 - DNA, 1050 bp, Artificial Sequence
  derived and/or modified sequence
atggcggaatcgcacctcttgcagtggctgctgctcctccttcctacactttgtggcccaggtacagcagcatggactaccagctcccttgcctgtgcacaggggccagaattttggtgtcagagtctcgaacaggccctccagtgtcgagcgctcgggcattgtctgcaggacactatgagaaagtttctagaacaggagtgtaatgttttgcctcttaaattattgatgcctcagtgtaatcaggtgctggacgactacttccccctggtgattgactattttcagaatcagactgattcgaatggtatctgcatgcatctaggattgtgtaagtcccgccagcccgaacccgagcaagagcccggaatgagcgatcccctccccaaacccctgagagatccccttccagatccattgctggacaagttagtgctcccagttctccccggagctctccaggcacgacctgggccacacacccaggatttgagtgagcagcagtttcctatcccactcccttactgttggctgtgcagagctctgatcaaaaggatccaagcaatgatccccaagggagccctggcagtggccgtggcacaggtctgtagggtcgtacctctcgtggccggagggatctgtcagtgcctggcggagcggtactccgttatcctgctcgacacgcttctaggtagaatgctgccgcagcttgtgtgtcgacttgtactgcgatgtagcatggatgatagcgcgggaccacggagcccaaccggagagtggcttcctcgggattcagagtgtcacctctgtatgtccgtaacaactcaggccggtaacagttcagaacaggccattccccaagctatgctccaagcttgtgtggggtcatggcttgaccgggagaagtgcaaacagtttgtcgagcagcacaccccccagctgctgacgctggtgcctcgcggatgggacgcacacactacctgtcaggccctgggtgtctgtggaacaatgtcttcaccccttcagtgtattcattctccggatttatag

SEQ ID NO: 279037 - DNA, 1152 bp, Artificial Sequence
  derived and/or modified sequence
ggagccatggctgagagtcacttactgcagtggctgctcttgcttctgccaactctatgtgggcctggtacggctgcatggacgacgtctagtctcgcctgcgctcaagggccagaattctggtgtcagagtctcgagcaggcactgcaatgccgcgctttggggcactgcttgcaagaggtatggggtcatgttggagctgatgatctgtgccaggagtgcgaggatatcgtgcacatcctgaacaagatggccaaggaggcaatttttcaggacactatgcgtaagtttttagagcaggagtgtaacgttctgcccctgaagctgctgatgccccagtgcaatcaggtgctggatgattactttccccttgtgattgattatttccagaatcagaccgactccaacggaatctgtatgcaccttggactctgcaaaagtcggcagccagaacccgaacaggagcccggaatgtctgaccctctgcctaaaccattgagagatcccctgccagatcctctcctcgacaaattagtgctgcccgtcttacctggcgcactgcaagcacggccaggaccgcatacacaggatttaagtgagcagcagttccccatacctcttccgtactgctggctgtgccgcgcactgatcaagcgcatccaagcaatgatccccaagggagcccttgcagtagcagtggcccaggtgtgtcgcgtagtcccgcttgtcgccggtggtatctgccagtgcctcgccgaacgttatagcgtcatcctcttagatactcttctgggacgcatgctgccgcaacttgtatgtcgcttagtgctcaggtgtagcatggacgactctgcgggaccacgctcgccaaccggagagtggctacctcgcgacagcgaatgtcatctgtgtatgtccgttacaacccaggccggaaattcaagcgaacaggctatcccacaggccatgctccaggcatgtgtgggatcttggttagatagagagaagtgcaagcagttcgtggagcagcacacaccccagcttctaacactcgtccccaggggctgggatgcccatacgacatgccaggctttaggtgtttgtggaaccatgtcctcacccttacagtgtatacacagcccggacctttag

SEQ ID NO: 279038 - DNA, 3664 bp, Artificial Sequence
  derived and/or modified sequence
tgtaaatgctcttctgactaatgcaaaccatgtgtccatagaaccagaagatttttccaggggaaaagagcccccacgccccgcccagctataaggggccatgcaccaagcagggtacccaggctgcagaggtgccatggctgagtcacacctgctgcagtggctgctgctgctgctgcccacgctctgtggcccaggcactgctgcctggaccacctcatccttggcctgtgcccagggccctgagttctggtgccaaagcctggagcaagcattgcagtgcagagccctagggcattgcctacaggaagtctggggacatgtgggagccgatgacctatgccaagagtgtgaggacatcgtccacatccttaacaagatggccaaggaggccattttccaggacacgatgaggaagttcctggagcaggagtgcaacgtcctccccttgaagctgctcatgccccagtgcaaccaagtgcttgacgactacttccccctggtcatcgactacttccagaaccagactgactcaaacggcatctgtatgcacctgggcctgtgcaaatcccggcagccagagccagagcaggagccagggatgtcagaccccctgcccaaacctctgcgggaccctctgccagaccctctgctggacaagctcgtcctccctgtgctgcccggggccctccaggcgaggcctgggcctcacacacaggatctctccgagcagcaattccccattcctctcccctattgctggctctgcagggctctgatcaagcggatccaagccatgattcccaagggtgcgctagctgtggcagtggcccaggtgtgccgcgtggtacctctggtggcgggcggcatctgccagtgcctggctgagcgctactccgtcatcctgctcgacacgctgctgggccgcatgctgccccagctggtctgccgcctcgtcctccggtgctccatggatgacagcgctggcccaaggtcgccgacaggagaatggctgccgcgagactctgagtgccacctctgcatgtccgtgaccacccaggccgggaacagcagcgagcaggccataccacaggcaatgctccaggcctgtgttggctcctggctggacagggaaaagtgcaagcaatttgtggagcagcacacgccccagctgctgaccctggtgcccaggggctgggatgcccacaccacctgccaggccctcggggtgtgtgggaccatgtccagccctctccagtgtatccacagccccgacctttgatgagaactcagctgtccagctgcaaaggaaaagccaagtgagacgggctctgggaccatggtgaccaggctcttcccctgctccctggccctcgccagctgccaggctgaaaagaagcctcagctcccacaccgccctcctcaccgcccttcctcggcagtcacttccactggtggaccacgggcccccagccctgtgtcggccttgtctgtctcagctcaaccacagtctgacaccagagcccacttccatcctctctggtgtgaggcacagcgagggcagcatctggaggagctctgcagcctccacacctaccacgacctcccagggctgggctcaggaaaaaccagccactgctttacaggacagggggttgaagctgagccccgcctcacacccacccccatgcactcaaagattggattttacagctacttgcaattcaaaattcagaagaataaaaaatgggaacatacagaactctaaaagatagacatcagaaattgttaagttaagctttttcaaaaaatcagcaattccccagcgtagtcaagggtggacactgcacgctctggcatgatgggatggcgaccgggcaagctttcttcctcgagatgctctgctgcttgagagctattgctttgttaagatataaaaaggggtttctttttgtctttctgtaaggtggacttccagcttttgattgaaagtcctagggtgattctatttctgctgtgatttatctgctgaaagctcagctggggttgtgcaagctagggacccattcctgtgtaatacaatgtctgcaccaatgctaataaagtcctattctcttttatgagaaagaaaaagacaccgtcctttaaagtgctgcagtatggccagacgtggtggctcacacctgcaatcccagcaccttaggaggccgaggcaggaggatccttgaggtcaggagttcgagaccagcctcgccaacatggtgaaaccccatttctactaaaaatacaaaaaattagccaagtgtggtggcatatgcctgtaatcccaactactcagaaggccgaggcaggagaattacttgaacgcaggagaatcactgcagcccaggaggcagaggttgcagtgagccgagattgcaccactgcactccagcctgggtgacagagcaagactccatctcagtaaataaataaataaataaaaagcgctgcagtagctgtggcctcaccctgaagtcagcgggcccaggcctacctcactctctcccttggcagagaagcagacgtccatagctcctctccctcacaagcgctcccagcctgccctccagctgctgctctcccctcccagtctctactcactgggatgaggttaggtcatgaggacaccaaaaacctaaaaataaacaaaaagccaaacaagccttagcttttcttaaagactgaaatgcctggaagtgtccctttatttataaaataacttttgtcatatttcttatacatgtttcttgtaagaaattcagaaactacagacaaagagagtggaaattacccactgtcaggcctctgagcccaagctaagccatcatatcccctgtgccctgcacgtatacacccagatggcctgaagcaactgaagatccacaaaagaagtgaaaatagccagttcctgccttaactgatgacattccaccattgtgatttgttcctgccccaccctaactgatcaattgaccttgtgacaatacaccttccccacccttgagaaggtgctttgtaatattctccccacccaccccacgcccgcacccccgcacccttaagaaggtattttgtaatattctctccgccattgagaatgtgctttgtaagatccaccccctgcccacaaaaaattgctcctaactccaccgcctatcccaaacctacaagaactaatgataatcccaccaccctttgctgactctttttggactcagcccacctgcacccaggtgattaaaaagctttattgttcacacaaagcctgtttggtagtctcttcacagggaagcatgtgacacccacaatcccacctagcccaggagagagctacggcagggtgtgtgttttgacactgagcttggggctttttccatcttctccccacagcctctggctccacacctccaccgttcaagcgccagaaagagctgtctatgcagcctgctcttgggcctggggatgagacacacaattcattggctcctggattttaagtagacatttgtaaatctatagctaactactgtccttaaagccattgtttccattacaaaatccaactctctgagagaaaagggtgttttaaatttaaaaaaataaaaacaaaaaagtttgattg

SEQ ID NO: 279039 - DNA, 1867 bp, Artificial Sequence
  derived and/or modified sequence
tgtaaatgctcttctgactaatgcaaaccatgtgtccatagaaccagaagatttttccaggggaaaagagcccccacgccccgcccagctataaggggccatgcaccaagcagggtacccaggctgcagaggtgccatggctgagtcacacctgctgcagtggctgctgctgctgctgcccacgctctgtggcccaggcactgctgcctggaccacctcatccttggcctgtgcccagggccctgagttctggtgccaaagcctggagcaagcattgcagtgcagagccctagggcattgcctacaggaagtctggggacatgtgggagccgatgacctatgccaagagtgtgaggacatcgtccacatccttaacaagatggccaaggaggccattttccaggacacgatgaggaagttcctggagcaggagtgcaacgtcctccccttgaagctgctcatgccccagtgcaaccaagtgcttgacgactacttccccctggtcatcgactacttccagaaccagactgactcaaacggcatctgtatgcacctgggcctgtgcaaatcccggcagccagagccagagcaggagccagggatgtcagaccccctgcccaaacctctgcgggaccctctgccagaccctctgctggacaagctcgtcctccctgtgctgcccggggccctccaggcgaggcctgggcctcacacacaggatctctccgagcagcaattccccattcctctcccctattgctggctctgcagggctctgatcaagcggatccaagccatgattcccaagggtgcgctagctgtggcagtggcccaggtgtgccgcgtggtacctctggtggcgggcggcatctgccagtgcctggctgagcgctactccgtcatcctgctcgacacgctgctgggccgcatgctgccccagctggtctgccgcctcgtcctccggtgctccatggatgacagcgctggcccaaggtcgccgacaggagaatggctgccgcgagactctgagtgccacctctgcatgtccgtgaccacccaggccgggaacagcagcgagcaggccataccacaggcaatgctccaggcctgtgttggctcctggctggacagggaaaagtgcaagcaatttgtggagcagcacacgccccagctgctgaccctggtgcccaggggctgggatgcccacaccacctgccaggccctcggggtgtgtgggaccatgtccagccctctccagtgtatccacagccccgacctttgatgagaactcagctgtccagaaaaagacaccgtcctttaaagtgctgcagtatggccagacgtggtggctcacacctgcaatcccagcaccttaggaggccgaggcaggaggatccttgaggtcaggagttcgagaccagcctcgccaacatggtgaaaccccatttctactaaaaatacaaaaaattagccaagtgtggtggcatatgcctgtaatcccaactactcagaaggccgaggcaggagaattacttgaacgcaggagaatcactgcagcccaggaggcagaggttgcagtgagccgagattgcaccactgcactccagcctgggtgacagagcaagactccatctcagtaaataaataaataaataaaaagcgctgcagtagctgtggcctcaccctgaagtcagcgggcccaggcctacctcactctctcccttggcagagaagcagacgtccatagctcctctccctcacaagcgctcccagcctgccctccagctgctgctctcccctcccagtctctactcactgggatgaggttaggtcatgaggacaccaaaaacctaaaaataaacaaaaa

SEQ ID NO: 279040 - DNA, 1302 bp, Artificial Sequence
  derived and/or modified sequence
acccaggctgcagaggtgccatggctgagtcacacctgctgcagtggctgctgctgctgctgcccacgctctgtggcccaggcactgctgcctggaccacctcatccttggcctgtgcccagggccctgagttctggtgccaaagcctggagcaagcattgcagtgcagagccctagggcattgcctacaggacacgatgaggaagttcctggagcaggagtgcaacgtcctccccttgaagctgctcatgccccagtgcaaccaagtgcttgacgactacttccccctggtcatcgactacttccagaaccagactgactcaaacggcatctgtatgcacctgggcctgtgcaaatcccggcagccagagccagagcaggagccagggatgtcagaccccctgcccaaacctctgcgggaccctctgccagaccctctgctggacaagctcgtcctccctgtgctgcccggggccctccaggcgaggcctgggcctcacacacaggatctctccgagcagcaattccccattcctctcccctattgctggctctgcagggctctgatcaagcggatccaagccatgattcccaagggtgcgctagctgtggcagtggcccaggtgtgccgcgtggtacctctggtggcgggcggcatctgccagtgcctggctgagcgctactccgtcatcctgctcgacacgctgctgggccgcatgctgccccagctggtctgccgcctcgtcctccggtgctccatggatgacagcgctggcccaaggtcgccgacaggagaatggctgccgcgagactctgagtgccacctctgcatgtccgtgaccacccaggccgggaacagcagcgagcaggccataccacaggcaatgctccaggcctgtgttggctcctggctggacagggaaaagtgcaagcaatttgtggagcagcacacgccccagctgctgaccctggtgcccaggggctgggatgcccacaccacctgccaggccctcggggtgtgtgggaccatgtccagccctctccagtgtatccacagccccgacctttgatgagaactcagctgtccagaaaaagacaccgtcctttaaagtgctgcagtatggccagacgtggtggctcacacctgcaatcccagcaccttaggaggccgaggcaggaggatccttgaggtcaggagttcgagaccagcctcgccaacatggtgaaaccccatttctactaaaaatacaaaaaattagccaagtgtggtggcatatgcctgtaatcccaactactcagaag

SEQ ID NO: 279041 - DNA, 3540 bp, Artificial Sequence
  derived and/or modified sequence
ggtgccatggctgagtcacacctgctgcagtggctgctgctgctgctgcccacgctctgtggcccaggcactgctgcctggaccacctcatccttggcctgtgcccagggccctgagttctggtgccaaagcctggagcaagcattgcagtgcagagccctagggcattgcctacaggaagtctggggacatgtgggagccgatgacctatgccaagagtgtgaggacatcgtccacatccttaacaagatggccaaggaggccattttccaggacacgatgaggaagttcctggagcaggagtgcaacgtcctccccttgaagctgctcatgccccagtgcaaccaagtgcttgacgactacttccccctggtcatcgactacttccagaaccagactgactcaaacggcatctgtatgcacctgggcctgtgcaaatcccggcagccagagccagagcaggagccagggatgtcagaccccctgcccaaacctctgcgggaccctctgccagaccctctgctggacaagctcgtcctccctgtgctgcccggggccctccaggcgaggcctgggcctcacacacaggatctctccgagcagcaattccccattcctctcccctattgctggctctgcagggctctgatcaagcggatccaagccatgattcccaagggtgcgctagctgtggcagtggcccaggtgtgccgcgtggtacctctggtggcgggcggcatctgccagtgcctggctgagcgctactccgtcatcctgctcgacacgctgctgggccgcatgctgccccagctggtctgccgcctcgtcctccggtgctccatggatgacagcgctggcccaaggtcgccgacaggagaatggctgccgcgagactctgagtgccacctctgcatgtccgtgaccacccaggccgggaacagcagcgagcaggccataccacaggcaatgctccaggcctgtgttggctcctggctggacagggaaaagtgcaagcaatttgtggagcagcacacgccccagctgctgaccctggtgcccaggggctgggatgcccacaccacctgccaggccctcggggtgtgtgggaccatgtccagccctctccagtgtatccacagccccgacctttgatgagaactcagctgtccagctgcaaaggaaaagccaagtgagacgggctctgggaccatggtgaccaggctcttcccctgctccctggccctcgccagctgccaggctgaaaagaagcctcagctcccacaccgccctcctcaccgcccttcctcggcagtcacttccactggtggaccacgggcccccagccctgtgtcggccttgtctgtctcagctcaaccacagtctgacaccagagcccacttccatcctctctggtgtgaggcacagcgagggcagcatctggaggagctctgcagcctccacacctaccacgacctcccagggctgggctcaggaaaaaccagccactgctttacaggacagggggttgaagctgagccccgcctcacacccacccccatgcactcaaagattggattttacagctacttgcaattcaaaattcagaagaataaaaaatgggaacatacagaactctaaaagatagacatcagaaattgttaagttaagctttttcaaaaaatcagcaattccccagcgtagtcaagggtggacactgcacgctctggcatgatgggatggcgaccgggcaagctttcttcctcgagatgctctgctgcttgagagctattgctttgttaagatataaaaaggggtttctttttgtctttctgtaaggtggacttccagcttttgattgaaagtcctagggtgattctatttctgctgtgatttatctgctgaaagctcagctggggttgtgcaagctagggacccattcctgtgtaatacaatgtctgcaccaatgctaataaagtcctattctcttttatgagaaagaaaaagacaccgtcctttaaagtgctgcagtatggccagacgtggtggctcacacctgcaatcccagcaccttaggaggccgaggcaggaggatccttgaggtcaggagttcgagaccagcctcgccaacatggtgaaaccccatttctactaaaaatacaaaaaattagccaagtgtggtggcatatgcctgtaatcccaactactcagaaggccgaggcaggagaattacttgaacgcaggagaatcactgcagcccaggaggcagaggttgcagtgagccgagattgcaccactgcactccagcctgggtgacagagcaagactccatctcagtaaataaataaataaataaaaagcgctgcagtagctgtggcctcaccctgaagtcagcgggcccaggcctacctcactctctcccttggcagagaagcagacgtccatagctcctctccctcacaagcgctcccagcctgccctccagctgctgctctcccctcccagtctctactcactgggatgaggttaggtcatgaggacaccaaaaacctaaaaataaacaaaaagccaaacaagccttagcttttcttaaagactgaaatgcctggaagtgtccctttatttataaaataacttttgtcatatttcttatacatgtttcttgtaagaaattcagaaactacagacaaagagagtggaaattacccactgtcaggcctctgagcccaagctaagccatcatatcccctgtgccctgcacgtatacacccagatggcctgaagcaactgaagatccacaaaagaagtgaaaatagccagttcctgccttaactgatgacattccaccattgtgatttgttcctgccccaccctaactgatcaattgaccttgtgacaatacaccttccccacccttgagaaggtgctttgtaatattctccccacccaccccacgcccgcacccccgcacccttaagaaggtattttgtaatattctctccgccattgagaatgtgctttgtaagatccaccccctgcccacaaaaaattgctcctaactccaccgcctatcccaaacctacaagaactaatgataatcccaccaccctttgctgactctttttggactcagcccacctgcacccaggtgattaaaaagctttattgttcacacaaagcctgtttggtagtctcttcacagggaagcatgtgacacccacaatcccacctagcccaggagagagctacggcagggtgtgtgttttgacactgagcttggggctttttccatcttctccccacagcctctggctccacacctccaccgttcaagcgccagaaagagctgtctatgcagcctgctcttgggcctggggatgagacacacaattcattggctcctggattttaagtagacatttgtaaatctatagctaactactgtccttaaagccattgtttccattacaaaatccaactctctgagagaaaagggtgttttaaatttaaaaaaataaaaacaaaaaagtttgattgagacaa

SEQ ID NO: 279042 - DNA, 1146 bp, Artificial Sequence
  derived and/or modified sequence
atggccgagagccacctgctgcagtggctgctgctgctgctgcccaccctgtgcggccccggcaccgccgcctggaccaccagcagcctggcctgcgcccagggccccgagttctggtgccagagcctggagcaggccctgcagtgcagagccctgggccactgcctgcaggaggtgtggggccacgtgggcgccgacgacctgtgccaggagtgcgaggacatcgtgcacatcctgaacaagatggccaaggaggccatcttccaggacaccatgagaaagttcctggagcaggagtgcaacgtgctgcccctgaagctgctgatgccccagtgcaaccaggtgctggacgactacttccccctggtgatcgactacttccagaaccagaccgacagcaacggcatctgcatgcacctgggcctgtgcaagagcagacagcccgagcccgagcaggagcccggcatgagcgaccccctgcccaagcccctgagagaccccctgcccgaccccctgctggacaagctggtgctgcccgtgctgcccggcgccctgcaggccagacccggcccccacacccaggacctgagcgagcagcagttccccatccccctgccctactgctggctgtgcagagccctgatcaagagaatccaggccatgatccccaagggcgccctggccgtggccgtggcccaggtgtgcagagtggtgcccctggtggccggcggcatctgccagtgcctggccgagagatacagcgtgatcctgctggacaccctgctgggcagaatgctgccccagctggtgtgcagactggtgctgagatgcagcatggacgacagcgccggccccagaagccccaccggcgagtggctgcccagagacagcgagtgccacctgtgcatgagcgtgaccacccaggccggcaacagcagcgagcaggccatcccccaggccatgctgcaggcctgcgtgggcagctggctggacagagagaagtgcaagcagttcgtggagcagcacaccccccagctgctgaccctggtgcccagaggctgggacgcccacaccacctgccaggccctgggcgtgtgcggcaccatgagcagccccctgcagtgcatccacagccccgacctgtag

SEQ ID NO: 279043 - DNA, 1146 bp, Artificial Sequence
  derived and/or modified sequence
atggctgaatctcacctgctgcagtggctgctgcttctcctacccactctctgcggacctggtactgccgcctggaccacttcgtcactggcttgcgcgcaaggtcctgaattttggtgtcagtccttggagcaagccttgcagtgtcgggccctcgggcactgtctccaggaggtgtggggtcacgtgggagcagacgatctctgccaggaatgcgaggacattgtgcatatactcaataagatggcgaaggaagccatctttcaggatacgatgagaaaattcttggaacaggagtgcaacgtgctgccattaaagctgcttatgcctcagtgtaaccaggtgctagatgattatttcccactggtgattgattattttcagaatcagacagatagcaatgggatttgcatgcatctgggcctgtgtaagtcccggcagcccgagcccgaacaagagcccggtatgtccgatcctttgccgaagccactccgagatccactgccggaccccttgctcgataagttggtgttgcccgttttgccgggagccctgcaagccagacccggtccccatactcaggatctaagcgagcagcagttcccgatcccgctgccctattgctggttgtgccgggccctgatcaaaaggatacaggcaatgatccccaaaggggcactggccgtggcagttgcccaagtttgccgcgtggtgcccctcgtggccggcggcatctgtcagtgtcttgcagagaggtatagcgtgatattgctggacactttattgggtagaatgctgccacagctcgtatgcaggctcgttctgagatgcagcatggatgattcagccggcccccgaagccccaccggtgaatggctgccccgggattccgagtgccacctgtgtatgtcagtcaccacccaggcaggaaactctagcgaacaagccatccctcaggccatgctgcaggcatgtgtaggctcatggttggaccgcgaaaagtgcaagcagttcgtggagcagcacacaccccaattgctgaccctggtgccgagggggtgggacgctcacacgacatgccaggcgttgggcgtgtgtggtaccatgagctctcccctgcaatgcattcattcacctgatctgtag

SEQ ID NO: 279044 - DNA, 1146 bp, Artificial Sequence
  derived and/or modified sequence
atggccgagagccacctgctgcagtggctgctgctgctgctgcccaccctgtgtggccctggaacagctgcctggaccaccagcagcctggcctgtgcccagggccctgagttctggtgccagagcctggagcaggccctgcagtgccgggccctgggccactgcctgcaggaggtgtggggccacgtgggcgcagatgacctgtgccaggagtgtgaagatattgtgcacatcctgaacaagatggccaaggaggccatcttccaggacaccatgaggaagttcctggagcaggagtgcaatgtgctgcccctgaagctgctgatgccccagtgcaaccaggtgctggatgactacttccccctggtgattgactacttccagaaccagacagacagcaatggcatctgcatgcacctgggcctgtgcaagagccggcagcctgagcctgagcaggagcccggcatgtctgaccccctgcccaagcccctgcgggaccccctgcctgaccccctgctggacaagctggtgctgcctgtgctgcccggggccctgcaggcccggcccggcccccacacccaggacctgtctgagcagcagttccccatccccctgccctactgctggctgtgccgggccctgatcaagaggatccaggccatgatccccaagggggccctggccgtggccgtggcccaggtgtgccgggtggtgcccctggtggccggcggcatctgccagtgcctggccgagcgctacagcgtcatcctgctggacaccctgctgggccgcatgctgccccagctggtgtgccgcctggtgctgcgctgcagcatggatgacagcgctggccccaggagccccactggagagtggctgccccgggacagcgagtgccacctgtgcatgtctgtgaccacccaggccggcaacagcagcgagcaggccatcccccaggccatgctgcaggcctgtgtgggctcctggctggaccgggagaagtgcaagcagtttgtggagcagcacaccccccagctgctgaccctggtgccccggggctgggatgcccacaccacctgccaggccctgggcgtgtgtggcaccatgagcagccccctgcagtgcatccacagcccagacctgtag

SEQ ID NO: 279045 - DNA, 1146 bp, Artificial Sequence
  derived and/or modified sequence
atggccgagagccacctgctgcagtggctgctgctgctgctgcccacactctgcggcccaggaacggccgcttggactacgtctagtttggcttgtgcccaagggccggagttctggtgccagtccttggaacaggctctccagtgtcgggccctgggccattgcctgcaggaagtctgggggcacgttggcgcagacgacctgtgtcaggagtgtgaggatatcgtccacattcttaataagatggcgaaggaggccatctttcaagacaccatgcgtaagtttcttgagcaggagtgtaatgtgctgccgctgaaactgctgatgcctcagtgcaatcaggttctggacgattattttccactcgtcattgactactttcagaaccagaccgattccaacggcatatgcatgcatcttggcctctgcaaatccagacaacctgaacccgagcaggaaccagggatgagcgaccccttacctaagcctctgagggaccccctgccagaccctctgctggacaaactggttctgccagtattgcctggcgccctgcaggccagaccaggaccacacacccaggatctctccgagcagcagtttcctattccgctcccatattgctggctgtgtagagctctcatcaaaaggatccaggcaatgataccgaagggcgcattagccgtcgccgtagcacaggtctgcagggtcgtccccctggtcgccggagggatatgccagtgcctcgctgaaagatattcagtaatcctgttggacacccttttaggacggatgctcccacagttagtctgtcggctggtcttacgttgctctatggatgactctgccggaccacgttcaccgactggtgaatggttgccgcgcgactccgagtgtcacctgtgcatgtctgtgactactcaagccggaaactctagtgagcaggccattcctcaggccatgctccaggcttgcgtgggttcgtggctcgatagggaaaagtgcaagcagttcgtcgagcagcatactccacagttactgacactggtgcccagagggtgggacgcccacactacctgtcaggcacttggtgtctgtggtacgatgtctagccctctgcagtgcatccattccccggacctttag

SEQ ID NO: 279046 - DNA, 1146 bp, Artificial Sequence
  derived and/or modified sequence
atggccgagtcacatcttttacaatggctgcttctgctgctgccaaccctgtgcggccctggaactgctgcctggactacatcttctctcgcatgtgctcaggggcctgagttttggtgccagtcactggaacaggcccttcagtgcagagcactgggccattgcttacaggaagtctggggccacgtcggcgcagacgacctgtgccaggagtgtgaagacattgtgcacatcctgaataagatggccaaggaagctatctttcaggacaccatgagaaagtttctcgaacaggagtgtaacgtgttgcccctcaagctgctgatgccgcagtgcaaccaggtgctggatgactactttccgcttgttatcgactactttcagaaccagactgacagtaatgggatctgtatgcacttaggattgtgcaagagccgacagcctgaaccggagcaggaaccgggaatgagcgaccctttgccaaagccactaagggaccctctgcctgatccgctgctggataaattggttctgcctgtgttgcccggtgccctacaggcaagacccggaccccacactcaagatctctctgaacagcaatttcccatccccctcccttattgttggctttgcagggctctcatcaagcggattcaggccatgatccctaaaggcgcactggcagtcgcggtggcacaagtttgtagggtggtgccactcgtggccggtggcatctgccagtgcctggctgaacgctactcggtgatcttactggacaccctgctgggtagaatgctcccccagttggtttgcagacttgtactacgctgttctatggatgacagtgccggaccaagatcaccaaccggggagtggctgccacgggatagcgaatgtcatctgtgcatgtctgtaaccacccaagcgggaaacagctccgagcaggcaatcccccaagcgatgttacaggcctgcgtgggctcttggttagatcgtgaaaagtgtaagcagtttgttgagcaacacacgccccagttgctcaccctagtccccaggggctgggatgcacacaccacatgccaggcgctcggcgtctgcggcactatgtcctcacccttacagtgtattcattccccagacctgtag

SEQ ID NO: 279047 - protein, 403 aa, Artificial Sequence
  derived and/or modified sequence
MPIITPAYPQQNSTYNVSTSTRTVMVEEFKQGLAVTDEILQGKSDWSKLLEPPNFFQKYRHYIVLTASASTEENHLEWVGLVESKIRVLVGNLERNEFITLAHVNPQSFPGNKEHHKDNNYVSMWFLGIIFRRVENAESVNIDLTYDIQSFTDTVYRQANNINMLKEGMKIEATHVKKKQLHHYLPAEILQKKKKQSLSDVNRSSGGLQSKRLSLDSSCLDSSRDTDNGTPFNSPASKSDSPSVGETERNSAEPAAVIVEKPLSVPPAQGLSIPVIGAKVDSTVKTVSPPTVCTIPTVVGRNVIPRITTPHNPAQGQPHLNGMSNITKTVTPKRSHSPSIDGTPKRLKDVEKDAIGGESMPIPTIDTSRKKRLPSKELPDSSSPVPANNIRVIKNSIRLTLNR

SEQ ID NO: 279048 - protein, 382 aa, Artificial Sequence
  derived and/or modified sequence
RTVMVEEFKQGLAVTDEILQGKSDWSKLLEPPNFFQKYRHYIVLTASASTEENHLEWVGLVESKIRVLVGNLERNEFITLAHVNPQSFPGNKEHHKDNNYVSMWFLGIIFRRVENAESVNIDLTYDIQSFTDTVYRQANNINMLKEGMKIEATHVKKKQLHHYLPAEILQKKKKQSLSDVNRSSGGLQSKRLSLDSSCLDSSRDTDNGTPFNSPASKSDSPSVGETERNSAEPAAVIVEKPLSVPPAQGLSIPVIGAKVDSTVKTVSPPTVCTIPTVVGRNVIPRITTPHNPAQGQPHLNGMSNITKTVTPKRSHSPSIDGTPKRLKDVEKDAIGGESMPIPTIDTSRKKRLPSKELPDSSSPVPANNIRVIKNSIRLTLNR

SEQ ID NO: 279049 - DNA, 1212 bp, Artificial Sequence
  derived and/or modified sequence
atgcccataattactcccgcataccctcagcagaactctacttacaatgtttccacatcaacccgaaccgttatggtcgaagagtttaaacagggcctggccgtgaccgacgaaatcctccagggaaaatctgattggtcaaaactccttgagcctccaaacttcttccagaagtaccgccactacatcgttctcactgcctccgccagcacagaagaaaatcatctggagtgggttggcctggtagagagcaaaattcgggtgttggtggggaacctcgaaaggaatgagtttatcacactcgcacacgttaatcctcagtcgtttcccgggaataaggaacaccataaagacaataactatgttagcatgtggttccttggtattattttccggcgcgtggagaacgctgagagtgtgaacatagaccttacctacgatattcagtccttcacagatactgtgtatcgacaggcgaataacattaacatgctgaaggaggggatgaaaatagaagccacacatgtgaaaaaaaaacagttgcaccactacttgccagccgagattctacaaaagaagaagaagcagtccctttccgacgtcaatcgatcttctgggggcctgcaaagcaaacgactcagcctggactcgagctgcctggattcctcacgtgatactgacaatggcacgccgtttaattctccggcatcgaaaagcgattcgcctagtgtgggagagaccgaacggaactccgccgaaccggctgccgttattgtggagaaacccctctcagtgcctccagctcagggtttatcgattcccgtgattggggccaaagtggattctacagtgaagaccgtgagcccgcccacagtctgtaccattccgacagtggtgggtaggaacgtaataccccggatcactaccccccacaatcctgcccagggtcagccacacctgaacggaatgtccaacattaccaagacagtcacaccgaagcgcagtcacagtcccagtattgatgggacccctaaaagattgaaggatgtcgagaaagacgccatagggggcgaaagcatgcctatacctacaatcgatactagccgcaaaaaacgacttcctagcaaggagctcccagattcttctagtcccgtccccgcaaataatatcagggtgattaaaaactctatcagactgactctgaatagatag

SEQ ID NO: 279050 - DNA, 1149 bp, Artificial Sequence
  derived and/or modified sequence
aggaccgtaatggtggaagagttcaaacaaggattagcggttactgatgagatcttgcaaggaaaaagcgattggagtaagctactggagccaccgaacttcttccagaagtaccgccattacatcgtccttactgcttcggcctctaccgaggagaaccatctagaatgggtgggtctcgtggagagtaaaattcgagtactcgttggcaacctcgaacgaaatgagtttattactttggcccatgtcaaccctcagagtttccctggcaacaaggaacatcacaaggataataactacgtgtctatgtggtttcttggaatcatttttcggagagtcgagaacgccgagagcgtcaatattgatctaacatacgatatccagtcattcaccgatactgtatatcggcaggccaacaacattaacatgctcaaggagggcatgaagatcgaggcgactcacgtgaaaaagaaacagctccaccattaccttcctgctgaaattcttcagaaaaaaaagaagcagtccctgtcagacgttaacaggagttcaggaggcctgcaaagcaagagactgagcctggacagctcttgtctggattcaagtagagacacggataacgggacccctttcaattcccccgcatcgaaaagcgacagtccaagcgtgggcgagactgagaggaactcagcggagccggccgccgtgatcgtggagaagcccctgtctgtgccccctgcgcagggcctgtcaatacccgtgatcggcgccaaagtggattctactgtgaaaacggtgagtcccccaacagtttgtactataccaaccgtagttggtcgcaatgtcatcccaagaattacaacaccccacaaccctgcacaggggcagcctcacctgaatgggatgagtaatataaccaaaacagtcacaccaaagagatcccattcaccatcaattgatggaaccccaaagcggctgaaggacgtggagaaggatgccattggcggagaatcgatgccgattcctaccatcgacacgtccagaaagaaacggctcccaagtaaagaattgccagatagttcttctcctgtgcctgctaacaatattcgagtgatcaagaactcaataagactgaccctcaataggtag

SEQ ID NO: 279051 - DNA, 4177 bp, Artificial Sequence
  derived and/or modified sequence
aggctgggaagcggcgccatattggcgtcggccgcgctgtattgtcataaatagagccggttttgtggtgttttcactactcggttggatgcctcagccatagtaagtgggaaagtgagcgagcaagcgagctactagcgaccggaggaaagtgaacagggggagaagggaacagcaagaacaggactccagagcgataaacactcgctggagagggagacgcaggaagcgatgaaagagatgtctgcaaacaccgtgctggacagccagcgtcaacaaaagcattatggaattacctccccaattagtttggcatctcctaaagaaattgatcatatttacacacagaaattaattgacgccatgaaaccatttggagtgtttgaagatgaggaagaattgaaccacaggctggtggttcttggtaaattgaacaatttagtaaaagaatggatttctgatgtcagcgagagtaagaacctcccaccttctgttgtggctactgttggtggtaaaattttcacatttggatcctataggcttggagtacacaccaaaggagctgacattgatgcactttgtgtagctccaagacatgtggaaagatctgatttttttcagtctttttttgaaaaattgaaacatcaagatggcattagaaacttaagagctgtagaagatgcctttgtacctgttataaaatttgaatttgatggtattgaaattgatctagtctttgcaagactggcaatacaaaccatatcagataatttagatctaagagacgactctcgcctgagaagccttgatataaggtgtattcgcagcttaaatggttgtagagttactgatgaaattttgcatttagtgccaaataaagaaacttttagactcaccctaagagctgtcaaattatgggcaaaacgacgtggtatttattccaacatgctaggattccttggtggtgtctcctgggcaatgctagttgcaagaacttgccaattgtatccaaatgcagcagcatctactttagttcataagttctttttagttttttccaagtgggaatggccaaatcctgtgctgctgaagcaaccagaagaaagcaatttgaatttgcctgtctgggatcctcgggtaaatccatcagataggtatcatctcatgcccataatcacccctgcctacccacaacagaattctacgtataatgtgtccacatcaactcgaacagtaatggtagaagaatttaaacaaggtcttgcagtcacagatgaaattcttcaaggaaagtcagattggtccaaactacttgagccaccgaatttctttcaaaagtatagacattatatagtattgactgccagcgcatcaacagaagaaaaccatctagagtgggttggattagtagaatctaaaatccgtgtacttgttggaaacttggaacggaatgaatttattactcttgcccatgtgaatccccagtcattcccagggaataaggaacatcataaagacaacaattacgtatcaatgtggttccttgggataatttttcggagagtagaaaatgcagaaagtgtcaacatagacttgacatatgatatacagtcatttactgatacagtgtacagacaggcaaacaatataaatatgctaaaggagggaatgaaaattgaagcaactcatgtaaagaaaaaacaacttcaccactaccttcctgcagaaattcttcaaaagaagaaaaagcaaagtctctctgatgtcaatcgaagctcgggcggacttcaatccaaaagattgtctctggatagcagttgtctggatagctccagagacactgataatggaacaccttttaattctccagcgtccaagtctgatagcccttctgtaggagaaacagaaaggaatagtgctgagcctgctgctgtaattgtggagaagccactgagtgtaccaccagcccaaggactttccattccagtgattggcgcaaaagttgactctacagtaaaaactgtatcaccccccactgtgtgtaccattcctaccgtagtaggacgaaatgtcattcctagaatcacaacacctcacaaccctgcccagggacaaccgcatctgaatggaatgtcaaatataactaagactgttacacctaagagatcccattccccatccatagatgggactcctaagaggttgaaagacgtagaaaaggatgccattggaggagaatctatgcctattccaactattgatacatcacgcaaaaagagactacccagtaaagaactaccagattcatcatctccagttccagcaaacaacatccgtgtcatcaaaaattccattcgactgacccttaatcggtaaaagcagtgcctcctcacttaagtgaacaagcaatcatttagtggcatagatgcagccacttgttttttaaatagaagtggctgtcatacgtgaaataaggtgaaagtgacagccttcagtctaataaccttgaagtggtttttgaactgtcaaactttgacctgtagatgctgtagcattctctcactgattgctacatacacttctctgaggatcacctgctgtcaaattgccatctacagtattacagctttgcatttgggggttttactgccttaactttcaatgcttgttatgggaaccagttcttagccacttggacactgataacaagtcctgaactccttttttgttttgttttttgtgtttttctttttttgtcttatgttgtaatcattgtatagagctaaaaaaattgaaaacaaacaaaaaaattgtcttgtattttccaaatgttaatacatttactttagcattgaagccactttgaaacctgagataaatgaatgtgaggtatcttttctgctttcctcatttgtgtagatgtactgtctgttctgttgatttaaattatttttttccagattggcacatgaaatatttaaacttttttgtgtgcctttctgtccaaatgttgcatagttaccagggaagattagtccagtgattacataagagttgggcaccataaattctctatattttgcctcccatggaggcctttgaaatgcatctttattaaaaatcaaaatataaccaggatactgaaagtcagtatatgaatggtaaaattgttacatatcctatttcatgccattcttgttagttgactggtattttttactgaggagcaactcattccagcatcaacaataagataacctttaagtatggcacacttgtatttttgaggtgtaaaattaacttggcatgataattcctgatcattatttaccccacaacttcaaatagtttcttcacggactaggcatgcagaaataagcagtggattttattgaaacctaaaggcattttgaatgacattgttaccaaccattaattggctcaggacctttgtaatttttatttaactatatgagttgtctttttttacgctgcttttttcaatgcatttcttaatattttttaagtttcatgaatgcatgctcagtttattaaaatccataaccatgtaattcttgtaatatgttgattcagtgttttgtaaatgaagtcgtatgtattttcagagtatttttgtatgtactgtaagataccatcttttcaaagagaaacgtttaaaacctttattgtctctccttagtctaattttttaaatatggattatgcttgaattactatatttaaaatgaaaatgtatagattacacagccaggaatgctagtatctaccaccttctttagatttcactcagcatttagtaggtccagtaggaaaaacccaaaatggtacattgagtagtgtggggaagacacctcgtgtattataggactcacgggatgccatctagcaagtggagaaatagcagtccattttctcttgcaagccctttaccattgagttgaaattcttgaattgccagagagccgtatcctccaggtcccactcctgttcattgccccttaggtctccaaaatgtaaattctaatgtttaccttgtaccatggaaaacatgaaaagagtcttagaagtaaagaacaacaaggaaaaaaatgtttgttctattattccctttttatatagcagcaaaagataagaataaaatcacataaccaagttg

SEQ ID NO: 279052 - DNA, 6074 bp, Artificial Sequence
  derived and/or modified sequence
cgaacagtaatggtagaagaatttaaacaaggtcttgcagtcacagatgaaattcttcaaggaaagtcagattggtccaaactacttgagccaccgaatttctttcaaaagtatagacattatatagtattgactgccagcgcatcaacagaagaaaaccatctagagtgggttggattagtagaatctaaaatccgtgtacttgttggaaacttggaacggaatgaatttattactcttgcccatgtgaatccccagtcattcccagggaataaggaacatcataaagacaacaattacgtatcaatgtggttccttgggataatttttcggagagtagaaaatgcagaaagtgtcaacatagacttgacatatgatatacagtcatttactgatacagtgtacagacaggcaaacaatataaatatgctaaaggagggaatgaaaattgaagcaactcatgtaaagaaaaaacaacttcaccactaccttcctgcagaaattcttcaaaagaagaaaaagcaaagtctctctgatgtcaatcgaagctcgggcggacttcaatccaaaagattgtctctggatagcagttgtctggatagctccagagacactgataatggaacaccttttaattctccagcgtccaagtctgatagcccttctgtaggagaaacagaaaggaatagtgctgagcctgctgctgtaattgtggagaagccactgagtgtaccaccagcccaaggactttccattccagtgattggcgcaaaagttgactctacagtaaaaactgtatcaccccccactgtgtgtaccattcctaccgtagtaggacgaaatgtcattcctagaatcacaacacctcacaaccctgcccagggacaaccgcatctgaatggaatgtcaaatataactaagactgttacacctaagagatcccattccccatccatagatgggactcctaagaggttgaaagacgtagaaaaggatgccattggaggagaatctatgcctattccaactattgatacatcacgcaaaaagagactacccagtaaagaactaccagattcatcatctccagttccagcaaacaacatccgtgtcatcaaaaattccattcgactgacccttaatcggtaaaagcagtgcctcctcacttaagtgaacaagcaatcatttagtggcatagatgcagccacttgttttttaaatagaagtggctgtcatacgtgaaataaggtgaaagtgacagccttcagtctaataaccttgaagtggtttttgaactgtcaaactttgacctgtagatgctgtagcattctctcactgattgctacatacacttctctgaggatcacctgctgtcaaattgccatctacagtattacagctttgcatttgggggttttactgccttaactttcaatgcttgttatgggaaccagttcttagccacttggacactgataacaagtcctgaactccttttttgttttgttttttgtgtttttctttttttgtcttatgttgtaatcattgtatagagctaaaaaaattgaaaacaaacaaaaaaattgtcttgtattttccaaatgttaatacatttactttagcattgaagccactttgaaacctgagataaatgaatgtgaggtatcttttctgctttcctcatttgtgtagatgtactgtctgttctgttgatttaaattatttttttccagattggcacatgaaatatttaaacttttttgtgtgcctttctgtccaaatgttgcatagttaccagggaagattagtccagtgattacataagagttgggcaccataaattctctatattttgcctcccatggaggcctttgaaatgcatctttattaaaaatcaaaatataaccaggatactgaaagtcagtatatgaatggtaaaattgttacatatcctatttcatgccattcttgttagttgactggtattttttactgaggagcaactcattccagcatcaacaataagataacctttaagtatggcacacttgtatttttgaggtgtaaaattaacttggcatgataattcctgatcattatttaccccacaacttcaaatagtttcttcacggactaggcatgcagaaataagcagtggattttattgaaacctaaaggcattttgaatgacattgttaccaaccattaattggctcaggacctttgtaatttttatttaactatatgagttgtctttttttacgctgcttttttcaatgcatttcttaatattttttaagtttcatgaatgcatgctcagtttattaaaatccataaccatgtaattcttgtaatatgttgattcagtgttttgtaaatgaagtcgtatgtattttcagagtatttttgtatgtactgtaagataccatcttttcaaagagaaacgtttaaaacctttattgtctctccttagtctaattttttaaatatggattatgcttgaattactatatttaaaatgaaaatgtatagattacacagccaggaatgctagtatctaccaccttctttagatttcactcagcatttagtaggtccagtaggaaaaacccaaaatggtacattgagtagtgtggggaagacacctcgtgtattataggactcacgggatgccatctagcaagtggagaaatagcagtccattttctcttgcaagccctttaccattgagttgaaattcttgaattgccagagagccgtatcctccaggtcccactcctgttcattgccccttaggtctccaaaatgtaaattctaatgtttaccttgtaccatggaaaacatgaaaagagtcttagaagtaaagaacaacaaggaaaaaaatgtttgttctattattccctttttatatagcagcaaaagataagaataaaatcacataaccaagttgaagcttccttggcaaagctgttgtcttagctgactctttccctttattcagatgttttgggattgttctacaaatagtctatttgagcaaaaatgaatgattatgaaagaaccgaagaattatcacctgacttcaacttttgaaagctttagtaaggaatttgattaaattttatatactggatgtgtatgcatttctgcatttcatatcttttgcttttaaatcagccttcaaagtatctttaggaattccttctgtatccatgtttaccccattatgtaaatagatctttggagtgactagtggagtttttctttaataaggaagcaacaagtctaaccttgtactataggataggcatttattttagattaaggagcccattcaacatgtcaatgagtcaacattagagtcctcaaagatagcattcttcaacctgtttggtaactgaggagttgataaaatacttttgagatggtggggtttgtcagaaataaaatattttctatcctgaccagtaggtagaactttgagtacatttcgttaacttggtgggaagcttccattgtactagttccaagtaaaaaaggagaaagtatgatctgggattttgtgttatgatgagaggcactaagtacatgtgtttgttttgttttgttttgttttgttttgttttgtttgagacagagttttgctcttgttgcccaggctggagtgcagtagcccaatctcggctcactgcaaccttcacctcccgagttcaagctattctcttgcctcagcctcccaagtagctgggattacaggcacccaccacctcgcccagctaatttttgtatttttagtacagacagcgtttcaccatgttggccaggctggtctcgaacttgtgacctcaggtgatccacctgcctcggcgtcccaaagtgctgggattacaggcgtgaaccaccgcacccggccgtgtttgttttcaagtgtgaaaaaatacctagaagtatattttatgaagtcaaataatctgttcttcagtatatagacacatgttcattttcacaagggcattacattttaatttgctcatttttcagtagctctggagaatatgtatgaaaggaaaacaattacctgctagcttaaaccttagggacttaaccaattcaagatagaggtacatggcttaaaactttgtaaaactgggacaggagaattattatttttttattttttatttttttatgaagacaagagtttcactctgtcacccagtctggagcacagtggcatgatctcacctcactgcaacctctgcctcccgggttcaagtgattctcttgcctcagcctcccaagtagctggaattacaggcctgtgccatgcccagctaattttcgtattttcagtagaaatgggatttcaccatgttggccagggtggtcttgaactcctcacctcaagtgatctggctgcttcggccaccctaagtgctgggattacaggcataagctactgtgcccagccaggagaatgaattttaaaaatctatgttagtgtttaaaatgagtgctttgttttaaagcagcaatttagtagcattattaaaatgcttacttcactatagtagcaattaggtaaagatgggcaatatcaaaatgggctaaacttattttccactatgttccacacctttgaaataggaattcctaacttgagaatcatgaacccttagggaatcctttataattgtgtataagaagttctagtttacatgcatttttcttggggaaagtgcatagtttagatcagcttctcgaagtggcaaaagtatgggagttagggttaggaaccaccaggattgaataatcctggaatattatataattttctacttttgattttgctgtggtatatttctgaaaatgtgctgtggctcctaactagtaaaatgggctggtgagggactctggaattctgaatttctaagtttataacctaaaatgaaactgtaaagtcctcggtatttagaaaaatgcttaatctcagatttacagatggcctcatgataacttagattcgttaacagggtcaaactttagttcaacaaatttcaacccaatattatcacagtacaatagcttagaatgatcattagaaatggtagaaaatagaataaatcattaaagatcccaaaatgttgagttctgtagcatgaaaactctcttgctcctccatgtttgtagttcaggccagaacaaactaaacagaccaataaatataaaagtgatagtttagggaaaaaaaaaaactttgtataaataaaattgtatgtgtgttcaaataactacctattaaatcatccaaagcttagaatttaaattggtcatagtagcaaatagtgcagatgatggaagaaaaccagtctcaataatggttttttttttccaattgcataaggtcacgtcatcccccaaattgtctattttttcttttctttttttttaagatggagtctcgctccgtcacccaggctggaatgcagtggcgcaatcttggctcattgcaacctccacctcccaggtgcaagcgattctcctacctcagcctcccaagtagctgggactacaggcgcccgccaccatgtgggcctggctaatttttgtagagatggggtttcaacatgttggccaggctggtctcaaactcctgacctccagtgatgcacccgcctcggcctcccaaagttctgggattacaggcgtgagccaccgtgcccagcccctattttttctgaaataatttttcggatatacttttatatttgaaattagttgaacataagatgatcatcaagcttgctataagttttaagctattgctacatttgaacaaagacccacgtacttatcttagaaagtacttaggatatctttgagattaatggtgctacatcactctacagtactatgtaaaatgaatggagctgctgttcctttctagctagctgtttgtgtagttcatattaatttaccctgccttttatttggattgtctgatttcttagttgtacacatgaacctcattatttgcctggaataagtaatcaaataaaattgctttgataaat

SEQ ID NO: 279053 - DNA, 1212 bp, Artificial Sequence
  derived and/or modified sequence
atgcccatcatcaccccagcctacccccagcagaacagcacctacaacgtgtccaccagcaccaggacagtgatggtggaggagttcaagcagggcctggccgtgacagatgagatcctgcagggcaagagtgactggagcaagctgctggagccccccaacttcttccagaagtaccgccactacatcgtgctgacagccagcgccagcacagaggagaaccacctggagtgggtgggcctggtggagagcaagatccgggtgctggtgggcaacctggagagaaatgagttcatcaccctggcccacgtgaacccccagagcttccctggcaacaaggagcaccacaaggacaacaactacgtgtccatgtggttcctgggcatcatcttccggcgggtggagaatgctgagagcgtgaacatcgacctgacctatgacatccagagcttcacagacacagtgtaccggcaggccaacaacatcaacatgctgaaggagggcatgaagattgaggccacccacgtgaagaagaagcagctgcaccactacctgcctgctgagatcctgcagaagaagaagaagcagagcctgagtgatgtgaacagaagcagcggcggcctgcagagcaagaggctgagcctggacagcagctgcctggacagcagccgggacacagacaatggcacccccttcaacagccctgccagcaagagtgacagccccagcgtgggggagacagaaagaaattctgctgagcctgctgctgtgattgtggagaagcccctgtctgtgcccccagcccagggcctgagcatccctgtgattggagccaaggtggacagcacagtgaagacagtgtccccacccaccgtgtgcaccatccccaccgtggtgggcagaaatgtcatcccccgcatcaccaccccccacaacccagcccagggccagccccacctgaatggcatgagcaacatcaccaagacagtgacccccaagaggagccacagccccagcattgatggcacccccaagaggctgaaggatgtggagaaggatgccatcggcggggagagcatgcccatccccaccatcgacaccagcaggaagaagaggctgcccagcaaggagctgcctgacagcagcagccctgtgcctgccaacaacatccgggtcatcaagaacagcatccggctgaccctgaacagatag

SEQ ID NO: 279054 - DNA, 1149 bp, Artificial Sequence
  derived and/or modified sequence
aggacagtgatggtggaggagttcaagcagggcctggccgtgacagatgagatcctgcagggcaagagtgactggagcaagctgctggagccccccaacttcttccagaagtaccgccactacatcgtgctgacagccagcgccagcacagaggagaaccacctggagtgggtgggcctggtggagagcaagatccgggtgctggtgggcaacctggagagaaatgagttcatcaccctggcccacgtgaacccccagagcttccctggcaacaaggagcaccacaaggacaacaactacgtgtccatgtggttcctgggcatcatcttcagaagagtggagaatgctgagagcgtgaacatcgacctgacctatgacatccagagcttcacagacacagtgtaccggcaggccaacaacatcaacatgctgaaggagggcatgaagattgaggccacccacgtgaagaagaagcagctgcaccactacctgcctgctgagatcctgcagaagaagaagaagcagagcctgagtgatgtgaacagaagcagcggcggcctgcagagcaagaggctgagcctggacagcagctgcctggacagcagccgggacacagacaatggcacccccttcaacagccctgccagcaagagtgacagccccagcgtgggggagacagagaggaacagcgctgagcctgctgctgtgattgtggagaagcccctgtctgtgcccccagcccagggcctgagcatccctgtgattggagccaaggtggacagcacagtgaagacagtgagcccccccaccgtgtgcaccatccccaccgtggtgggcagaaatgtcatcccccgcatcaccaccccccacaacccagcccagggccagccccacctgaatggcatgagcaacatcaccaagacagtgacccccaagaggagccacagccccagcattgatggcacccccaagaggctgaaggatgtggagaaggatgccatcggcggggagagcatgcccatccccaccatcgacaccagcaggaagaagaggctgcccagcaaggagctgcctgacagcagcagccctgtgcctgccaacaacatccgggtcatcaagaacagcatccggctgaccctgaacagatag

SEQ ID NO: 279055 - DNA, 1212 bp, Artificial Sequence
  derived and/or modified sequence
atgcccatcatcacccccgcctacccccagcagaacagcacctacaacgttagcacgtccactcgtacggtaatggtggaagagttcaagcaggggcttgcggtaactgacgaaatcttgcagggcaagtctgattggtcaaaattgctggagccccctaacttttttcagaaatataggcattatattgttctgacagcttcagcatcaactgaggagaaccacctggaatgggtgggtcttgtggaatctaagatccgagtgctggtgggaaacctcgagcgaaatgagtttattactctagctcatgtgaacccccagtctttcccagggaacaaggaacatcacaaagacaacaattacgtgtccatgtggtttttgggtattatcttcagacgcgtggaaaatgcagaatcagtaaatatcgacctcacctacgacatccagagttttacggatacagtgtatagacaagccaacaacataaacatgctgaaagagggaatgaaaatagaagcaacccatgtcaaaaagaagcagttgcatcactacttaccagccgagatccttcagaagaaaaaaaagcaatcactctcagacgtcaacaggagctccggcggattacagagcaagcgtctctcactggatagtagttgtctggactcaagccgtgacacggacaacggtacgcctttcaactctcccgccagcaagtctgacagcccatccgttggtgaaacggagagaaactcagcagagccagcagccgtgatcgtcgagaagcccctgtccgtgccccccgcccagggcttaagtatacccgtcataggggccaaggtggattccaccgttaaaacagtgtccccaccaaccgtgtgtactattcctaccgtggttggccgcaatgtcataccaaggatcactacgccgcacaaccccgcacaaggccagccccatcttaacggcatgagcaacattacgaaaaccgtgacccctaagcgtagccattcgccttccatcgacgggaccccaaaacggctgaaggatgttgaaaaggatgcaattgggggagagagcatgcctattccaaccatagacactagccgcaagaagcgcctacctagtaaggagcttcccgattccagttcccccgtgccagctaacaacattagagtgatcaaaaatagtattcggcttacactgaatcggtag

SEQ ID NO: 279056 - DNA, 1149 bp, Artificial Sequence
  derived and/or modified sequence
cggaccgtgatggtggaggagttcaagcagggcctggccgtgaccgatgagattctccagggaaagtcagattggtccaaactgcttgaaccaccaaatttcttccagaagtaccgacactatattgtcctcacagctagtgcgtcaacagaggaaaatcacctagagtgggtgggtctagttgagtccaagatcagggtcctggtggggaatctggaacggaacgagttcatcactcttgctcacgtgaatccccagtccttcccaggaaacaaagagcatcataaagacaacaactacgtgagcatgtggttcctcgggattatttttcgtagagtggaaaacgccgaaagtgtgaacatcgaccttacctacgacatccagagcttcaccgatactgtttatcggcaggctaataacatcaatatgttgaaggagggcatgaaaatcgaagccacacatgtgaaaaaaaaacagcttcatcattacctacctgcagagatcctccagaagaagaagaaacagagcttaagtgatgtaaaccgcagttctgggggactccagagtaaaagattgtctctggatagctcttgtctggattccagcagggataccgacaacggcactccgtttaattctccagcctcaaaatctgacagcccaagcgtcggggaaaccgagcgaaatagtgccgaacccgcagccgtgatagtcgaaaaacctctgtccgtaccacccgctcaaggattgagcatccctgttataggagccaaggtcgattccacggtaaagacggtgtctcctccaaccgtttgtactattccgacagtcgtgggtcgcaacgtcattccccggattactacaccacataatccagcgcaaggacagccccaccttaatggcatgagcaacataacaaagacagttacaccaaaaaggagtcactccccttccatagatggcaccccgaagagactcaaggatgtggaaaaagatgccatcgggggcgagtctatgccaatacccacaatcgataccagtagaaagaagcgactgcctagcaaggagctcccggattcatcctcccctgttcctgctaacaatattagagtgataaagaacagtatccgtcttactcttaataggtag

SEQ ID NO: 279057 - DNA, 1212 bp, Artificial Sequence
  derived and/or modified sequence
atgcccatcattacaccggcatatcctcagcagaattccacctacaatgtttcaacctcaaccagaaccgtgatggtggaagaatttaagcaggggttggctgtcacagatgagatccttcaggggaagtccgactggtccaagcttctggagccaccaaatttcttccagaaatataggcactacatagttttaactgcgagcgcctccacagaggagaaccatttggaatgggtgggcctggtcgaatctaaaatcagagtgcttgtcgggaatctggaaaggaatgagttcatcacactggcccacgtgaacccacagtcttttcccggtaacaaagaacatcacaaagataataattatgtttccatgtggttcttgggcattatctttcgcagggtggaaaatgccgaatcagtgaatatcgacctgacctacgacatacagagcttcaccgataccgtctaccgccaagcaaacaatatcaacatgctgaaagaaggcatgaagattgaggctacgcacgtcaaaaagaagcagctgcatcactaccttcccgcagaaattctgcagaagaagaaaaaacagtccctgtccgacgtgaatcggtcctcggggggactccagagtaagcgactgtcactggatagctcatgcctggactctagtagagacacagataacggaactcccttcaactccccagctagtaagtctgactcacctagcgtgggagaaactgaacgtaactctgccgagccagccgctgtcattgttgagaagccactctctgtcccccctgcgcagggactgtcaatccctgtgatcggggcaaaggtcgattccacagtgaaaacggtttctcctcctaccgtgtgcaccataccaacggtggtaggcaggaacgttatcccacggatcacgaccccccacaacccagcccaagggcagcctcaccttaatggaatgagtaacatcaccaaaactgtgacacccaagcggtcgcactctcccagtatcgatgggacacccaagcgcctgaaagacgtcgaaaaggacgctattggcggagagagtatgccaatcccaacaattgacacctccaggaagaaaaggctgccgagcaaggaactgcctgacagtagctctcctgtccctgccaataacatccgggtgatcaagaatagcatacgcctgaccctgaatcgctag

SEQ ID NO: 279058 - DNA, 1149 bp, Artificial Sequence
  derived and/or modified sequence
cggactgtgatggtcgaggaatttaaacagggcctggctgtgaccgacgagattctgcagggtaagagcgattggtctaagctgctcgaacctcctaatttctttcagaaatacaggcattacatcgttttaactgcctccgcctccaccgaagagaatcacctggagtgggtaggactggtggagtccaaaatcagggtacttgttgggaacctggagaggaatgagttcatcaccctagcacatgtgaatccccaaagctttcctggaaataaggagcatcataaagacaacaattatgtctcaatgtggttcctgggcatcatctttaggagagttgaaaacgcggagtccgtgaacatcgatctgacttacgacatccagtcctttacagataccgtctaccggcaggctaacaacatcaacatgctcaaagaaggaatgaagattgaggcgacacacgtcaaaaagaaacagcttcatcattacttgcccgctgagatcctgcaaaagaaaaagaagcagagcttgtctgatgtcaaccggtccagcgggggtttgcagagcaaacgcctgtcactggacagcagctgtctcgatagcagccgggacaccgataatggcaccccctttaatagccctgctagcaaatccgattctccatctgttggtgagacggagcgcaatagcgccgagcctgcagcggtcattgtggagaagcccctatccgtgccccctgctcagggtctgagtatcccagttatcggggcaaaggtggatagcaccgtgaagacagtatctcctcccaccgtttgcactatcccgaccgtcgtgggtcgaaatgttatccctaggataactacaccacataaccccgcacaggggcagccccatcttaatggcatgtctaatatcaccaagaccgtcacaccaaagagaagccactcgccatctatcgacggcactcctaaacggttgaaggacgtcgaaaaagacgccattggcggtgaatccatgcccatcccgaccatcgataccagcaggaagaaacggctgccttccaaggagctccctgactcctcatcccctgtgcccgctaataatatccgggtgattaagaattcgattaggctaacgctgaatcgctag

SEQ ID NO: 279059 - DNA, 1212 bp, Artificial Sequence
  derived and/or modified sequence
atgcccatcatcacccccgcctacccccagcagaacagcacctacaacgtgagcaccagcaccagaaccgtgatggtggaggagttcaagcagggcctggccgtgaccgacgagatcctgcagggcaagagcgactggagcaagctgctggagccccccaacttcttccagaagtacagacactacatcgtgctgaccgccagcgccagcaccgaggagaaccacctggagtgggtgggcctggtggagagcaagatcagagtgctggtgggcaacctggagagaaacgagttcatcaccctggcccacgtgaacccccagagcttccccggcaacaaggagcaccacaaggacaacaactacgtgagcatgtggttcctgggcatcatcttcagaagagtggagaacgccgagagcgtgaacatcgacctgacctacgacatccagagcttcaccgacaccgtgtacagacaggccaacaacatcaacatgctgaaggagggcatgaagatcgaggccacccacgtgaagaagaagcagctgcaccactacctgcccgccgagatcctgcagaagaagaagaagcagagcctgagcgacgtgaacagaagcagcggcggcctgcagagcaagagactgagcctggacagcagctgcctggacagcagcagagacaccgacaacggcacccccttcaacagccccgccagcaagagcgacagccccagcgtgggcgagaccgagagaaacagcgccgagcccgccgccgtgatcgtggagaagcccctgagcgtgccccccgcccagggcctgagcatccccgtgatcggcgccaaggtggacagcaccgtgaagaccgtgagcccccccaccgtgtgcaccatccccaccgtggtgggcagaaacgtgatccccagaatcaccaccccccacaaccccgcccagggccagccccacctgaacggcatgagcaacatcaccaagaccgtgacccccaagagaagccacagccccagcatcgacggcacccccaagagactgaaggacgtggagaaggacgccatcggcggcgagagcatgcccatccccaccatcgacaccagcagaaagaagagactgcccagcaaggagctgcccgacagcagcagccccgtgcccgccaacaacatcagagtgatcaagaacagcatcagactgaccctgaacagatag

SEQ ID NO: 279060 - DNA, 1149 bp, Artificial Sequence
  derived and/or modified sequence
agaaccgtgatggtggaggagttcaagcagggcctggccgtgaccgacgagatcctgcagggcaagagcgactggagcaagctgctggagccccccaacttcttccagaagtacagacactacatcgtgctgaccgccagcgccagcaccgaggagaaccacctggagtgggtgggcctggtggagagcaagatcagagtgctggtgggcaacctggagagaaacgagttcatcaccctggcccacgtgaacccccagagcttccccggcaacaaggagcaccacaaggacaacaactacgtgagcatgtggttcctgggcatcatcttcagaagagtggagaacgccgagagcgtgaacatcgacctgacctacgacatccagagcttcaccgacaccgtgtacagacaggccaacaacatcaacatgctgaaggagggcatgaagatcgaggccacccacgtgaagaagaagcagctgcaccactacctgcccgccgagatcctgcagaagaagaagaagcagagcctgagcgacgtgaacagaagcagcggcggcctgcagagcaagagactgagcctggacagcagctgcctggacagcagcagagacaccgacaacggcacccccttcaacagccccgccagcaagagcgacagccccagcgtgggcgagaccgagagaaacagcgccgagcccgccgccgtgatcgtggagaagcccctgagcgtgccccccgcccagggcctgagcatccccgtgatcggcgccaaggtggacagcaccgtgaagaccgtgagcccccccaccgtgtgcaccatccccaccgtggtgggcagaaacgtgatccccagaatcaccaccccccacaaccccgcccagggccagccccacctgaacggcatgagcaacatcaccaagaccgtgacccccaagagaagccacagccccagcatcgacggcacccccaagagactgaaggacgtggagaaggacgccatcggcggcgagagcatgcccatccccaccatcgacaccagcagaaagaagagactgcccagcaaggagctgcccgacagcagcagccccgtgcccgccaacaacatcagagtgatcaagaacagcatcagactgaccctgaacagatag

SEQ ID NO: 279061 - protein, 937 aa, Artificial Sequence
  derived and/or modified sequence
MYNMRRLSLSPTFSMGFHLLVTVSLLFSHVDHVIAETEMEGEGNETGECTGSYYCKKGVILPIWEPQDPSFGDKIARATVYFVAMVYMFLGVSIIADRFMSSIEVITSQEKEITIKKPNGETTKTTVRIWNETVSNLTLMALGSSAPEILLSVIEVCGHNFTAGDLGPSTIVGSAAFNMFIIIALCVYVVPDGETRKIKHLRVFFVTAAWSIFAYTWLYIILSVISPGVVEVWEGLLTFFFFPICVVFAWVADRRLLFYKYVYKRYRAGKQRGMIIEHEGDRPSSKTEIEMDGKVVNSHVENFLDGALVLEVDERDQDDEEARREMARILKELKQKHPDKEIEQLIELANYQVLSQQQKSRAFYRIQATRLMTGAGNILKRHAADQARKAVSMHEVNTEVTENDPVSKIFFEQGTYQCLENCGTVALTIIRRGGDLTNTVFVDFRTEDGTANAGSDYEFTEGTVVFKPGDTQKEIRVGIIDDDIFEEDENFLVHLSNVKVSSEASEDGILEANHVSTLACLGSPSTATVTIFDDDHAGIFTFEEPVTHVSESIGIMEVKVLRTSGARGNVIVPYKTIEGTARGGGEDFEDTCGELEFQNDEIVKIITIRIFDREEYEKECSFSLVLEEPKWIRRGMKGGFTITDEYDDKQPLTSKEEEERRIAEMGRPILGEHTKLEVIIEESYEFKSTVDKLIKKTNLALVVGTNSWREQFIEAITVSAGEDDDDDECGEEKLPSCFDYVMHFLTVFWKVLFAFVPPTEYWNGWACFIVSILMIGLLTAFIGDLASHFGCTIGLKDSVTAVVFVALGTSVPDTFASKVAATQDQYADASIGNVTGSNAVNVFLGIGVAWSIAAIYHAANGEQFKVSPGTLAFSVTLFTIFAFINVGVLLYRRRPEIGGELGGPRTAKLLTSCLFVLLWLLYIFFSSLEAYCHIKGF

SEQ ID NO: 279062 - protein, 937 aa, Artificial Sequence
  derived and/or modified sequence
MYNMRRLSLSPTFSMGFHLLVTVSLLFSHVDHVIAETEMEGEGNETGECTGSYYCKKGVILPIWEPQDPSFGDKIARATVYFVAMVYMFLGVSIIADRFMSSIEVITSQEKEITIKKPNGETTKTTVRIWNETVSNLTLMALGSSAPEILLSVIEVCGHNFTAGDLGPSTIVGSAAFNMFIIIALCVYVVPDGETRKIKHLRVFFVTAAWSIFAYTWLYIILSVISPGVVEVWEGLLTFFFFPICVVFAWVADRRLLFYKYVYKRYRAGKQRGMIIEHEGDRPSSKTEIEMDGKVVNSHVENFLDGALVLEVDERDQDDEEARREMARILKELKQKHPDKEIEQLIELANYQVLSQQQKSRAFYRIQATRLMTGAGNILKRHAADQARKAVSMHEVNTEVTENDPVSKIFFEQGTYQCLENCGTVALTIIRRGGDLTNTVFVDFRTEDGTANAGSDYEFTEGTVVFKPGDTQKEIRVGIIDDDIFEEDENFLVHLSNVKVSSEASEDGILEANHVSTLACLGSPSTATVTIFDDDHAGIFTFEEPVTHVSESIGIMEVKVLRTSGARGNVIVPYKTIEGTARGGGEDFEDTCGELEFQNDEIVKIITIRIFDREEYEKECSFSLVLEEPKWIRRGMKEGFCFTDEYDDKQPLTSKEEEERRIAEMGRPILGEHTKLEVIIEESYEFKSTVDKLIKKTNLALVVGTNSWREQFIEAITVSAGEDDDDDECGEEKLPSCFDYVMHFLTVFWKVLFAFVPPTEYWNGWACFIVSILMIGLLTAFIGDLASHFGCTIGLKDSVTAVVFVALGTSVPDTFASKVAATQDQYADASIGNVTGSNAVNVFLGIGVAWSIAAIYHAANGEQFKVSPGTLAFSVTLFTIFAFINVGVLLYRRRPEIGGELGGPRTAKLLTSCLFVLLWLLYIFFSSLEAYCHIKGF

SEQ ID NO: 279063 - DNA, 2814 bp, Artificial Sequence
  derived and/or modified sequence
atgtacaacatgagaagactgagcctgagccccaccttcagcatgggcttccacctgctggtgaccgtgagcctgctgttcagccacgtggaccacgtgatcgccgagaccgagatggagggcgagggcaacgagaccggcgagtgcaccggcagctactactgcaagaagggcgtgatcctgcccatctgggagccccaggaccccagcttcggcgacaagatcgccagagccaccgtgtacttcgtggccatggtgtacatgttcctgggcgtgagcatcatcgccgacagattcatgagcagcatcgaggtgatcaccagccaggagaaggagatcaccatcaagaagcccaacggcgagaccaccaagaccaccgtgagaatctggaacgagaccgtgagcaacctgaccctgatggccctgggcagcagcgcccccgagatcctgctgagcgtgatcgaggtgtgcggccacaacttcaccgccggcgacctgggccccagcaccatcgtgggcagcgccgccttcaacatgttcatcatcatcgccctgtgcgtgtacgtggtgcccgacggcgagaccagaaagatcaagcacctgagagtgttcttcgtgaccgccgcctggagcatcttcgcctacacctggctgtacatcatcctgagcgtgatcagccccggcgtggtggaggtgtgggagggcctgctgaccttcttcttcttccccatctgcgtggtgttcgcctgggtggccgacagaagactgctgttctacaagtacgtgtacaagagatacagagccggcaagcagagaggcatgatcatcgagcacgagggcgacagacccagcagcaagaccgagatcgagatggacggcaaggtggtgaacagccacgtggagaacttcctggacggcgccctggtgctggaggtggacgagagagaccaggacgacgaggaggccagaagagagatggccagaatcctgaaggagctgaagcagaagcaccccgacaaggagatcgagcagctgatcgagctggccaactaccaggtgctgagccagcagcagaagagcagagccttctacagaatccaggccaccagactgatgaccggcgccggcaacatcctgaagagacacgccgccgaccaggccagaaaggccgtgagcatgcacgaggtgaacaccgaggtgaccgagaacgaccccgtgagcaagatcttcttcgagcagggcacctaccagtgcctggagaactgcggcaccgtggccctgaccatcatcagaagaggcggcgacctgaccaacaccgtgttcgtggacttcagaaccgaggacggcaccgccaacgccggcagcgactacgagttcaccgagggcaccgtggtgttcaagcccggcgacacccagaaggagatcagagtgggcatcatcgacgacgacatcttcgaggaggacgagaacttcctggtgcacctgagcaacgtgaaggtgagcagcgaggccagcgaggacggcatcctggaggccaaccacgtgagcaccctggcctgcctgggcagccccagcaccgccaccgtgaccatcttcgacgacgaccacgccggcatcttcaccttcgaggagcccgtgacccacgtgagcgagagcatcggcatcatggaggtgaaggtgctgagaaccagcggcgccagaggcaacgtgatcgtgccctacaagaccatcgagggcaccgccagaggcggcggcgaggacttcgaggacacctgcggcgagctggagttccagaacgacgagatcgtgaagatcatcaccatcagaatcttcgacagagaggagtacgagaaggagtgcagcttcagcctggtgctggaggagcccaagtggatcagaagaggcatgaagggcggcttcaccatcaccgacgagtacgacgacaagcagcccctgaccagcaaggaggaggaggagagaagaatcgccgagatgggcagacccatcctgggcgagcacaccaagctggaggtgatcatcgaggagagctacgagttcaagagcaccgtggacaagctgatcaagaagaccaacctggccctggtggtgggcaccaacagctggagagagcagttcatcgaggccatcaccgtgagcgccggcgaggacgacgacgacgacgagtgcggcgaggagaagctgcccagctgcttcgactacgtgatgcacttcctgaccgtgttctggaaggtgctgttcgccttcgtgccccccaccgagtactggaacggctgggcctgcttcatcgtgagcatcctgatgatcggcctgctgaccgccttcatcggcgacctggccagccacttcggctgcaccatcggcctgaaggacagcgtgaccgccgtggtgttcgtggccctgggcaccagcgtgcccgacaccttcgccagcaaggtggccgccacccaggaccagtacgccgacgccagcatcggcaacgtgaccggcagcaacgccgtgaacgtgttcctgggcatcggcgtggcctggagcatcgccgccatctaccacgccgccaacggcgagcagttcaaggtgagccccggcaccctggccttcagcgtgaccctgttcaccatcttcgccttcatcaacgtgggcgtgctgctgtacagaagaagacccgagatcggcggcgagctgggcggccccagaaccgccaagctgctgaccagctgcctgttcgtgctgctgtggctgctgtacatcttcttcagcagcctggaggcctactgccacatcaagggcttctag

SEQ ID NO: 279064 - DNA, 2814 bp, Artificial Sequence
  derived and/or modified sequence
atgtacaacatgagaagactgagcctgagccccaccttcagcatgggcttccacctgctggtgaccgtgagcctgctgttcagccacgtggaccacgtgatcgccgagaccgagatggagggcgagggcaacgagaccggcgagtgcaccggcagctactactgcaagaagggcgtgatcctgcccatctgggagccccaggaccccagcttcggcgacaagatcgccagagccaccgtgtacttcgtggccatggtgtacatgttcctgggcgtgagcatcatcgccgacagattcatgagcagcatcgaggtgatcaccagccaggagaaggagatcaccatcaagaagcccaacggcgagaccaccaagaccaccgtgagaatctggaacgagaccgtgagcaacctgaccctgatggccctgggcagcagcgcccccgagatcctgctgagcgtgatcgaggtgtgcggccacaacttcaccgccggcgacctgggccccagcaccatcgtgggcagcgccgccttcaacatgttcatcatcatcgccctgtgcgtgtacgtggtgcccgacggcgagaccagaaagatcaagcacctgagagtgttcttcgtgaccgccgcctggagcatcttcgcctacacctggctgtacatcatcctgagcgtgatcagccccggcgtggtggaggtgtgggagggcctgctgaccttcttcttcttccccatctgcgtggtgttcgcctgggtggccgacagaagactgctgttctacaagtacgtgtacaagagatacagagccggcaagcagagaggcatgatcatcgagcacgagggcgacagacccagcagcaagaccgagatcgagatggacggcaaggtggtgaacagccacgtggagaacttcctggacggcgccctggtgctggaggtggacgagagagaccaggacgacgaggaggccagaagagagatggccagaatcctgaaggagctgaagcagaagcaccccgacaaggagatcgagcagctgatcgagctggccaactaccaggtgctgagccagcagcagaagagcagagccttctacagaatccaggccaccagactgatgaccggcgccggcaacatcctgaagagacacgccgccgaccaggccagaaaggccgtgagcatgcacgaggtgaacaccgaggtgaccgagaacgaccccgtgagcaagatcttcttcgagcagggcacctaccagtgcctggagaactgcggcaccgtggccctgaccatcatcagaagaggcggcgacctgaccaacaccgtgttcgtggacttcagaaccgaggacggcaccgccaacgccggcagcgactacgagttcaccgagggcaccgtggtgttcaagcccggcgacacccagaaggagatcagagtgggcatcatcgacgacgacatcttcgaggaggacgagaacttcctggtgcacctgagcaacgtgaaggtgagcagcgaggccagcgaggacggcatcctggaggccaaccacgtgagcaccctggcctgcctgggcagccccagcaccgccaccgtgaccatcttcgacgacgaccacgccggcatcttcaccttcgaggagcccgtgacccacgtgagcgagagcatcggcatcatggaggtgaaggtgctgagaaccagcggcgccagaggcaacgtgatcgtgccctacaagaccatcgagggcaccgccagaggcggcggcgaggacttcgaggacacctgcggcgagctggagttccagaacgacgagatcgtgaagatcatcaccatcagaatcttcgacagagaggagtacgagaaggagtgcagcttcagcctggtgctggaggagcccaagtggatcagaagaggcatgaaggagggcttctgcttcaccgacgagtacgacgacaagcagcccctgaccagcaaggaggaggaggagagaagaatcgccgagatgggcagacccatcctgggcgagcacaccaagctggaggtgatcatcgaggagagctacgagttcaagagcaccgtggacaagctgatcaagaagaccaacctggccctggtggtgggcaccaacagctggagagagcagttcatcgaggccatcaccgtgagcgccggcgaggacgacgacgacgacgagtgcggcgaggagaagctgcccagctgcttcgactacgtgatgcacttcctgaccgtgttctggaaggtgctgttcgccttcgtgccccccaccgagtactggaacggctgggcctgcttcatcgtgagcatcctgatgatcggcctgctgaccgccttcatcggcgacctggccagccacttcggctgcaccatcggcctgaaggacagcgtgaccgccgtggtgttcgtggccctgggcaccagcgtgcccgacaccttcgccagcaaggtggccgccacccaggaccagtacgccgacgccagcatcggcaacgtgaccggcagcaacgccgtgaacgtgttcctgggcatcggcgtggcctggagcatcgccgccatctaccacgccgccaacggcgagcagttcaaggtgagccccggcaccctggccttcagcgtgaccctgttcaccatcttcgccttcatcaacgtgggcgtgctgctgtacagaagaagacccgagatcggcggcgagctgggcggccccagaaccgccaagctgctgaccagctgcctgttcgtgctgctgtggctgctgtacatcttcttcagcagcctggaggcctactgccacatcaagggcttctag

SEQ ID NO: 279065 - DNA, 2814 bp, Artificial Sequence
  derived and/or modified sequence
atgtacaatatgaggcgactgtccctctccccaacatttagcatgggttttcatttgttagtcaccgtgtctctgctcttttctcacgtggatcatgtgattgctgagacagaaatggagggagaaggaaatgagaccggtgagtgcaccgggtcctactattgtaagaaaggcgtgattctgcctatatgggagcctcaggacccaagctttggcgataagatcgctcgggccacggtttacttcgtggccatggtgtatatgttcctgggggtcagcatcattgccgacaggttcatgtcgtcaattgaggttatcacaagccaggagaaagagattactatcaagaaaccgaacggagagactacaaagacaaccgtgagaatttggaatgagacagtgtccaacctgacactgatggcgctgggatctagcgcccccgaaatcctgctgtcagtgatagaggtgtgcgggcataacttcactgccggcgacctgggtcccagtaccattgtgggcagcgcagccttcaacatgttcattattattgccctgtgcgtgtacgtggtgccggatggagagacccggaagattaagcacttgcgggtgttctttgtcaccgctgcatggagcatcttcgcttatacctggctatacattatactgtccgtgatctctccaggtgtcgtggaggtttgggaggggcttttaacttttttcttctttcctatttgtgtggtgtttgcttgggtcgccgatcgaagactgcttttctacaaatatgtctacaagcgatatcgggctggaaagcagcggggaatgatcattgaacacgaaggggaccggccatcctcaaaaaccgaaattgagatggacggtaaggtcgtgaacagccatgttgaaaatttccttgacggcgcactcgtactggaggtggatgagcgagaccaggacgacgaggaagccagaagagagatggctaggatactcaaggaactaaagcaaaaacaccctgacaaagagattgaacagctgattgagctggccaactaccaagtcctatctcagcaacagaagagtcgcgctttctaccgaatacaagctacacggttgatgacaggcgcaggaaacatccttaagcgacatgcggctgaccaggcccggaaagccgtgtctatgcatgaggttaacacagaggtgaccgagaatgatccagtcagtaaaattttttttgagcaaggtacctaccagtgcctggaaaattgcggaacggtggcactgaccatcatccgccggggaggggatctgacgaatactgtctttgtagatttccgtaccgaggatgggaccgccaacgctggatccgattatgagttcacagagggtactgtagtatttaaaccaggcgatacacagaaagagattagagtcggtatcattgacgatgatatttttgaggaggacgagaattttttagtgcaccttagcaacgtgaaggtgtcttcagaggcttcggaggacggtattctggaggctaaccacgtgtccacactggcgtgcctgggtagcccctctaccgcaacggttaccattttcgacgatgatcacgctggaatcttcactttcgaggagcccgtgacccacgtcagcgaaagcatcgggatcatggaggtcaaagtgctaagaacttcaggggctaggggaaatgtgatcgtaccatacaaaactattgagggtaccgctcgaggaggaggcgaggactttgaggatacatgtggtgaacttgaatttcaaaatgatgagatagtgaagatcatcaccattcggatatttgacagagaggagtacgagaaggaatgcagtttttcattagtgcttgaagagcctaagtggattcggaggggtatgaagggcggctttacaataactgatgagtatgatgacaagcaaccactcacttccaaagaggaggaagagcggcgcattgccgagatggggcggcctatcctcggtgagcatacaaaattagaggtgattattgaggagagttacgagttcaaaagtaccgtggacaaactgatcaaaaagaccaacctggccctagtggtggggaccaactcatggcgggagcagtttattgaagcaatcacagtgtccgctggcgaagatgatgacgatgatgagtgcggggaagaaaaacttcccagttgctttgattacgtaatgcatttcctgaccgtgttctggaaggttctgtttgcgttcgtccccccaaccgaatattggaacggctgggcctgctttatcgtgagtattttgatgatcggtcttctcacagcattcattggcgatcttgcatcacacttcggctgcactatcggtttgaaagacagcgtgaccgcagtggtgtttgtggcactggggacaagcgtgccagacaccttcgctagtaaagttgccgcgactcaagaccagtatgcagacgcatccattggaaacgtgacaggctctaacgcggtcaatgtattcctaggtattggcgtcgcctggtctatcgccgccatctaccacgccgccaatggtgagcagtttaaagtgagtccgggtaccctggcgttcagcgtcaccctgttcacaatctttgcattcataaacgtaggagtcctgctgtacaggcgacgaccagagatcggaggagaattaggaggccccagaacagcaaagctgctgaccagctgcctctttgtgttgctttggctgctgtacatctttttctcaagtttggaggcatactgtcacatcaaggggttctag

SEQ ID NO: 279066 - DNA, 2814 bp, Artificial Sequence
  derived and/or modified sequence
atgtataacatgcggaggctgtctctcagtccaaccttttctatgggtttccacctccttgttactgtgagtctcttgttttcacatgtagatcatgtgatcgcggagactgagatggagggggaggggaatgagacaggtgagtgcacaggttcctattattgcaaaaaaggcgtcattctccccatttgggaaccccaggatcccagctttggggacaagatcgccagggcaactgtgtacttcgtagctatggtatacatgttcctgggcgtatctattatagccgacagattcatgagctctattgaggttatcactagccaggaaaaagaaattacaattaagaagcctaacggcgaaacaaccaaaactactgtgcggatctggaacgagacagtcagcaacttgacactgatggctcttggcagcagcgcccctgagattctgctatctgtgatcgaggtgtgtggtcataactttactgccggggacctgggccccagtaccattgtcggaagtgcagccttcaatatgttcatcatcatcgcgctgtgtgtttacgtggtgcccgacggggagactcgtaaaattaagcacttacgcgtgttttttgtcacagccgcatggtctatcttcgcgtacacctggttgtatatcatcctgagcgtaatcagccccggagttgtagaggtttgggaagggctcctcacattcttcttcttcccgatctgcgttgtgtttgcatgggttgccgacagacggctgctgttttataagtatgtctataaacgctaccgagccggtaagcaaagaggtatgatcattgagcatgaaggagaccgtcctagtagcaagaccgaaatcgagatggacggcaaggttgtgaacagccacgtcgaaaattttctggatggggcgctcgtgctggaagtagatgaaagagatcaggacgacgaagaggctagacgggaaatggctaggatactcaaggaactgaagcaaaaacacccagataaagagattgaacagttaattgagctcgccaattatcaggtgctgagtcaacagcaaaagtccagggctttctataggatccaggccacccgcttgatgactggtgctggaaacattctgaaacgtcatgccgctgaccaagctcgtaaggccgtctccatgcatgaagtgaacaccgaagtgacggagaatgatccagttagcaagatcttcttcgagcagggcacctatcagtgtctagagaattgtggtaccgtggcactgacaattatccgtcgcggaggagacctcaccaacactgtttttgtggacttcagaacggaggatggaactgccaatgccggaagtgattacgaattcactgaaggcaccgtggtgttcaagcctggcgacacccagaaggagataagggttggtattatcgacgatgatatttttgaggaagatgaaaacttcctcgtgcatctgtcgaatgttaaggtttcctccgaagccagcgaggacggaatccttgaggcgaaccacgtctctactctggcctgcttaggctctcccagcactgccaccgtcaccatatttgacgatgatcacgctggaatctttacatttgaggagcccgttacccacgtgtcagagtccattggaattatggaagtgaaagtcctaagaacctcaggtgctcggggaaacgtgattgtgccctataaaaccattgaggggacggcaagaggcgggggagaggatttcgaggatacctgtggggaattagagtttcaaaatgatgaaatcgtaaaaattatcactataagaatatttgacagggaggagtatgagaaggaatgcagctttagtctcgtgttagaagagcccaaatggattcgaaggggcatgaaggggggctttacaattaccgacgaatatgacgataaacagcccctcacaagcaaggaggaagaggagcgccgtattgcagagatggggaggccaatattaggggagcatacgaaactggaagttattattgaggaaagctacgagtttaaatccaccgtagacaaactgatcaagaaaaccaatctggccctggtggttgggaccaatagctggagggagcagtttatcgaagcaattaccgtttccgccggcgaagatgacgatgatgacgagtgcggcgaggagaaactaccctcttgcttcgactatgttatgcactttttgaccgttttctggaaagtgctgttcgcttttgtgccgcctacagaatactggaacggttgggcctgttttatagtcagcatcctcatgatcgggctgttaactgcctttatcggtgatctggcttctcacttcggctgcactattggtttgaaagactccgttaccgccgtggtgttcgtagccttaggaaccagtgtgccggatacttttgctagtaaggtggcagccactcaagaccagtatgccgacgccagcattggtaatgtgactggcagcaacgctgtaaacgtgttcctaggcattggcgtggcgtggtcaattgcggctatataccatgcagcgaacggcgagcaatttaaggtgtccccgggaaccttagctttctctgtaacactattcactatttttgctttcattaatgtgggggtcctcctttatcggaggcgtcccgaaattgggggagagctgggtggcccccggacagctaagctgctcaccagctgtctgttcgtactgctgtggttgttgtacatctttttctcaagtctcgaggcatactgtcatatcaaaggattttag

SEQ ID NO: 279067 - DNA, 2814 bp, Artificial Sequence
  derived and/or modified sequence
atgtataacatgcggcgcctttcactaagccctactttctccatggggttccacttgctcgtaacagtgagtcttctgttctcccacgtggatcatgttattgctgaaaccgagatggaaggtgagggcaacgagaccggggagtgcacaggatcctattactgtaagaagggggtgatcttgcctatttgggaaccgcaggacccatcattcggcgacaaaatcgctcgtgctaccgtgtatttcgtggcgatggtctacatgttcttaggcgtgtctatcatcgcggatagatttatgagctcgatcgaggtgattacttcacaggaaaaggaaatcacaatcaagaaacctaatggcgagacaacaaagacaacagtgcggatctggaacgaaactgtcagcaacctgacactaatggctcttgggagcagtgctccagaaattctattatccgtcatcgaggtttgtggacacaatttcaccgctggcgatctcggccctagcacaattgtgggcagtgcggccttcaacatgttcatcatcatcgccctgtgcgtttacgtagttccggacggggagacaaggaaaatcaaacatttaagagtcttcttcgtgaccgccgcctggtccatctttgcgtatacatggctgtatatcatcctctcagttatttctcccggcgtggtggaagtttgggagggactcttaaccttcttcttcttccctatctgcgtggtctttgcatgggtggcagaccgaaggttgcttttctataagtacgtatacaagaggtaccgagcaggcaagcagagaggcatgattattgagcacgaaggagatcggcctagtagcaagactgaaatagagatggatggtaaagttgtaaacagtcatgtggagaattttttggacggcgccttggtgttagaggtggatgagagggaccaggatgacgaggaagccagaagagaaatggcacggatccttaaagaactcaagcagaaacaccctgataaagagatcgagcagcttatcgaactcgccaattatcaagtcctgagccagcagcaaaaatccagagccttttacaggatccaagcaacaagactgatgactggtgccgggaatatactgaaacgacatgctgcagaccaggcgcggaaagccgtgagtatgcacgaggtcaacactgaagtgactgaaaacgatccagtgtccaaaatcttctttgaacagggtacttatcagtgtttagagaactgcgggaccgtcgcattgacgataataaggagggggggtgacttaacgaatactgtgtttgtggacttcaggacagaagacgggacagctaatgctgggtcagattatgaatttaccgagggaaccgtggtttttaaacccggcgatacacagaaagaaatccgagtagggattatcgacgacgacatcttcgaggaagacgagaacttcctggtgcacctctctaatgttaaagtaagttcagaggccagcgaggatggcatccttgaagccaaccatgtgagcaccctggcatgcctagggtcaccttccaccgctacagtgacgatctttgatgacgaccatgcaggtatattcacttttgaagaaccggtcacgcacgtcagtgagagtatcggcattatggaggttaaagtactccgcactagtggcgcgcggggaaatgttatagtaccttacaaaacaatagaagggacggcaaggggaggtggtgaagacttcgaagacacctgtggtgaactcgagtttcaaaacgacgagatagttaagatcattaccattcgcattttcgatcgggaagagtacgaaaaggaatgctcctttagtttggtgcttgaggaaccaaaatggattagacgtggtatgaaggggggtttcacaattaccgacgaatacgatgacaaacaaccgctgacaagtaaggaggaggaggagcggaggattgcggagatggggagacccatcttgggcgaacacacaaagttggaggtgatcatcgaagagtcctacgagtttaaatccacagtcgataagctaatcaaaaaaactaatctcgccctcgtggtgggcaccaatagctggagggagcaatttattgaagcgattaccgtatctgcgggcgaagatgacgatgatgatgaatgcggtgaagaaaaactgcctagctgcttcgattacgtcatgcattttctgacagtgttctggaaggtgctgttcgctttcgtgccaccaaccgaatattggaatggatgggcttgctttatcgtttctatcctcatgatcgggctcctcacagccttcattggggatctggcctctcacttcggctgtactatcggactcaaggatagtgtgaccgcagtggtgtttgtggccctcggcactagcgtcccggacacatttgcttccaaagtggccgcaacacaggaccaatacgcagacgccagcatcggcaacgtgaccggaagtaacgcagtgaacgtctttctcggtataggcgttgcctggtcgatcgcggctatctatcatgcggccaatggagaacaatttaaagtaagtcccggcacacttgccttttctgtgaccctcttcacaatttttgcttttattaatgtgggcgtgttactttaccggcgaaggccggaaattggtggcgaattgggcggcccacggaccgccaagttactcacaagttgcctgtttgtgttgctctggttgttgtacatctttttttccagcctcgaagcatactgccatataaaaggcttctag

SEQ ID NO: 279068 - DNA, 2814 bp, Artificial Sequence
  derived and/or modified sequence
atgtataatatgagaaggctctcactatctcctactttcagcatgggttttcatttactggttacagtgagtctccttttctcccatgtcgaccacgtgatagcagagacggagatggaaggggagggaaacgaaaccggagagtgtacaggaagttactactgtaagaaaggtgtgattctccctatctgggaacctcaagacccctccttcggcgataagatagctagagccactgtgtattttgttgcgatggtgtacatgttcctcggcgtgtccattattgcggaccgatttatgtcaagcatcgaggtcattacttctcaagagaaggagattacaatcaagaaacctaatggtgaaaccaccaagactacagtgagaatttggaatgagactgtttctaacctgactctgatggctttggggagcagcgcgccagagattctgctgagcgtgatcgaagtctgcggacacaattttacggccggagacctcggtccatctactatcgtggggagtgccgcctttaatatgttcattatcattgctctttgcgtctatgtagtgccggatggggagacacggaagattaagcatttacgggtgttctttgtaaccgctgcctggagcatctttgcctacacttggctttatattatcttgtcagtcatctcacctggcgttgttgaggtgtgggagggactcctaactttctttttctttcccatctgcgtcgtgtttgcttgggtagctgacaggcggttgctgttctacaagtatgtttataagaggtaccgagcgggtaaacagcggggtatgatcatagaacacgagggggatcgacctagctcgaagaccgaaatagagatggacgggaaagttgtcaattctcatgtagagaacttcctagacggggccctggtattggaagtagatgagcgtgatcaggatgacgaggaagccagacgggaaatggcccgcatattgaaggaactgaaacaaaaacatcctgataaggaaatcgaacagctgatcgagcttgccaactaccaagttttatctcagcagcaaaaatctcgcgctttttaccgcatccaggccactagattgatgacaggggccggaaacatccttaaacgccacgctgccgaccaggcgaggaaggctgtgagcatgcacgaggtaaacactgaagtgaccgaaaacgaccccgtgtccaagatcttcttcgaacagggcacatatcagtgcctcgaaaactgcggcaccgtggccctaactatcatccggcgcgggggtgacctgactaacaccgtttttgtcgattttcgcactgaagacgggactgcgaatgcagggagcgattacgagttcaccgagggtacagtggtgttcaagccgggggatactcagaaagagatcagagtcggtattattgatgacgacattttcgaagaggacgagaacttcctcgtccacctctctaatgtgaaagtttcatcagaagccagcgaagacggtatcctcgaagccaaccacgtctccacattagcttgtttgggctcgcctagcaccgccaccgtcaccatcttcgatgatgatcatgctggcatttttacctttgaggagcctgtgacccatgtttccgaatccattggcattatggaagttaaggtccttagaactagcggggctaggggaaacgtgatcgtcccttacaagactatagagggcactgctaggggcggaggggaagacttcgaggatacttgcggagaattggagtttcagaacgacgagatcgtaaagatcattacaataaggatctttgatcgcgaggaatacgagaaggaatgcagctttagcctggtcctggaggagccaaagtggattagacgcggcatgaagggaggatttactattaccgatgaatatgatgacaagcagcctttgacatctaaggaggaggaagaaaggagaattgctgagatggggcgccctatccttggcgagcatacgaaactggaggtgatcatcgaggagagttacgaatttaaatcaaccgttgacaagctcataaagaagacaaacttagccctagtggtgggcactaatagttggagagagcagtttatcgaagctatcaccgtgtccgctggtgaagacgatgatgatgatgagtgcggtgaagagaaactaccaagctgctttgactatgtgatgcactttttgacagtcttctggaaagtgctgtttgctttcgtcccacccaccgagtattggaacggctgggcctgcttcatcgtgtctattctgatgattggactgctgactgccttcatcggagatctagctagccatttcggttgtaccattgggctgaaggacagtgtgaccgcggtcgtgtttgtggccctaggcacaagcgtgcccgacaccttcgcatctaaggtagccgccacccaggaccagtatgctgatgcttctatagggaacgtgacagggtccaacgcggtgaacgtattcctgggaatcggagtggcatggagtatagcggcaatataccacgcggccaacggtgagcagttcaaagtgagtcccggcacactggcatttagcgtgacattgtttacgatcttcgcttttattaacgtcggggtcctgctgtatcggcggagaccagagataggcggtgagctcgggggcccacgtaccgcgaaactcctgacatcctgcttgttcgtgctcctatggctcctgtacatctttttctcctcgctggaggcttattgtcacataaagggattctag

SEQ ID NO: 279069 - DNA, 2814 bp, Artificial Sequence
  derived and/or modified sequence
atgtacaacatgcgtcgattgagtttgtctccaactttcagtatgggcttccaccttctggtaacagtgtccctgttgttttcacatgtggaccacgtgatcgccgaaacagaaatggaaggcgaggggaatgagaccggcgaatgtaccggcagctattactgcaagaaaggtgttattctccccatctgggagccccaagacccgtctttcggtgataaaatcgcccgagccacggtttatttcgtggccatggtctatatgttcctgggcgtctctattatcgctgacaggtttatgtcgtccatcgaggtgatcacatcccaggagaaggaaatcaccataaagaaacccaacggcgaaaccactaagacgactgtgcggatttggaacgagacagtcagtaacctgaccttgatggcactgggatcctcagccccagaaatcctcctgagtgtcatcgaagtgtgcggacacaatttcacagccggcgatctgggcccatctaccatcgttggttcagctgctttcaacatgttcataataatagccctttgcgtgtacgtcgtgccagacggcgagacacggaagatcaaacaccttagggtcttctttgtgactgcagcatggtcaatttttgcttatacttggttatacataatcctgtcagtcatttcacccggagtggtcgaagtgtgggaaggcttgctaacctttttcttctttccaatctgcgtggtcttcgcatgggtggcagacaggaggctgctgttctacaaatacgtgtataagcgctacagagcaggcaagcagcgcggtatgattattgagcacgaaggcgaccgcccatcttcaaagaccgaaattgagatggatggaaaggtcgtgaactctcacgtggagaatttcctcgatggcgcgctggtcctagaggtggacgagagggaccaagatgacgaggaggctcgtcgggagatggccagaattcttaaggagctgaaacagaaacacccagataaagagattgagcagctcatagagctcgcgaactatcaggtgctgtcacagcagcaaaaaagtagggcgttctataggatccaggccacaaggctcatgactggtgccgggaacatcttgaagagacacgcagccgaccaggcccgtaaagctgtatctatgcatgaggttaatacggaggtgacagagaatgacccagttagcaagatcttcttcgagcaaggtacttatcagtgtctcgagaactgcggaaccgtggctctcacaatcattagaagggggggcgatctgacaaatacggttttcgtcgattttaggactgaggacggtacggctaacgcaggatccgattacgaattcacagaggggacagtcgtgttcaagcccggcgatacacagaaggagatccgggtaggaataattgacgacgacatcttcgaagaagacgaaaattttcttgttcacctgagcaatgtgaaggtgagttctgaagcatctgaggatggcattttggaagctaaccacgtgagcaccctcgcttgcctggggtctccctcaactgctacagtaaccatcttcgatgatgatcacgccggcatattcacgtttgaagaaccagtgactcacgtgtctgaaagtattggaatcatggaagtgaaggtactcaggacctcaggtgcccggggaaacgtcatcgttccatataaaacaattgagggcactgcaaggggcggcggcgaagatttcgaggacacatgcggggaacttgaattccaaaacgacgagattgtcaaaatcattaccatcagaatttttgacagggaagagtatgagaaggaatgcagcttctccctcgtgttggaggaacctaaatggatccgaaggggtatgaaggaggggttctgttttacggatgagtatgatgataagcaacccctcacttctaaggaggaggaagaaaggaggatcgcagagatgggccgccccatcctgggcgaacacaccaagttggaggtcatcatcgaagagagctacgagtttaaatccaccgtggataaactcatcaagaagactaacctggccctcgttgttggtaccaatagctggcgggaacagttcattgaggcaatcacagtctccgcgggtgaggacgacgatgacgacgagtgtggtgaggaaaaactgccctcgtgctttgactacgtgatgcattttctgaccgtgttctggaaggtgctgttcgcatttgttcctcctacagaatattggaatggatgggcatgcttcattgtgagcatcctgatgattggcctgttgaccgcatttattggagatttagcatcacatttcggatgtacaataggccttaaagattcagttactgcagttgtgtttgtagcgctagggaccagcgtcccagacacgtttgcaagcaaagtggccgccactcaggatcagtacgctgatgcttccatagggaacgtaacaggttcaaatgccgtgaatgtgttccttgggattggcgtggcgtggagcatagcggccatttaccatgctgcaaatggggaacaattcaaagtcagccccggaaccctggcattctcagttaccctgtttactatcttcgcgttcattaatgtgggcgtgctactgtatcggcgaaggccggagattgggggggaactgggcggacctagaacagcgaaactcttgacctcatgtctgtttgttttactgtggctgctgtacatctttttctcctctctcgaagcatactgtcacataaagggtttttag
